United States Patent Application Publication US 2023/0272434 A1 - sequence listing, part 2

SEQ ID NO: 1597 - protein, 958 aa, Bembecia ichneumoniformis
MSQKAGPSSSGHNLVQCPICLKPKFLKGNNGLKIHIGRVHKSALQVSEDCSPVLIAPSSSPFWQTLSNLKNNYPIIKRIPRGARISVANSLSQSIKCVIQNNDRESWEQLFTFPYHTLHVNKKERGSASLTQKIKDNCSSANIPLQSQESQQNKKIFRPYSIIRKVEDKINVGDIKGAAQLLFSNDAIAPDSPETLSALHSKHPPADPTMQLPDPPLPSDQILIANVDEVRATILSFRSGSAGGLDGLSPQHYKDLIGDTAGNAGQTLLNDIVELVNLVLAGKVCPEIIDILYGASLCALVKKDGGIRPIAVGNTIRRIVSKVCCKQVLPDLTKLFQPIQLGFGSKGGCEAAVHSARTFLELNGGEVLVKVDMKNAFNSVDRGALLSQIKEKAPLIYSYMWQCYGSPSKLIFKNNLILSAVGCQQGDPLGPAIFSLAIHPAISEILSKFNVWYLDDGTFGGESSQVLKDLEMLIMEFKKIGLELNYSKCELYVAQSVSEQIKIDIISKFNSLAPNIKILDRESLHLLGSPVLLDSIPNFLNNQLTKFSTTSSRLREIHPHMALTIIRYCVFSPKFIYYLRCCPFWREESKLKPFDDLIRKTLSEILNCSFDDRSWCQASLPVRHGGLGIRKISSVALPAFLSSGYSTYNLFGKILSPSLGDVEVTYLAEAKDAWSHSCPNQNYPCPQSFKSQKAWDDPICSFVQRNLIETSLNPTDRARLLAAVEHESGYWLHALPSANIGTLLERSTLTFAVCLRLGAKTNEPHVCKCGARVHQLGHHGLSCQRSAGRLSRHGNLNDIIRRALATVNVPAVLEPTGIARDDGKRPDGLTLIPWSRGRSLVWDVTCVDTVAPSHIQTTSNKAGAAASNAESPKMRKYSGLGEGYIFSPFGVETLGPWGPEAKQLFNELSSRLIEATGDRRAGAYLGQRLSLAIQRGNAASLLGTIPQGTRLEQIFYLF

SEQ ID NO: 1598 - protein, 958 aa, Bembecia ichneumoniformis
MSQKAGPSSSGHNLVQCPICLKPKFLKGNNGLKIHIGRVHKSALQVSDDCSPVLIAPSSSPFWQTLSNLKNNYPIIKRIPRGARISVANSLSQSIKCVIQNNDRESWEQLFTFPYHTLHVNKKERGSASLTQKIKDNCSSANIPLQSQESQQNKKIFRPYSIIRKVEDKINVGDIKGAAQLLFSNDAIAPDSPETLSALHSKHPPADPTMQLPDPPLPSDQILIANVDEVRATILSFRSGSAGGLDGLSPQHYKDLIGDTAGDAGQTLLNDIVELVNLMLAGKVCPEIIDILYGASLCALVKKDGGIRPIAVGNTIRRIVSKVCCKQVLPDLTKLFQPIQLGFGSKGGCEAAVHSARTFLELNGGEVLVKVDVKNAFNSVDRGALLSQIKEKAPLIYSYMWQCYGSPSKLIFKNNLILSAVGCQQGDPLGPAIFSLAIHPAISEILSKFNVWYLDDGTFGGESSQVLKDLEMLIMEFKKTGLELNYSKCELYVAQSVSEQIKIDIISKFNSLAPNIKILDRESLHLLGSPVLLDSIPNFLNNQLTKFSTTSSRLREIHPHMALTIIRYCVFSPKFIYYLRCCPFWREESKLKPFDDLIRKTLSENLNCSFDDRSWCQASLPVRHGGLGIRKISSVALPAFLSSGYSTYNLFGKILSPSLGDVEVTYLAEAKDAWSHSCPNQNYPCPQSFKSQKAWDDPICSFVQRNLIETSLNPTDRARLLAAVEHESGYWLHALPSANIGTLLERSTLTFAVCLRLGAKTNEPHVCKCGARVHQLGHHGLSCQRSAGRLSRHGNLNDIIRRALATVNVPAVLEPTGIARDDGKRPDGLTLIPWSRGRSLVWDVTCVDTVAPSHIQTTSNKADAAASNAESLKMRKYSGLGEGYIFSPFGVETLGPWGPEAKQLFNELSSRLIEATGDRRAGAYLGQRLSLAIQRGNAASLLGTIPQGTRLEQIFYLF

SEQ ID NO: 1599 - protein, 958 aa, Bembecia ichneumoniformis
MSQKAGPSSNGHNLVQCPICLKPKFLKGNNGLKIHIGRVHKSALQVSDDCSPVLIAPSSSPFWQTLSNLKNNYPIIKRIPRGARISVANSLSQSIKCVIQNNDRESWEQLFTFPYHTLHVNKKERGSASLTQKIKDNCSSANIPLQSQESQQNKKIFRPYSIIRKVEDKINVGDIKGAAQLLFSNDAIAPDSPETLSALHSKHPPADPTMQLPDPPLPSDQILIANVDEVRATILSFRSGSAGGLDGLSPQHYKDLIGDTAGDAGQTLLNDIVELVNLMLAGKVCPEIIDILYGASLCALVKKDGGIRPIAVGNTIRRIVSKVCCKQVLPDLTKLFQPIQLGFGSKGGCEAAVHSARTFLELNGGEVLVKVDVKNAFNSVDRGALLSQIKEKAPLIYSYMWQCYGSPSKLIFKNNLILSAVGCQQGDPLGPAIFSLAIHPAISEILSKFNVWYLDDGTFGGESSQVLKDLEMLIMEFKKIGLELNYSKCELYVAQSVSEPIKIDIISKFNSLAPNIKILDRESLHLLGSPVLLDSIPNFLNNQLTKFSTTSSRLREIHPHMALTIIRYCLFSPKFIYYLRCCPFWREESKLKPFDDLIRKTLSEILNCSFDDRSWCQASLPVRHGGLGIRKISSVALPAFLSSGYSTYNLFGKILSPSLGDVEVTYLAEAKDAWSQSCPNQNYPCPQSFKSQKAWDDPICSFVQRNLLETSLNPTDRARLLAAVEHESGYWLHALPSANIGTLLERSTLTFAVCLRLGAKTNEPHVCKCGARVHQLGHHGLSCQRSAGRLSRHGNLNDIIRRALATVNVPAVLEPTGIARDDGKRPDGLTLIPWSRGRSLVWDVTCVDTVAPSHIQTTSNKAGAAASNAESLKMRKYSGLGEGYIFSPFGVETLGPWGPEAKQLFNELSSRLIEATGDRRAGAYLGQRLSLAIQRGNAASLLGTIPQGTRLEQIFYLF

SEQ ID NO: 1600 - protein, 958 aa, Bembecia ichneumoniformis
MSQKAGPSSNGHNLVQCPICLKPKFLKGNNGLKIHIGRVHKSALQVSDDCSPVLIAPSSSPFWQTLSNLKNNYPIIKRIPRGARISVANSLSQSIKCVIQNNDRESWEQLFTFPYHTLHVNKKERGSASLTQKIKDNCSSANIPLQSQESQQNKKIFRPYSIIRKVEDKINVGDIKGAAQLLFSNDAIAPDSPETLSALHSKHPPADPTMQLPDPPLPSDQILIANVDEVRATILSFRSGSAGGLDGLSPQHYKDLIGDTAGDAGQTLLNDIVELVNLMLAGKVCPEIIDILYGASLCALVKKDGGIRPIAVGNTIRRIVSKVCCKQVLPDLTKLFQPIQLGFGSKGGCEAAVHSARTFLELNGGEVLVKVDVKNAFNSVDRGALLSQIKEKAPLIYSYMWQCYGSPSKLIFKNKLILSAVGCQQGDPLGPAIFSLAIHPAISEILSKFNVWYLDDGTFGGESSQVLKDLEMLIMEFKKIGLELNYSKCELYVAQSVSEPIKIDIISKFNSLAPNIKILDRESLHLLGSPVLLDSIPNFLNNQLTKFSTTSSRLREIHPHMALTIIRYCLFSPKFIYYLRCCPFWREESKLKPFDDLIRKTLSEILNCSFDDRSWCQASLPVRHGGLGIRKISSVALPAFLSSGYSTYNLFGKILSPSLGDVEVTYLAEAKDAWSQSCPNQNYPCPQSFKSQKAWDDPICSFVQRNLLETSLNPTDRARLLAAVEHESGYWLHALPSANIGTLLERSTLTFAVCLRLGAKTNEPHVCKCGARVHQLGHHGLSCQRSAGRLSRHGNLNDIIRRALATVNVPAVLEPTGIARDDGKRPDGLTLIPWSRGRSLVWDVTCVDTVAPSHIQTTSNKAGAAASNAESLKMRKYSGLGEGYIFSPFGVETLGPWGPEAKQLFNELSSRLIEATGDRRAGAYLGQRLSLAIQRGNAASLLGTIPQGTRLEQIFYLF

SEQ ID NO: 1601 - protein, 958 aa, Bembecia ichneumoniformis
MSQKAGPSSSGHNLVQCPICLKPKFLKGNNGLKIHIGRVHKSALQVSDDCSPVLIAPSSSPFWQTLSNLKNNYPIIKRIPRGARISVANSLSQSIKCVIQNNDRESWEQLFTFPYHTLHVNKKERGSASLTQKIKDNCSSANIPLQSQESQQNKKIFRPYSIIRKVEDKINVGDIKGAAQLLFSNDAIAPDSPETLSALHSKHPPADPTMQLPDPPLPSDQILIANVDEVRATILSFRSGSAGGLDGLSPQHYKDLIGDTAGDAGQTLLNDIVELVNLMLAGKVCPEIIDILYGASLCALVKKDGGIRPIAVGNTIRRIVSKVCCKQVLPDLTKLFQPIQLGFGSKGGCEAAVHSARTFLELNGGEVLVKVDVKNAFNSVDRGALLSQIKEKAPLIYSYMWQCYGSPSKLIFKNKLILSAVGCQQGDPLGPAIFSLAIHPAISEILSKFNVWYLDDGTFGGESSQVLKDLEMLIMEFKKIGLELNYSKCELYVAQSVSEPIKIDIISKFNSLAPNIKILDRESLHLLGSPVLLDSIPNFLNNQLTKFSTTSSRLREIHPHMALTIIRYCLFSPKFIYYLRCCPFWREESKLKPFDDLIRKTLSEILNCSFDDRSWCQASLPVRHGGLGIRKISSVALSAFLSSGYSTYNLFGKILSPSLGDVEVTYLAKAKDAWSQSCPNQKYPCPQSFKSQKAWDDPICSFVQRNLLETSLNPTDRARLLAAVEHESGYWLHALPSANIGTLLERSTLTFAVCLRLGAKTNEPHVCKCGARVHQLGHHGLSCQRSAGRLSRHGNLNDIIRRALATVNVPAVLEPTGIARDDGKRPDGLTLIPWSRGRSLVWDVTCVDTVAPSHIQTTSNKAGAAASNAESLKMRKYSGLGEGYIFSPFGVETLGPWGPEAKQLFNELSSRLIEATGDRRAGAYLGQRLSLAIQRGNAASLLGTIPQGTRLEQIFYLF

SEQ ID NO: 1602 - protein, 896 aa, Bembecia ichneumoniformis
MSQKAGPSSSGHNLAQCPICLKPKFLKGNNGLKIHIGRVHKSALQVSDDCSPVLIAPSSSPFWQTLSNLKNNYPIIKRIPRGARISVANSLSQSIKCVIQNNDRESWEQLFTFPYHTLHVNKKERGSASLTQKIKDNCSSANIPLQSQESQQNKKIFRPYSIIRKVEDKINVGDIKGAAQLLFSNDAIAPDSPETLSALHSKHPPADPTMQLLDPPLPSDQILIANVDEVRATILSFRSGSAGGLDGLSPQHYKDLIGDTAGDAGQTLLNDIVELVNLMLAGKVGPEIIDILYGASLCALVKKDGGIRPIAVGNTIRRIVSKVCCKQVLPDLTKLFQPIQLGFGSKGGCEAAVHSARTFLELNGGEVLVKVDVKNAFNSVDRGALLSQIKEKAPLIYSYMWQCYGSPSKLIFKNNLILSVVGCQQGDPLGPAIFSLAIHPAISEILSKFNVWYLDDGTFGGESSQVLKDLEMVIMEFKKIGLELNYSKCELYVAQSVSEQIKIDIISKFNSLAPNIKILDRESLHLLGSPVLLDSIPNFLNNQLTKFFTISSRLREIHPHMALTIIRYCVFSPKFIYYLRCCPFWREESKLKPFDDLIRKTLSEILNCSFDDRSWCQASLPVRHGGLGIRKISSVALPAFLSSGYSTYNLFGKILSPSLGDVEVTYLAEAKDAWSHSCPNQNYPCPQSFKSQKAWDDPICSFVQRNLIETSLNPTDRARLLAAVEHESGYWLHALPSANIGTLLERSTLTFAVCLRLGAKTNEPHVCKCGARVHQLGHHGLSCQRSAGRLSRHGNLNDIIRRALATVNVPAVLEPTGIARDDGKRPDGLTLIQWSRGRSLVWDVTCVDTVAPSHIQTTSNKAGAAASNAESLKMCKYSGLGEGYIFSPFGVETLGP

SEQ ID NO: 1603 - protein, 956 aa, Bembecia ichneumoniformis
MADDNDQLPSSSTDSITCPICQNERLFRGKRGLNIHLSRCHLVKSTVNTSSRSHYTPACSSASKTTTTQTLSEKIAYLKTEVRVLRRIPKGVRILVADKLCDIIIRCISKNDLKSWEDLLCFAYINLQIPPRTKNISLVQHIRENLKKNSYEPTIVQQKTSSSISTRVEAKVGEGDIRGAVRLLSSSADLAPCDNAVLTLLRHKPPSPSRPLCLPEEPSSPNDCLEVSEEKVLNGIASFPQGSASGLDGMRPQHLKDLIGFSSGDAGRRLLFQITKLCNFMLSGSVHVEACQYLYGASLCALYKKDGGIRPIAVGNVIRRLVGKLVCTITRDSAAARYLQPTQVGFATPRGCEAAIHSVRTFIDVNNSTNKILIKIDLKNAFNSIERDVLLSAVKEKMPAIYAFMWQCYSADSYLFFGKHTIMSRVGAQQGDPLGPLIFSLGIHSTIENLKSELNIWYLDDGTLAGDADSVISDLLTLKTELYKMGLEVNAEKCEIYFCSTYDNDTFTRVEKALPSIRIVTDLSLLGAPVNIAAGPLLLKKKEENLKLLLDRLKTINSHVAYLILKNCFSIPKLTYIIRTTPLWFFPDFVFNFDNGIKKILESIFNIKINNSQYLQASLPIRHGGLGIRRVADLILPAFLASAYGVSELVSIILPSSGDKLEISHLPAAKALWEDLCPNSVEPMPNSRIFQKFWDQQNVNRIISNLTFDTVDEEARFKAVCTYESGAWLNTLPSRQMSTLLDNNTMRISVALRLGCSVVQPHTCLCGNRVLSNGRHGLHCKRSAGRFPRHSMINDIIKKALSTAGVPAILEPNPSRDDGKRPDGMTLIPWSEGKALVWDATCVDTLAPSHVAFSAKEPGSAAESAARLKTKKYNFIKSQNYNFIPFAVETFGPWCEESKLFLKTLGKQLIKVSGNKFSCNYLRQRISLAIQRGNAASVMGTIPDSVTLEEIFYPNS

SEQ ID NO: 1604 - protein, 705 aa, Bembecia ichneumoniformis
MRPQHLKDLIGFSSGDAGRRLLFQITKLCNFMLSGSVHVEACQYLYGASLCALYKKDGGIRPIAVGNVIRRLVGKLVCTITRDSAAARYLQPTQVGFATPRGCEAAIHSVRTFIDVNNSTNKILIKIDLKNAFNSIERDVLLSAVKEKMPAIYAFMWQCYSADSYLFFGKHTIMSRVGAQQGDPLGPLIFSLGIHSTIENLKSELNIWYLDDGTLAGDADSVISDLLTLKTELYKMGLEVNAEKCEIYFCSTYDNDTFTRVEKALPSIRIVTDLSLLGAPVNIAAGPLLLKKKEENLKLLLDRLKTINSHVAYLILKNCFSIPKLTYIIRTTPLWFFPDFVFNFDNGIKKILESIFNIKINNSQYLQASLPIRHGGLGIRRVADLILPAFLASAYGVSELVSIILPSSGDKLEISHLPAAKALWEDLCPNSVEPMPNSRIFQKFWDQQNVNRIISNLTFETVDEEARFKAACTYESGAWLNTLPSRQMSTLLDNNTMRISVALRLGCSVVQPTVLQCSVLSNGRHGLHCKRSAGRFPRHSMINDIIKKALSTAGVPAILEPNLSRDDGKRPDGMTLIPWSEGKALVWDATCVDTLAPSHVAFSAKEPGSAAESAARLKTKKYNFIKSQNYNFIPFAVETFGPWCEESKLFLKTLGKQLIKVSGNKFSCNYLRQRISLAIQRGNAASVMGTIPDSVTLEEIFYPNS

SEQ ID NO: 1605 - protein, 707 aa, Bembecia ichneumoniformis
MRPQHLKDLIGFSSGDAGRRLLFQITKLCNFMLSGSVHVEACQYLYGASLCALYKKDGGIRPIAVGNVIRRLVGKLVCTITRDSAAARYLQPTQVGFATPRGCEAAIHSVRTFIDVNNSTNKILIKIDLKNAFNSTERDVLLSAVKEKMPAIYAFMWQCYSADSYLFFGKHTIMSRVGAQQGDPLGPLIFSLGIHSTIENLKSELNIWYLDDGTLAGDADSVISDLLTLKTELYKMGLEVNAEKCEIYFCSTYDNDTFTRVEKALPSIRIVTDLSLLGAPVNIAAGPLLLKKKEENLKLLLDRLKTINSHVAYLILKNCFSIPKLTYIIRTTPLWFFPDFVFNFDNGIKKILESIFNIKINNSQYLQASLPIRHGGLGIRRVADLILPAFLASAYGVSELVSIILPSSGDKLEISHLPAAKALWEDLCPNSVEPMPNSRIFQKFWDQQNVNRIISNLTFDTVDEEARFKAACTYESGAWLNTLPSRQMSTLLDNNTMRISVALRLGCSVVQPHTCLCGNSVLSNGRHGLHCKRSAGRFPRHSMINDIIKKALSTAGVPAILEPNLSRDDGKRPDGMTLIPWSEGKALVWDATCVDTLAPSHVAFSAKEPGSAAESAARLKTKKYNFIKSQNYNFIPFAVETFGPWCEESKLFLKTLGKQLIKVSGNKFSCNYLRQRISLAIQRGNAASVMGTIPDSVTLEEIFYPNS

SEQ ID NO: 1606 - protein, 958 aa, Bembecia ichneumoniformis
MAGDNDQLPSSSTDSITCPICQNERLFRGKRGLNIHLSRCHLVKSTVNTSSRSHYASTPACSSASKTTTTQTLSEKIAYLKTEVRVLRRIPKGVRILVADKLCDIIIRCISKNDLKSWEDLLCFAYINLQIPPRTKNISLVQHIRENLKKNSYEPTIVQQKTSSSISTRVEAKVGEGDIRGAVRLLSSSADLAPCDNAVLTLLRHKHPSPSRPLCLPEEPSSPNDCLEVSEEKVLNGIASFPQGSASGLDGMRPQHLKDLIGFSSGDAGRRLLFQITKLCNFMLSGSVHVEACQYLYGASLCALYKKDGGIRPIAVGNVIRRLVGKLVCTITRDSAAARYLQPTQVGFATPRGCEAAIHSVRTFIDVNNSTNKILIKIDLKNAFNSIERDVLLSAVKEKMPAIYAFMWQCYSADSYLFFGKHTIMSRVGAQQGDPLGPLIFSLGIHSTIENLKSELNIWYLDDGTLAGDADSVISDLLTLKTELYKMGLEVNAEKCEIYFCSTYDNDTFTRVEKALPSIRIVTDLSLLGAPVNIAAGPLLLKKKEENLKLLLDRLKTINSHVAYLILKNCFSIPKLTYIIRTTPLWFFPDFVFNFDNGIKKILESIFNIKINNSQYLQASLPIRHGGLGIRRVADLILPAFLASAYGVSELVSIILPSSGDKLEISHLPAAKALWEDLCPNSVEPMPNSRIFQKFWDQQNVNRIISNLTFDMVDEEARFKAACTYESGAWLNTLPSRQMSTLLDNNTMRISVALRLGCSVVQPHTCLCGNSVLSNGRHGLHCKRSAGRFPRHSMINDIIKKALSTAGVPAILEPNLSRDDGKRPDGMTLIPWSEGKALVWDATCVDTLAPSHVAFSAKEPGSAAESAARLKTKKYNFIKSQNYNFIPFAVETFGPWCEESKLFLKTLGKQLIKVSGNKFSCNYLRQRISLAIQRGNAASVMGTIPDSVTLEEIFYPNS

SEQ ID NO: 1607 - protein, 958 aa, Bembecia ichneumoniformis
MAGDNDQLPSSSTDSITCPICQNERLFRGKRGLNIHLSRCHLVKSTVNTSSRSHYASTPACSSASKTTTTQTLSKKIAYLKTEVRVLRRIPKGVRILVADKLCDIIIRCISKNDLKSWEDLLCFAYINLQIPPRTKNISLVQHIRENLKKNSYEPTIVQQKTSSSISTRVEAKVGEGDIRGAVRLLSSSADLAPCDNAVLTLLRHKHPSPSRPLCLPEEPSSPNDCLEVSEEKVLNGIASFPQGSASGLDGMRPQHLKDLIGFSSGDAGRRLLFQITKLCNFMLSGSVHVEACQYLYGASLCALYKKDGGIRPIAVGNVIRRLVGKLVCTITRDSAAARYLQPTQVGFATPRGCEAAIHSVRTFIDVNNSTNKILIKIDLKNAFNSIERDVLLSAVKEKMPAIYAFMWQCYSADSYLFFGKHTIMSRVGAQQGDPLGPLIFSLGIHSTIENLKSELNIWYLDDGTLAGDADSVISDLLTLKTELYKMGLEVNAEKCEIYFCSTYDNDTFTRVEKALPSIRIVTDLSLLGAPVNIAAGPLLLKKKEENLKLLLDRLKTINSHVAYLILKNCFSIPKLTYIIRTTPLWFFPDFVFNFDNGIKKILESIFNIKINNSQYLQASLPIRHGGLGIRRVADLILPAFLASAYGVSELVSIILPSSGDKLEISHLPAAKALWEDLCPNSVEPMPNSRIFQKFWDQQNVNRIISNLTFDTVDEEARFKAACTYESGAWLNTLPSRQMSTLLDNNTMRISVALRLGCSVVQPHTCLCGNSVLSNGRHGLHCKRSAGRFPRHSMINDIIKKALSTAGVPAILEPNLSRDDGKRPDGMTLIPWSEGKALVWDATCVDTLAPSHVAFSAKEPGSAAESAARLKTKKYNFIKSQNYNFIPFAVETFGPWCEESKLFLKTLGKQLIKVSGNKFSCNYLRQRISLAIQRGNAASVMGTIPDSVTLEEIFYPNS

SEQ ID NO: 1608 - protein, 707 aa, Bembecia ichneumoniformis
MRPQHLKDLIGFSSGDAGRRLLFQITKLCNFMLSGSVHVEACQYLYGASLCALYKKDGGIRPIAVGNVIRRLVGKLVCTITRDSAAARYLQPTQVGFATPRGCEAAIHSVRTFIDVNNSTNKILIKIDLKNAFNSIERDVFLSAVKEKMPAIYAFMWQCYSADSYLFFGKHTIMSRVGAQQGDPLGPLIFSLGIHSTIENLKSELNIWYLDDGTLAGDADSVISDLLTLKTELYKMGLEVNAEKCEIYFCSTYDNDTFTRVEKALPSIRIVTDLSLLGAPVNIAAGPLLLKKKEENLKLLLDRLKTINSHVAYLILKNCFSIPKLTYIIRTTPLWFFPDFVFNFDNGIKKILESIFNIKINNSQYLQASLPIRHGGLGIRRVADLILPAFLASAYGVSELVSIILPSSGDKLEISHLPAAKALWEDLCPNSVEPMPNSRIFQKFWDQQNVNRIISNLTFDTVDEEARFKAACTYESGAWLNTLPSRQMSTLLDNNTMRISVALRLGCSVVQPHTCLCGNSVLSNGRHGLHCKRSAGRFPRHSMINDIIKKALSTAGVPAILEPNLSRDDGKRPDGMTLIPWSEGKALVWDATCVDTLAPSHVAFSAKEPGSAAESAARLKTKKYNFIKSQNYNFIPFAVETFGPWCEESKFFIKTLGKQLIKVSGNKFSCNYLRQRISLAIQRGNAASVMGTIPDSVTLEEIFYPNS

SEQ ID NO: 1609 - protein, 958 aa, Bembecia ichneumoniformis
MAGDNDQLPSSSTDSITCPICQNERLFRGKRGLNIHLSRCHLVKSTVNTSSRSHYASTPACSSASKTTTTQTLSEKIAYLKTEVRVLRRIPKGVRILVADKLCDIIIRCISKNDLKSWEDLLCFAYINLQIPPRTKNISLVQHIRENLKKNSYEPTIVQQKTSSSISTRVEAKVGEGDIRGAVRLLSSSADLAPCDNAVLTLLRHKHPSPSRPLCLPEEPSSPNDCLEVSEEKVLNGIASFPQGSASGLDGMRPQHLKDLIGFSSGDAGRRLLFQITKLCNFMLSGSVHVEACQYLYGASLCALYKKDGGIRPIAVGNVIRRLVGKLVCTITRDSAAARYLQPTQVGFATPRGCEAAIHSVRTFIDVNNSTNKILIKIDLKNAFNSIERDVLLSAVKEKMPAIYAFMWQCYSADSYLFFGKHTIMSRVGAQQGDPLGPLIFSLGIHSTIENLKSELNIWYLDDGTLAGDADSVISDLLTLKTELYKMGLEVNAEKCEIYFCSTYDNDTFTRVEKALPSIRIVTDLSLLGAPVNIAAGPLLLKKKEENLKLLLDRLKTINSHVAYLILKNCFSIPKLTYIIRTTPLWFFPDFVFNFDNGIKKILESIFNIKINNSQYLQASLPIRHGGLGIRRVADLILPAFLASAYGVSELVSIILPSSGDKLEISHLPAAKALWEDLCPNSVEPMPNSRIFQKFWDQQNVNRIISNLTFDTVDEEARFKAACTYESGAWLNTLPSRQMSTLLDNNTMRISVALRLGCSVVQPHTCLCGNSVLSNGRHGLHCKRSAGRFPRHSMINDIIKKALSTAGVPAILEPNLSRDDGKRPDGMTLIPWSEGKALVWDATCVDTLAPSHVAFSAKEPGSAAESAARLKTKKYNFIKSQNYNFIPFAVETFGPWCEESKLFLKTLGKQLIKVSGNKFSCNYLRQRISLAIQRGNAASVMGTIPDSVTLEEIFYPNS

SEQ ID NO: 1610 - protein, 958 aa, Bembecia ichneumoniformis
MAGDNDQLPSSSTDSITCPICQNERLFRGKRGLNIHLSGCHLVKSTVNTSSRSHYASTPACSSASKTTTTQTLSEKIAYLKTEVRVLRRIPKGVRILVADKLCDIIIRCISKNDLKSWEDLLCFAYINLQIPPRTKNISLVQHIRENLKKNSYEPTIVQQKTSSSISTRVEAKVGEGDIRGAVRLLSSSADLAPCDNAVLTLLRHKHPSPSRPLCLPEEPSSPNDCLEVSEEKVLNGIASFPQGSASGLDGMRPQHLKDLIVFSSGDAGRRLLFQITKLCNFMLSGSVHVEACQYLYGASLCALYKKDGGIRPIAVGNVIRRLVGKLVCTITRDSAAARYLQPTQVGFATPRGCEAAIHSVRTFIDVNNSTNKILIKIDLKNAFNSIERDVLLSAVKEKMPAIYAFMWQCYSADSYLFFGKHTIMSRVGAQQGDPLGPLIFSLGIHSTIENLKSELNIWYLDDGTLAGDADSVISDLLTLKTELYKMGLEVNAEKCEIYFCSTYDNDTFTRVEKAMPSIRIVTDLSLLGAPVNIAAGPLLLKKKEENLKLLLDRLKTINSHVAYLILKNCFSIPKLTYIIRTTPLWFFPDFVFNFDNGIKKILESIFNIKINNSQYLQASLPIRHGGLGIRRVADLILPAFLASAYGVSELVSIILPSSGDKLEISHLPAAKALWEDLCPNSVEPMPNSRIFQKFWDQQNVNRIISNLTFDTVDEEARFKAACTYESGAWLNTLPSRQMSTLLDNNTMRISVALRLGCSVVQPHTCLCGNSVLSNGRHGLHCKRSAGRFPRHSMINDIIKKALSTAGVPAILEPNLSRDDGKRPDGMTLIPWSEGKALVWDATCVDTLAPSHVAFSAKEPGSAAESAARLKTKKYNFIKSQNYNFIPFAVETFGPWCEESKLFLKTLGKQLIKVSGNKFSCNYLRQRISLAIQRGNAASVMGTIPDSVTLEEIFYPNS

SEQ ID NO: 1611 - protein, 958 aa, Bembecia ichneumoniformis
MAGDNDQLPSSSTDSITCPICQNERLFRGKRGLNIHLSRCHLVKSTVNTSSRSHYASTPACSSASKTTTTQTLSEKIAYLKTEVRVLRRIPKGVRILVADKLCDIIIRCISKNDLKSWEDLLCFAYINLQIPTRTKNISLVQHIRENLKKNSYEPTIVQQKTSSSISTRVEAKVGEGDIRGAVRLLSSSADLAPCDNAVLTLLRHKHPSPSRPLCLPEEPSSPNDCLEVSEEKVLNGIASFPQGSASGLDGMRPQHLKDLIGFSSGDAGRRLLFQITKLCNFMLSGSVHVEACQYLYGASLCALYKKDGGIRPIAVGNVIRRLVGKLVCTITRDSAAARYLQPTQVGFATPRGCEAAIHSVRTFIDVNNSTNKILIKIDLKNAFNSIERDVLLSAVKEKMPAIYAFMWQCYSADSYLFFGKHTIMSRVGAQQGDPLGPLIFSLGIHSTIENLKSELNIWYLDDGTLAGDADSVISDLLTLKTELYKMGLEVNAEKCEIYFCSTYDNDTFTRVEKALPSIRIVTDLSLLGAPVNIAAGPLLLKKKEENLKLLLDRLKTINSHVAYLILKNCFSIPKLTYIIRTTPLWFFPDFVFNFDNGIKKILESIFNIKINNSQYLQASLPIRHGGLGIRRVADLILPAFLASAYGVSELVSIILPSSGDKLEISHLPAAKALWEDLCPNSVEPMPNSRIFQKFWDQQNVNRIISNLTFDTVDEEARFKAACTYESGAWLNTLPSRQMSTLLDNNTMRISVALRLGCSVVQPHTCLCGNSVLSNGRHGLHCKRSAGRFPRHSMINDIIKKALSTAGVPAILEPNLSRDDGKRPDGMTLIPWSEGKALVWDATCVDTLAPSHVAFSAKEPGSAAESAARLKTKKYNFIKSQNYNFIPFAVETFGPWCEESKLFLKTLGKQLIKVSGNKFSCNYLRQRISLAIQRGNAASVMGTIPDSVTLEEIFYPNS

SEQ ID NO: 1612 - protein, 958 aa, Bembecia ichneumoniformis
MADDNDQLPSSSTDSITCPICQNERLFRGKRGLNIHLSRCHLVKSTVNTSSRSHYASTPACSSASKTTTTQTLSEKIAYLKTEVRVLRRIPKGVRILVADKLCDIIIRCISKNDLKSWEDLLCFAYINLQIPPRTKNISLVQHIRENLKKNSYEPTIVQQKTSSSISTRVEAKVGEGDIRGAVRLLSSSADLAPCDNAVLTLLRHKHPSPSRPLCLPEEPSSPNDCLEVSEEKVLNGIASFPQGSASGLDGMRPQHLKDLIGFSSGDAGRRLLFQITKLCNFMLSGSVHVEACQYLYGASLCALYKKDGGIRPIAVGNVIRRLVGKLVCTITRDSAAARYLQPTQVGFATPRGCEAAIHSVRTFIDVNNSTNKILIKIDLKNAFNSIERDVLLSAVKEKMPAIYAFMWQCYSADSYLFFGKHTIMSRVGAQQGDPLGPLIFSLGIHSTIENLKSELNIWYLDDGTLAGDADSVISDLLTLKTELYKMGLEVNAEKCEIYFCSTYDNDTFTRVEKALPSIRIVTDLSLLGAPVNIAAGPLLLKKKEENLKLLLDRLKTINSHVAYLILKNCFSIPKLTYIIRTTPLWFFPDFVFNFDNGIKKILESIFNIKINNSQYLQASLPIRHGGLGIRRVADLILPAFLASAYGVSELVSIILPSSGDKLEISHLPAAKALWEDLCPNSVEPMPNSRIFQKFWDQQNVNRIISNLTFDTVDEEARFKAACTYESGAWLNTLPSRQMSTLLDNNTMRISVALRLGCSVVQPHTCLCGNRVLSNGRHGLHCKRSAGRFPRHSMINDIIKKALSTAGVPAILEPNLSRDDGKRPDGMTLIPWSEGKALVWDATCVDTLAPSHVAFSAKEPGSAAESAARLKTKKYNFIKSQNYNFIPFAVETFGPWCEESKLFLKTLGKQLIKVSGNKFSCNYLRQRISLAIQRGNAASVMGTIPDSVTLEEIFYPNS

SEQ ID NO: 1613 - protein, 958 aa, Bembecia ichneumoniformis
MADDNDQLPSSSTDSITCPICQNERLFRGKRGLNIHLSRCHLVKSTVNTSSRSHYASTPACSSASKTTTTQTLSEKIAYLKTEVRVLRRIPKGVRILVADKLCDIIIRCISKNDLKSWEDLLCFAYINLQIPPRTKNISLVQHIRENLKKNSYEPTIVQQKTSSSISTRVEAKVGEGDIRGAVRLLSSSADLAPCDNAVLTLLRHKHPSPSRPLCLPEEPSSPNDCLEVSEEKVLNGIASFPQGSASGLDGMRPQHLKDLIGFSSGDAGRRLLFQITKLCNFMLSGSVHVEACQYLYGASLCALYKKDGGIRPIAVGNVIRRLVGKLVCTITRDSAAARYLQPTQVGFATPRGCEAAIHSVRTFIDVNNSTNKILIKIDLKNAFNSIERDVLLSAVKEKMPAIYAFMWQCYSADSYLFFGKHTIMSRVGAQQGDPLGPLIFSLGIHSTIENLKSELNIWYLDDGTLAGDADSVISDLLTLKTELYKMGLEVNAEKCEIYFCSTYDNDTFTRVEKALPSIRIVTDLSLLGAPVNIAAGPLLLKKKEENLKLLLDRLKTINSHVAYLILKNCFSIPKLTYIIRTTPLWFFPDFVFNFDNGIKKILESIFNIKINNSQYLQASLPIRHGGLGIRRVADLILPAFLASAYGVSELVSIILPSSGDKLEISHLPAAKALWEDLCPNSVEPMPNSRIFQKFWDQQNVNRIISNLTFDTVDEEARFKAACTYESGAWLNTLPSRQMSTLLDNNTMRISVALRLGCSVVQPHTCLCGNRVLSNGRHGLHCKRSAGRFPRHSMINDIIKKALSTAGVPAILEPNLSRDDGKRPDGMTLIPWSEGKALVWDATCVDTLAPSHVAFSAKEPGSAAESAARLKTKKYNFIKSQNYNFIPFAVETFGPWCEESKLFLKTLGKQLIKVSGNKFSCNYLRQRISLAIQRGNAASVMGTIPDSVTLEEISYPNS

SEQ ID NO: 1614 - protein, 958 aa, Bembecia ichneumoniformis
MAGDNDQLPSSSTDSITCPICQNERLFRGKRGLNIHLSRCHLVKSTVNTSSRSHYASTPACSSASKTTTTQTLSEKIAYLKTEVRVLRRIPKGVRILVADKLCDIFIRCISKNDLKSWEDLLCFAYINLQIPPRTKNISLVQHIRENLKKNSYEPTIVQQKTSSSISTRVEAKVGEGDIRGAVRLLSSSADLAPCDNAVLTLLRHKHPSPSRPLCLPEEPSSPNDCLEVSEEKVLNGIASFPQGSASGLDGMRPQHLKDLIGFSSGDAGRRLLFQITKLCNFMLSGSVHVEACQYLYGASLCALYKKDGGIRPIAVGNVIRRLVGKLVCTITRDSAAARYLQPTQVGFATPRGCEAAIHSVRTFIDVNNSTNKILIKIDLKNAFNSIERDVLLSAVKEKMPAIYAFMWQCYSADSYLFFGKHTIMSRVGAQQGDPLGPLIFSLGIHSTIENLKSELNIWYLDDGTLAGDADSVISDLLTLKTELYKMGLEVNAEKCEIYFCSTYDNDTFTRVEKALPSIRIVTDLSLLGAPVNIAAGPLLLKKKEENLKLLLDRLKTINSHVAYFILKNCFSIPKLTYIIRTTPLWFFPDFVFNFDNGIKKILESIFNIKINNSQYLQASLPIRHGGLGIRRVADLILPAFLASAYGVSELVSIILPSSGDKLEISHLPAAKALWEDLCPNSVEPMPNSRIFQKFWDQQNVNRIISNLTFDTVDEEARFKAACTYESGAWLNTLPSRQMSTLLDNNTMRISVALRLGCSVVQPHTCLCGNSVLSNGRHGLHCKRSAGRFPRHSMINDIIKKALSTAGVPAILEPNLSRDDGKRPDGMTLIPWSEGKALVWDATCVDTLAPSHVAFSAKEPGSAAESAARLKTKKYNFIKSQNYNFIPFAVETFGPWCEESKLFLKTLGKQLIKVSGNKFSCNYLRQRISLAIQRGNAASVMGTIPDSVTLEEIFYPNS

SEQ ID NO: 1615 - protein, 707 aa, Bembecia ichneumoniformis
MRPQHLKDLIGFSSGDAGRRLLFQITKLCNFMLSGSVHVEACQYLYGASLCALYKKDGGIRPIAVGNVIRRLVGKLVCTITRDSAAARYLQPTQVGFATPRGCEAAIHSVRTFIDVNNSTNKILIKIDLKNAFNSIERDVLLSAVKEKMPAIYAFMWQCYSADSYLFFGKHTIMSRVGAQQGDPLGPLIFSLGIHSTIENLKSELNIWYLDDGTLAGDADSVISDLLTLKTELYKMGLEVNAEKCEIYFCSTYDNDTFTRVEKALPSIRIVTDLSLLGAPVNIAAGPLLLKKKEENLKLLLDRLKTINSHVAYLILKNCFSIPKLTYIIRTTPLWFFPDFVFNFDNGIKKILESIFNIKINNSQYLQASLPIRHGGLGIRRVADLILPAFLASAYGVSELVSIILPSSGDKLEISHLPAAKALWEDLCPNSVEPMPNSRIFQKFWDQQNVNRIISNLTFDTVDEEARFKAACTYESGAWLNTLPSRQMSTLLDNNTMRISVALRLGCSVVQPHTCLCGNSVLSNGRHGLHCKRSAGRFPRHSMINDIIKKALSTAGVPAILEPNLSRDDGKRPDGMTLIPWSEGKALVWDATCVDTLAPSHVAFSAKEPGSAAESAARLKTKKYNFIKSQNYNFIPFAVETFGPWCEESKLFLKTLGKQLIKVSGNKFSCNYLRQRISLAIQRGNAASVMGTIPDSVTLEEIFYPNS

SEQ ID NO: 1616 - protein, 958 aa, Bembecia ichneumoniformis
MAGDNDQLPSSSTDSITCPICQNERLFRGKRGLNIHLSRCHLVKSTVNTSSRSHYASTPACSSASKTTTTQTLSEKIAYLKTEVRVLRRIPKGVRILVADKLCDIIIRCISKNDLKSWEDLLCFAYINLQIPPRTKNISLVQHIRENLKKNSYEPTIVQQKTSSSISTRVEAKVGEGDIRGAVRLLSSSADLAPCDNAVLTLLRHKHPSPSRPLCLPEEPSSPNDCLEVSEEKVLNGIASFPQGSASGLDGMRPQHLKDLIGFSSGDAGRRLLFQITKLCNFMLSGSVHVEACQYLYGASLCALYKKDGGIRPIAVGNVIRRLVGKLVCTITRDSAAARYLQPTQVGFATPRGCEAAIHSVRTFIDVNNSTNKILIKIDLKNAFNSIERDVFLSAVKEKMPAIYAFMWQCYSADSYLFFGKHTIMSRVGAQQGDPLGPLIFSLGIHSTIENLKSELNIWYLDDGTLAGDADSVISDLLTLKTELYKMGLEVNAEKCEIYFCSTYDNDTFTRVEKALPSIRIVTDLSLLGAPVNIAAGPLLLKKKEENLKLLLDRLKTINSHVAYLILKNCFSIPKLTYIIRTTPLWFFPDFVFNFDNGIKKILESIFNIKINNSQYLQASLPIRHGGLGIRRVADLILPAFLASAYGVSELVSIILPSSGDKLEISHLPAAKALWEDLCPNSVEPMPNSRIFQKFWDQQNVNRIISNLTFDTVDEEARFKAACTYESGAWLNTLPSRQMSTLLDNNTMRISVALRLGCSVVQPHTCLCGNSVLSNGRHGLHCKRSAGRFPRHSMINDIIKKALSTAGVPAILEPNLSRDDGKRPDGMTLIPWSEGKALVWDATCVDTLAPSHVAFSAKEPGSAAESAARLKTKKYNFIKSQNYNFIPFAVETFGPWCEESKFFIKTLGKQLIKVSGNKFSCNYLRQRISLAIQRGNAASVMGTIPDSVTLEEIFYPNS

SEQ ID NO: 1617 - protein, 896 aa, Bembecia ichneumoniformis
MADDNDQLPSSSTDSITCPICQNERLFRGKRGLNIHLSRCHLVKSTVNTSSRSHYASTPACSSASKTTTTQTLSEKIAYLKTEVRVLRRIPKGVRILVADKLCDIIIRCISKNDLKSWEDLLCFAYINLQIPPRTKNISLVQHIRENLKKNSYEPTIVQQKTSSSISTRVEAKVGEGDIRGAVRLLSSSADLAPCDNAVLTLLRHKHPSPSRPLCLPEEPSSPNDCLEVSEEKVLNGIASFPQGSASGLDGMRPQHLKDLIGFSSGDAGRRLLFQITKLCNFMLSGSVHVEACQYLYGASLCALYKKDGGIRPIAVGNVIRRLVGKLVCTITRDSAAARYLQPTQVGFATPRGCGAAIHSVRTFIDVNNSTNKILIKIDLKNAFNSIERDVLLSAVKEKMPAIYAFMWQCYSADSYLFFGKHTIMSRVGAQQGDPLGPLIFSLGIHSTIENLKSELNIWYLDDGTLAGDADSVISDLLTLKTELYKMGLEVNAEKCEIYFCSTYDNDTFTRVEKALPSIRIVTDLSLLGAPVNIAAGPLLLKKKEENLKLLLDRLKTINSHVAYLILKNCFSIPKLTYIIRTTPLWFFPDFVFNFDNGIKKILESIFNIKINNSQYLQASLPIRHGGLGIRRVADLILPAFLASAYGVSELVSIILPSSGDKLEISHLPAAKALWEDLCPNSVEPMPNSRIFQKFWDQQNVNRIISNLTFDTVDEEARFKAACTYESGAWLNTLPSRQMSTLLDNNTMRISVALRLGCSVVQPHTCLCGNRVLSNGRHGLHCKRSAGRFPRHSMINDIIKKALSTAGVPAILEPNLSRDDGKRPDGMTLIPWSEGKALVWDATCVDTLAPSHVAFSAKEPGSAAESAARLKTKKYNFIKSQNYNFIPFAVETFGPW

SEQ ID NO: 1618 - protein, 958 aa, Bembecia ichneumoniformis
MAGDNDQLPSSSTDSITCPICQNERLFRGKRGLNIHLSRCHLVKSTVNTSSRSHYASTPACSSASKTTTTQTLSEKIAYLKTEVRVLRRIPKGVRILVADKLCDIIIRCISKNDLKSWEDLLCFAYINLQIPPRTKNISLVQHIRENLKKNSYEPTIVQQKTSSSISTRVEAKVGEGDIRGAVRLLSSSADLAPCDNAVLTLLRHKHPSPSRPLCLPEEPSSPNDCLEVSEEKVLNGIASFPQGSASGLDGMRPQHLKDLIGFSSGDAGRRLLFEITKLCNFMLSGSVHVEACQYLYGASLCALYKKDGGIRPIAVGNVIRRLVGKLVCTITRDSAAARYLQPTQVGFATPRGCEAAIHSVRTFIDVNNSTNKILIKIDLKNAFNSIERDVLLSAVKEKMPAIYAFMWQCYSADSYLFFGKHTIMSRVGAQQGDPLGPLIFSLGIHSTIENLKSELNIWYLDDGTLAGDADSVISDLLTLKTELYKMGLEVNAEKCEIYFCSTYDNDTFTRVEKALPSIRIVTDLSLLGAPVNIAAGPLLLKKREENLKLLLDRLKTINSHVAYLILKNCFSIPKLTYIIRTTPLWFFPDFVFNFDNGIKKILESIFNIKINNSQYLQASLPIRHGGLGIRRVADLILPAFLASAYGVSELVSIILPSSGDKLEISHLPAAKALWEDLCPNSVEPMPNSRIFQKFWDQQNVNRIISNLTFDTVDEEARFKAACTYESGAWLNTLPSRQMSTLLDNNTMRISVALRLGCSVVQPHTCLCGNSVLSNGRHGLHCKRSAGRFPRHSMINDIIKKALSTAGVPAILEPNLSRDDGKRPDGMTLIPWSEGKALVWDATCVDTLAPSHVAFSAKEPGSAAESAARLKTKKYNFIKSQNYNFIPFAVETFGPWCEESKLFLKTLGKQLIKVSGNKFSCNYLRQRISLAIQRGNAASVMGTIPDSVTLEEIFYPNS

SEQ ID NO: 1619 - protein, 958 aa, Bembecia ichneumoniformis
MAGDNDQLPSSSTDSITCPICQNERLFRGKRGLNIHLSRCHLVKSTVNTSSRSHYASTPACSSASKTTTTQTLSEKIAYLKTEVRVLRRIPKGVRILVADKLCDIIIRCISKNDLKSWEDLLCFAYINLQIPPRTKNISLVQHIRENLKKNSYEPTIVQQKTSSSISTRVEAKVGEGDIRGAVRLLSSSADLAPCDNAVLTLLRHKHPSPSRPLCLPEEPSSPNDCLEVSEEKVLNGIASFPQGSASGLDGMRPQHLKDLIGFSSGDAGRRLLFQITKLCNFMLSGSVHVEACQYLYGASLCALYKKDGGIRPIAVGNVIRRLVGKLVCTITRDSAAARYLQPTQVGFATPRGCEAAIHSVRTFIDVNNSTNKILIKIDLKNAFNSIERDVLLSAVKEKMPAIYAFMWQCYSADSYLFFGKHTIMSRVGAQQGDPLGPLIFSLGIHSTIENLKSELNIWYLDDGTLAGDADSVISDLLTLKTELYKMGLEVNAEKCEIYFCSTYDNDTFTRVEKAMPSIRIVTDLSLLGAPVNIAAGPLLLKKKEENLKLLLDRLKTINSHVAYLILKNCFSIPKLTYIIRTTPLWFFPDFVFNFDNGIKKILESIFNIKINNSQYLQASLPIRHGGLGIRRVADLILPAFLASAYGVSELVSIILPSSGDKLEISHLPAAKALWEDLCPNSVEPMPNSRIFQKFWDQQNVNRIISNLTFDTVDEEARFKAACTYESGAWLNTLPSRQMSTLLDNNTMRISVALRLGCSVVQPHTCLCGNSVLSNGRHGLHCKRSAGRFPRHSMINDIIKKALSTAGVPAILEPNLSRDDGKRPDGMTLIPWSEGKALVWDATCVDTLAPSHVAFSAKEPGSAAESAARLKTKKYNFIKSQNYNFIPFAVETFGPWCEESKLFLKTLGKQLIKVSGNKFSCNYLRQRISLAIQRGNAASVMGTIPDSVTLEEIFYPNS

SEQ ID NO: 1620 - protein, 707 aa, Bembecia ichneumoniformis
MRPQHLKDLIGFSSGDAGRRLLFQITKLCNFMLSGSVHVEACQYLYGASLCALYKKDGGIRPIAVGNVIRRLVGKLVCTITRDSAAARYLQPTQVGFATPRGCEAAIHSVRTFIDVNNSTNKILIKIDLKNAFNSIERDVLLSAVKEKMPAIYAFMWQCYSADSYLFFGKHTIMSRVGAQQGDPLGPLIFSLGIHSTIENLKSELNIWYLDDGTLAGDADSVISDLLTLKTELYKMGLEVNAEKCEIYFCSTYDNDTFTRVEKALPSIRIVTDLSLLGAPVNIAAGPLLLKKKEENLKLLLDRLKTINSHVAYLILKNCFSIPKLTYIIRTTPLWFFPDFVFNFDNGIKKILESIFNIKINNSQYLQASLPIRHGGLGIRRVADLILPAFLASAYGVSELVSIILPSSGDKLEISHLPAAKALWEDLCPNSVEPMPNSRIFQKFWDQQNVNRIISNLTFDTVDEEARFKAACTYESGAWLNTLPSRQMSTLLDNNTMRISVALRLGCSVVQPHTCLCGNRVLSNGRHGLHCKRSAGRFPRHSMINDIIKKALSTAGVPAILEPNLSRDDGKRPDGMTLIPWSEGKALVWDATCVDTLAPSHVAFSAKEPGSAAESAARLKTKKYNFIKSQNYNFIPFAVETFGPWCEESKLFLKTLGKQLIKVSGNKFSCNYLRQRISLAIQRGNAASVMGTIPDAVTLEEIFYPNS

SEQ ID NO: 1621 - protein, 1108 aa, Ennomos quercinarius
MLLIMEKANCKSTTQAGESRGAPASSPRSYSGGGNNCYTMRRRGKPASRVLPDLPQEAGDAFIDGADGAQTGEPVVRAVGARRGGAEPGEPQAGISCSVCGRTFASKIGMGVHKRRAHPLEANEEAAPAMVKRRWRDEEVALLARTEARLLMTEGGCGNLELQRELPDLGRTLEAIKGKRRVESYKALVRNFLAELEIPVSQLSDSGPPELAVSDVSHQLTIVSDQPRPPPESSLADVETDRLASPARVELFAVPLSSGRRALEQVVEGLLKKGAAQRRKQGGRRSLTNQPVAGLNSRNKRRMEYARVQELYRKCPSRAAREVIDGQHRGVKHSLQEMTSYWKPILEAVSGAPGPTAEALSALVREECSGGSRDYSQLWTPITEDEVKASCVDLHSAPGPDGIRPGDWHAVPVETKAQLFTEWLARGEIPLQLRQCRTIFVPKKDDPAVPSDYRPISIASVPLRHMHTVLAKRLLACCPPDARQRGFIRADGTLENSAVLDAVLGDSRTRLRECHVAVLDFSKAFDTVSHAALVELLRKRGLPVAFCDYIARLYDTASTTLAVGGQTSDLVTVGRGVRQGDPLSPLLFNIAMDLVLANLPKDVGYELESERVSALAYADDLVLLAGSKVGMQASINAVSSFGQMMGLKLNHTKCSVLSMVPDGKRKKVHFLSTRSFRIGKRWLKQVLCVEHWRYLGVDFRSSGSTTLEQDVQQALNNIRSAPLKPQQRLEVLRGHLLPRFLHGLVLGSITEGRLRMLDVVVRAAVRKWLRLPADVPKAYFHAAIKDGGLAIPSLKTCVPDLVIRRFGALDSSEWSAARAAARSERIRRKLRWARGQFAGLSREDPRTGVRKASLYWREGLHTSVDGIELQESHRCPATTKWVRELSNNYTGRDYVQFVHTHINALPSRVRNSRGRRTSDESALNCRAGCMVRETTAHTIQQCFRTHGGRILRHNKVASILAAAMVEVGWKVNEEPRIRTREGLRKPDIIAARGGEGVIVDAQVVSGQRPLDEAHRAKRTKYGNHVELVEKVAGILGLPARRVNATSCTLSWRGVWSFGSYKELKKLLGLKEVFFQNLPSIVLRGSHTNWTRFNQTTFRADSGYDLSPV

SEQ ID NO: 1622 - protein, 518 aa, Agriopis aurantiaria
MAMDLILANLPKDVGYRLETERVSALAYADDLVLLAGSKVGLQSSINAVDKYGQMMGLRLNHTKSSALSMVPDGKRKKVHFLSDRTFRIGKRWLKQVSCVERWRYLGVDFESNGAVTIEHSIKGALTNIGKAPLKPQQRLEILRTHLIPRFLHGLVLGVISEDRLRVLDVQIRTTIRKWLRLPMDVPTAYFHAASKDGGLAIPSLRAWVPDLVLRRYGALERSEWSVARAAAKSDRIRKKLQWAEKHYTKFSREDPETGTRSVSLYWKEKLHTSVDGFELRESSKCSASTSWIRDIDMRYTGRDYVQFVHTHINALPSRVRNSRGRRDGDESKLNCRAGCMTRETTTHTIQQCFRTHGGRILRHNKIAKVLCSAMVEEGWTVEEEPKINTAIGLRKPDIIAVRGGEGMIVDVQVVTGQRPLDDAHREKRAKYGNHDELVEKVAGKLGLSKTHVRATSCTLSWRGVWSFGSFKELKKLLGLKKDVLHTLPILALRGSHLNWSRFNKMTTRYSDRRGEST

SEQ ID NO: 1623 - protein, 1108 aa, Ennomos quercinarius
MLLIMEKANCKSTTQAGESRGAPASSPRSYSGGGNNCYTMRRRGKPASRVLPDLPQEAGDAFIDGADGAQTGEPVVRAVGARRGGAEPGEPQAGISCSVCGRTFASKIGMGVHKRRAHPLEANEEAAPAMVKRRWRDEEVALLARTEARLLMTEGGCGNLELQRELPDLGRTLEAIKGKRRVESYKALVRNFLAELETPVSQLSDSGPPELAVSDVSHQLTIVSDQPRPPPESSLADVETDRLASPARVELFAVPLSSGRRALEQVVEGLLKKGAAQRRKQGGRRSLTNQPVAGLNSRNKRRMEYARVQELYRKCPSRAAREVIDGQHRGVKHSLQEMTSYWKPILEAVSGAPGPTAEALSALVREECSGGSRDYSQLWTPITEDEVKASCVDLHSAPGPDGIRPGDWHAVPVETKAQLFTEWLARGEIPLQLRQCRTIFVPKKDDPAVPSDYRPISIASVPLRHMHTVLAKRLLACCPPDARQRGFIRADGTLENSAVLDAVLGDSRTRLRECHVAVLDFSKAFDTVSHAALVELLRKRGLPVAFCDYIARLYDTASTTLAVGGQTSDLVTVGRGVRQGDPLSPLLFNIAMDLVLANLPKDVGYELESERVSALAYADDLVLLAGSKVGMQASINAVSSFGQMMGLKLNHTKCSVLSMVPDGKRKKVHFLSTRSFRIGKRWLKQVLCVEHWRYLGVDFRSSGSTTLEQDVQQALNNIRSAPLKPQQRLEVLRGHLLPRFLHGLVLGSITEGRLRMLDVVVRAAVRKWLRLPADVPKAYFHAAIKDGGLAIPSLKTCVPDLVIRRFGALDSSEWSAARAAARSERIRRKLRWARGQFAGLSREDPRTGVRKASLYWREGLHTSVDGIELQESHRCPATTKWVRELSNNYTGRDYVQFVHTHINALPSRVRNSRGRRTSDESALNCRAGCMVRETTAHTIQQCFRTHGGRILRHNKVASILAAAMVEVGWKVNEEPRIRTREGLRKPDIIAARGGEGVIVDAQVVSGQRPLDEAHRAKRTKYGNHVELVEKVAGILGLPARRVNATSCTLSWRGVWSFGSYKELKKLLGLKEVFFQNLPSIVLRGSHTNWTRFNQTTFRADSGYDLSPV

SEQ ID NO: 1624 - protein, 1108 aa, Ennomos quercinarius
MLLIMEKANCKSTTQAGESRGAPASSPRSYSGGGNNCYTMRRRGKPASRVLPDLPQEAGDAFIDGADGAQTGEPVVRAVGARRGGAEPGEPQAGISCSVCGRTFASKIGMGVHKRRAHPLEANEEAAPAMVKRRWRDEEVALLARTEARLLMTEGGCGNLELQRELPDLGRTLEAIKGKRRVESYKALVRNFLAELETPVSQLSDSGPPELAVSDVSHQLTIVSDQPRPPPESSLADVETDRLASPARVELFAVPLSSGRRALEQVVEGLLKKGAAQRRKQGGRRSLTNQPVAGLNSRNKRRMEYARVQELYRKCPSRAAREVIDGQHRGVKHSLQEMTSYWKPILEAVSGAPGPTAEALSALVREECSGGSRDYSQLWTPITEDEVKASCVDLHSAPGPDGIRPGDWHAVPVETKAQLFTEWLARGEIPLQLRQCRTIFVPKKDDPAVPSDYRPISIASVPLRHMHTVLAKRLLACCPPDARQRGFIRADGTLENSAVLDAVLGDSRTRLRECHVAVLDFSKAFDTVSHAALVELLRKRGLPVAFCDYIARLYDTASTTLAVGGQTSDLVTVGRGVRQGDPLSPLLFNIAMDLVLANLPKDVGYELESERVSALAYADDLVLLAGSKVGMQASINAVSSFGQMMGLKLNHTKCSVLSMVPDGKRKKVHFLSTRSFRIGKRWFKQVLCVEHWRYLGVDFRSSGSTTLEQDVQQALNNIRSAPLKPQQRLEVLRGHLLPRFLHGLVLGSITEGRLRMLDVVVRAAVRKWLRLPADVPKAYFHAAIKDGGLAIPSLKTCVPDLVIRRFGALDSSEWSAARAAARSERIRRKLRWARGQFAGLSREDPRTGVRKASLYWREGLHTSVDGIELQESHRCPATTKWVRELSNNYTGRDYVQFVHTHINALPSRVRNSRGRRTSDESALNCRAGCMVRETTAHTIQQCFRTHGGRILRHNKVASILAAAMVEVGWKVNEEPRIRTREGLRKPDIIAARGGEGVIVDAQVVSGQRPLDEAHRAKRTKYGNHVELVEKVAGILGLPARRVNATSCTLSWRGVWSFGSYKELKKLLGLKEVFFQNLPSIVLRGSHTNWTRFNQTTFRADSGYDLSPV

SEQ ID NO: 1625 - protein, 1108 aa, Ennomos quercinarius
MLLIMEKANCKSTTQAGESRGAPASSPRSYSGGGNNCYTMRRRGKPASRVLPDLPQEAGDAFIDGADGAQTGEPVVRAVGARRGGAEPGEPQAGISCSVCGRTFASKIGMGVHKRRAHPLEANEEAAPAMVKRRWRDEEVALLARTEARLLMTEGGCGNLELQRELPDLGRTLEAIKGKRRVESYKALVRNFLAELETPVSQLSDSGPPELAVSDVSHQLTIVSDQPRPPPESSLADVETDRLASPARVELFAVPLSSGRRALEQVVEGLLKKGAAQRRKQGGRRSLTNQPVAGLNSRNKRRMEYARVQELYRKCPSRAAREVIDGQHRGVRHSLQEMTSYWKPILEAVSGAPGPTAEALSALVREECSGGSRDYSQLWTPITEDEVKASCVDLHSAPGPDGIRPGDWHAVPVETKAQLFTEWLARGEIPLQLRQCRTIFVPKKDDPAVPSDYRPISIASVPLRHMHTVLAKRLLACCPPDARQRGFIRADGTLENSAVLDAVLGDSRTRLRECHVAVLDFSKAFDTVSHAALVELLRKRGLPVAFCDYIARLYDTASTTLAVGGQTSDLVTVGRGVRQGDPLSPLLFNIAMDLVLANLPKDVGYELESERVSALAYADDLVLLAGSKVGMQASINAVSSFGQMMGLKLNHTKCSVLSMVPDGKRKKVHFLSTRSFRIGKRWLKQVLCVEHWRYLGVDFRSSGSTTLEQDVQQALNNIRSAPLKPQQRLEVLRGHLLPRFLHGLVLGSITEGRLRMLDVVVRAAVRKWLRLPADVPKAYFHAAIKDGGLAIPSLKTCVPDLVIRRFGALDSSEWSAARAAARSERIRRKLRWARGQFAGLSREDPRTGVRKASLYWREGLHTSVDGIELQESHRCPATTKWVRELSNNYTGRDYVQFVHTHINALPSRVRNSRGRRTSDESALNCRAGCMVRETTAHTIQQCFRTHGGRILRHNKVASILAAAMVEVGWKVNEEPRIRTREGLRKPDIIAARGGEGVIVDAQVVSGQRPLDEAHRAKRTKYGNHVELVEKVAGILGLPARRVNATSCTLSWRGVWSFGSYKELKKLLGLKEVFFQNLPSIVLRGSHTNWTRFNQTTFRADSGYDLSPV

SEQ ID NO: 1626 - protein, 1108 aa, Ennomos quercinarius
MLLIMEKANCKSTTQAGESRGAPASSPRSYSGGGNNCYTMRRRGKPASRVLPDLPQEAGDAFIDGADGAQTGEPVVRAVGARRGGAEPGEPQAGISCSVCGRTFASKIGMGVHKRRAHPLEANEEAAPAMVKRRWRDEEVALLARTEARLLMTEGGCGNLELQRELPDLGRTLEAIKGKRRVESYKALVRNFLAELETPVSQLSDSGPPELAVSDVSHQLTIVSDQPRPPPESSLADVETDRLASPARVELFAVPLSSGRRALEQVVEGLLKKGAAQRRKQGGRRSLTNQPVAGLNSRNKRRVEYARVQELYRKCPSRAAREVIDGQHRGVKHSLQEMTSYWKPILEAVSGAPGPTAEALSALVREECSGGSRDYSQLWTPITEDEVKASCVDLHSAPGPDGIRPGDWHAVPVETKAQLFTEWLARGEIPLQLRQCRTIFVPKKDDPAVPSDYRPISIASVPLRHMHTVLAKRLLACCPPDARQRGFIRADGTLENSAVLDAVLGDSRTRLRECHVAVLDFSKAFDTVSHAALVELLRKRGLPVAFCDYIARLYDTASTTLAVGGQTSDLVTVGRGVRQGDPLSPLLFNIAMDLVLANLPKDVGYELESERVSALAYADDLVLLAGSKVGMQASINAVSSFGQMMGLKLNHTKCSVLSMVPDGKRKKVHFLSTRSFRIGKRWLKQVLCVEHWRYLGVDFRSSGSTTLEQDVQQALNNIRSAPLKPQQRLEVLRGHLLPRFLHGLVLGSITEGRLRMLDVVVRAAVRKWLRLPADVPKAYFHAAIKDGGLAIPSLKTCVPDLVIRRFGALDSSEWSAARAAARSERIRRKLRWARGQFAGLSREDPRTGVRKASLYWREGLHTSVDGIELQESHRCPATTKWVRELSNNYTGRDYVQFVHTHINALPSRVRNSRGRRTSDESALNCRAGCMVRETTAHTIQQCFRTHGGRILRHNKVASILAAAMVEVGWKVNEEPRIRTREGLRKPDIIAARGGEGVIVDAQVVSGQRPLDEAHRAKRTKYGNHVELVEKVAGILGLPARRVNATSCTLSWRGVWSFGSYKELKKLLGLKEVFFQNLPSIVLRGSHTNWTRFNQTTFRADSGYDLSPV

SEQ ID NO: 1627 - protein, 1108 aa, Ennomos quercinarius
MLLIMEKANCKSTTQAGESRGAPASSPRSYSGGGNNCYTMRRRGKPASRVLPDLPQEAGDAFIDGADGAQTGEPVVRAVGARRGGAEPGEPQAGISCSVCGRTFASKIGMGVHKRRAHPLEANEEAAPAMVKRRWRDEEVALLARTEARLLMTEGGCGNLELQRELPDLGRTLEAIKGKRRVESYKALVRNFLAELETPVSQLSDSGPPELAVSDVSHQLTIVSDQPRPPPESSLADVETDRLASPARVELFAVPLSSGRRALEQVVEGLLKKGAAQRRKQGGRRSLTNQPVAGLNSRNKRRMEYARVQELYRKCPSRAAREVIDGQHRGVKHSLQEMTSYWKPILEAVSGAPGPTAEALSALVREECSGGSRDYSQLWTPITEDEVKASCVDLHSAPGPDGIRPGDWHAVPVETKAQLFTEWLARGEIPLQLRQCRTIFVPKKDDPAVPSDYRPISIASVPLRHMHTVLAKRLLACCPPDARQRGFIRADGTLENSAVLDAVLGDSRTRLRECHVAVLDFSKAFDTVSHAALVELLRKRGLPVAFCDYIARLYDTASTTLAVGGQTSDLVTVGRGVRQGDPLSPLLFNIAMDLVLANLPKDVGYELESERVSALAYADDLVLLAGSKVGMQASINAVSSFGQMMGLKLNHTKCSVLSMVPDGKRKKVHFLSTRSFRIGKRWLKQVLCVEHWRYLGVDFRSSGSTTLEQDVQQALNNIRSAPLKPQQRLEVLRGHLLPRFLHGLVLGSITEGRLRMLDVVVRAAVRKWLRLPADVPKAYFHAAIKDGGLAIPSLKTCVPDLVIRRFGALDSSEWSAARAAARSERIRRKLRWARGQFAGLSREDPRTGVRKASLYWREGLHTSVDGIELQESHRCPATTKWVRELSNNYTGRDYVQFVHTHINALPSRVRNSRGRRTSDESALNCRAGCMVRETTAHTIQQCFRTHGGRILRHNKVASILAAAMVEVGWKVNEEPRIRTREGLRKPDIIAAKGGEGVIVDAQVVSGQRPLDEAHRAKRTKYGNHVELVEKVAGILGLPARRVNATSCTLSWRGVWSFGSYKELKKLLGLKEVFFQNLPSIVLRGSHTNWTRFNQTTFRADSGYDLSPV

SEQ ID NO: 1628 - protein, 1108 aa, Ennomos quercinarius
MLLIMEKANCKSTTQAGESRGAPASSPRSYSGGGNNCYTMRRRGKPASRVLPDLPQEAGDAFIDGADGAQTGEPVVRAVGARSGGAEPGEPQAGISCSVCGRTFASKIGMGVHKRRAHPLEANEEAAPAMVKRRWRDEEVALLARTEARLLMTEGGCGNLELQRELPDLGRTLEAIKGKRRVESYKALVRNFLAELETPVSQLSDSGPPELAVSDVSHQLTIVSDQPRPPPESSLADVETDRLASPARVELFAVPLSSGRRALEQVVEGLLKKGAAQRRKQGGRRSLTNQPVAGLNSRNKRRMEYARVQELYRKCPSRAAREVIDGQHRGVKHSLQEMTSYWKPILEAVSGAPGPTAEALSALVREECSGGSRDYSQLWTPITEDEVKASCVDLHSAPGPDGIRPGDWHAVPVETKAQLFTEWLARGEIPLQLRQCRTIFVPKKDDPAVPSDYRPISIASVPLRHMHTVLAKRLLACCPPDARQRGFIRADGTLENSAVLDAVLGDSRTRLRECHVAVLDFSKAFDTVSHAALVELLRKRGLPVAFCDYIARLYDTASTTLAVGGQTSDLVTVGRGVRQGDPLSPLLFNIAMDLVLANLPKDVGYELESERVSALAYADDLVLLAGSKVGMQASINAVSSFGQMMGLKLNHTKCSVLSMVPDGKRKKVHFLSTRSFRIGKRWLKQVLCVEHWRYLGVDFRSSGSTTLEQDVQQALNNIRSAPLKPQQRLEVLRGHLLPRFLHGLVLGSITEGRLRMLDVVVRAAVRKWLRLPADVPKAYFHAAIKDGGLAIPSLKTCVPDLVIRRFGALDSSEWSAARAAARSERIRRKLRWARGQFAGLSREDPRTGVRKASLYWREGLHTSVDGIELQESHRCPATTKWVRELSNNYTGRDYVQFVHTHINALPSRVRNSRGRRTSDESALNCRAGCMVRETTAHTIQQCFRTHGGRILRHNKVASILAAAMVEVGWKVNEEPRIRTREGLRKPDIIAARGGEGVIVDAQVVSGQRPLDEAHRAKRTKYGNHVELVEKVAGILGLPARRVNATSCTLSWRGVWSFGSYKELKKLLGLKEVFFQNLPSIVLRGSHTNWTRFNQTTFRADSGYDLSPV

SEQ ID NO: 1629 - protein, 812 aa, Erannis defoliaria
MNSRQRRRRRYAMVQRVYKKCRGRAAREIIDGQHRSMKHSLQEMESYWRPILEAVSGAPGPSLEALKTLEREELKGGSRDYSQLWAPITPEEVTASNVNPHSAPGPDGIRPDAWATISNETKADLFTYWLLKGEIPDRLRQCRTIFVPKKDEPAGPGDYRPISIASIPLRHLHSILAKRLLACCPPDIRQRGFVCADGTLENSAVLDAVLGDCRRKLRECHVAVLDFSKAFDTVSHAALIDLLRKRGLPKEFCDYIARLYDTASTILAVGEEASDPVAVGRGVRQGDPLSPILFNMAMDLVLANLPKGVGYRLETESVSALAYADDLVLLAGSKVGMQSSIDVVDRYGQMMGLRLNHAKSSVLSMVPDGKRKKVHYVSDRSFKIGKRLLRQVSCVERWRYLGVDFESAGSITIEHSIKEALANITRAPLKPQQRLEILRDHLIPRFLHGLVLGVISADRLRTLDVQIRAAMRKWLRLPADVPTAYFHAASKDGGLAIPSLRAWVPDLVLRRFGALAHSEWSVARAAAKSDRIKKKMRWAEEQFAKLSRNDPKTGKGSVSLYWRESLHASVDGFELRESSKCSASTKWIRDGGEQYTGRDYVQFVHTHINALPSRIRNSRGRRDGGTELNCRAGCEARETTTHTIQQCFRTHGGRILRHNKIAKVLCSAMVEEGWTVEEEPKIVTAAGLRKPDIIAARSGEGMIVDVQVVTGQRPLDDAHRDKRAKYGGHDELVEKVAGKLGLPKTCVRATSCTLSWRGVWSFGSFKELQKLVGLKKTVLNALPVLALRGSHMNWTRFNSMTSRYSDRWSECG

SEQ ID NO: 1630 - protein, 1121 aa, Samia ricini
MSFKEKYGVNSGLPQEPERAPILYRSDDRADARPGEGATGWICEVCARPFVTKIGLGVHKRRAHPIETNAEAAPPQVKRRWRDEEVELLASTEARLIGERGTCSNVDLFKELPLLGRTLEAIKGYRRKETYKALVEDHLAGAVRLSSSEPGGFQDNDIVAVNPQTPVIATEDQPVRPAEAEALPAGDNGGLSEGERVVADLLARAETRSSQARKSTKRRCKTANNSYAAKIPARRLRRMEYARVQELMRKCPSRAAAEVLEGRCRVVRHSLQELESHWRPILETESSAPGPKREALRGLRNQLRSLPAEAVDLSSLWTPITEDEVKASRVDLRSAPGPDGIRSEDWRSVPAKIQAEIFNWMGKGQVPERLRQCRTIFVPKKDVPDGPGDYRPISIASVPLRHMHTILARRLEICCPPDVRQRGFVRVDGTLENSAVLDAVLGDCRKKLRECHMAVLDFSKAFDTISHAGLIGLLRERGMPEAFCDYVARLYETAHTTLAVNNETSEPVKVARGVRQGDPLSPLLFNVVMDLVLANLPKSVGYRLENERVSALAYADDLILLSGSKVGMQSAIDAVVSVGGQVGLHLNSRKCSVLSMIPDGKRKKVHYSTERSFKIAQRWVKQIDCVERWRYLGVDFLASGCVTLEHEIKQVLTNIKKAPLKPQQRLEVLRIHLIPKFLHSLVLGTITDNRLKMLDVQIRRAVRDWLRLPQDVPVAYYHAAIKDGGLGIPSIRSCIPELILKRFGRLGESRWSVAQAAARSERIKRKLRWADRLHRKLSVADPVTGVRLAKLYWRTKLHDSVDGFELRESSKVPASTKWIRERSGQYAGRDFVQFVHVHINALPSRVRNTRGRRTAETELNCRAGCALRETTAHAIQTCHRTHGGRILRHNKVVKIISSDLVNRGWKVIEEPHIKTSAGLRKPDVVASKGDVGVIVDAQVVSGQRPLDEAHHAKRRKYGTHVELVEKVADILGLPNKECVCSTSCTLSWRGVWSLRSHKDLKDLLGFRKGVLDTIPAIVIRGVAHGLDDVQPVDSWGRADSVVGSMIRSSCWFLGLPSSPRLVSSAAMGCTDLAVKGAVFYLKPAVQHQSAQLVTALRYGWRHRVSPFMSSVCTDGAWSLEK

SEQ ID NO: 1631 - protein, 822 aa, Samia ricini
MEYARVQELMRKCPSRAAAEVLEGRCRVVRHSLQELESHWRPILETESSAPGPKREALRGLRNQLRSLPAEAVDLSSLWTPITEDEVKASRVDLRSAPGPDGIRSEDWRSVPAKIQAEIFNDWMGKGQVPERLRQCRTIFVPKKDVPDGPGDYRPISIASVPLRHMHTILARRLEICCPPDVRQRGFVRVDGTLENSAVLDAVLGDCRKKLRECHMAVLDFSKAFDTISHAGLIGLLRERGMPEAFCDYVARLYETAHTTLAVNNETSEPVKVARGVRQGDPLSPLLFNVVMDLVLANLPKSVGYRLENERVSALAYADDLILLSGSKVGMQSAIDAVVSVGGQVGLHLNSRKCSVLSMIPDGKRKKVHYSTERSFKIAQRWVKQIDCVERWRYLGVDFLASGCVTLEHEIKQVLTNIKKAPLKPQQRLEVLRIHLIPKFLHSLVLGTITDNRLKMLDVQIRRAVRDWLRLPQDVPVAYYHAAIKDGGLGIPSIRSCIPELILKRFGRLGESRWSVAQAAARSERIKRKLRWADRLHRKLSVADPVTGVRLAKLYWRTKLHDSVDGFELRESSKVPASTKWIRERSGQYAGRDFVQFVHVHINALPSRVRNTRGRRTAETELNCRAGCALRETTAHAIQTCHRTHGRILRHNKVVKIISSDLVNRGWKVIEEPHIKTSAGLRKPDVVASKGDVGVIVDAQVVSGQRPLDEAHHAKRRKYGTHVELVEKVADILGLPNKECVCSTSCTLSWRGVWSLRSHKDLKDLLGFRKGVLDTIPAIVIRGSHMGWTTFNRSTLGGPRADSVVGSMIRSSCWFLGLAVEP

SEQ ID NO: 1632 - protein, 1026 aa, Celaenorrhinus opalinus
MCRSAQRRYISRRNLGGGLRGRFPLAAPWVCHANNPRRGPKSNGFNSFGAFAKAVGDPGLRVCSPLAPGDISRFAGPDYRKLSRPDLPQESGRTETPIPAVRPGTAAAGRREPAGWPCPICERVFSTRIGLGVHKRRAHPVEANAEAAPPQVKRRWRDEELSLLASTEARLIVEKGEGVHLNMLLLEELKELGRTVEAIKGVRRKASYKDMVRERVSALQRDPQSSMIREPSPESASELPECGPVASEVGPLDACSQLQNLPELTPGDPELARVVAELLSKAAARVMRGTRKGAGRSCAEGKSDARPRSKKVQRRQQYARTQALYRKSRSRAAAGVLDESAGGVRHTLSEMEAYWRPILGAVSDAPGASELALKALGRAESGGGDSDFTPLWTPITEDEVKATSVGLQTAPGPDGIRSVDWRGVPDGVKARLFNAWMEKGEIPEPLRQCRTVFVPKMDVPAGPGDYRPISIASVPLRHMHTVLARRLESCCPPDMRQRGFICADGTMENSAVLDAILGDSRKRLQECHVAVLDFSKAFDTVSHSALVGLLRGRGLPQAFCDYVARLYETSTTTLNVHRQQSGPTRVGRGVRQGDPLSPLLFNAAMDLVLANLPKDVGYRLEGERVSALAYADDLVLLAGSKAGLQSSIDCVGSMGGMMGLRLNQAKSSVLSMVPDGKRKKVHFLTEKTFKVGRRYLRQVNCVERWRYLGVDFKATGCVTLEHDLKEALERIKRAPLKPQQRLEILRAHLIPRFLHGFVLGTITDDRLRLLDVQIRKAVRTWLRLPHDVPVAYFHAAVKDGGLAIPSLRTTIPDLVVRRFGKLSDSRWPVARAAAKSERIRRKVKWATRQVAKLSSQNPSSETERTVAQYWRDALHASVDGFEVRESSLCPGSTEWIRARCEHYTGRDFVQFVHTHINALPSRTRTSRGCGRSDESLRCRAGCLCKETTAHILQQCFRTHGGRIERHDNVVRQVARAMSSKGWQVETEPRFKTAVGLRKPDIIASKSGVGVIVDAQIVSGYRPLDEL

SEQ ID NO: 1633 - protein, 941 aa, Celaenorrhinus opalinus
MNMLLLEELKELGRTIEAIKGVRKKASYKEMVRERVSALQQKPQSNIVRMPSPESTSELPEYRPVASEAGPPDADSPELQILTDETQPGDPELARVVAELLSKAAARVMRGTRKGAGRSCAEGNSDARPRSKKVQRRQQYARTQVLYRKSRRRAAAGVLEESSGGVKHTFSEMEAYWRPILETVSDAPGPSELALKALGCTESGGGDLDFTPLWEPITEDEVKATSVSLQTAPGPDGIRSADWRRVSDVLKVRLFNTWMAKGEIPEPLRQCRTVFVPKMDVPAGPGDYRPISIASVPLRHMHTILARRLESCCPPDLRQRGFICADGTMENSAVLDAILGDSRKKLRECHVAVLDFSKAFDTVSHSALVGLLRGKGLPRAFCDYVARLYETSTTTLNVHRQQSGPTRVGRGVRQGDPLSPLLFNAAMDLVLANLPKDVGYRLEGERVSALAYADDLVLLAGSKVGLQSSIDSVGSSGEMMGLRLNQAKSSVLSMIPDGKRKKVHFLTEKTFRIGRRYLRQVNCVERWRYLGVDFKATGCVTLEHDLKEALERIKRAPLKPQQRLEILRAHLIPKFLHGFVLGNITDDRLRLLDVQIRKAVRIWLRLPHDVPVAYFHASVKDGGLAIPSLRTTIPDLVVRRFGRLSDSRWPVARAAAKSERIRRKVKWATRQVAKFSSQNSSSGTERTVTQYWRDALHASVDGFEIRESSQCPGSTEWIRARCEHYTGRDFVQFVHTHINALPSRTRTSRGCERSVESLRCRAGCLCKETTAHILQQCFRTHGGRIERHDNIVRQVARAMSSKGWQVETEPRFKTAVGLRKPDIIASKSGVGVIVDAQIVSGYRPLDELHRVKCSKYAGHDELVEKVAGRLGLVGPNCVKTTSCTLSWRGVWSPKSYKGLKTLVGLSAEFLGSLPAMALRGSHMNWTRFNQTTSTFGGGVPD

SEQ ID NO: 1634 - protein, 899 aa, Hydriomena furcata
MVESYACTDCPKAFTTKRGLGVHRVRAHPIVVNSESAPAQLKRRWKDEEVALMARTEARLCVANGKCLNLDLLQELPNLDRTLEAIKGKRRAESYKALVREYKAVLTTTDTVSVEDSRRNSITCQETSAVICQPEDVTIVAPSSAGERPALSEVDESLDLIVDSLLVRVSARGSAARRTKAKKGTTDILTEAISERPLTSRQRRRREYARVQKLYKNCRSRAAAEVIDGETRGVKHSLEELEAYWRPLLEAVSEAPGPTPEALRVLEREVFADGGSRDYSSLWMPVTVEEVKASRVNSRSAPGPDGIRADDWRTISVSIQAQIFTSWLSRGEIPERLRQCRTIFVPKTDDPAGPGDYRPISIASVPLRHLHTILARRLEACCPPDVRQRGFICADGTLENSAVLDAVLGDCRDKLRECHVAVLDFSKAFDKVSHDALITLLRKRGLPVAFCDYIARLYESATTNLVVGGKTSDSVRVGRGVRQGDPLSPLLFNMAMDLVLSNLPKEVGYRLEGEKISALAYADDLVLLAGSKMGMQSSIDCVSEYGQMMGLQLNQSKSSVLSMVPDGKRKKAHYLVNRSFKIGKRWLKQVSCVERWRYLGVDFQAAGSVMIEQDIKMALENITKAPLKPQQRLEILRGHLVPRFLHSFVLGNISDGRLSAIDKQIRATVRKWVRLPLDVPIGYFYATIKDGGLAIPSLRTCIPDLIVRRFGCLDSSNWNAARAAGRSVRIRRKVQWAEKKFLKFSREDPKVIDKPRKVSLYWREKLHQAVDGLELIESNKVPASTKWIRQNCDKITGRDYVQFVHTHINALPFRVRNSRGRRTGPESEYNCRAGCMVRETTAHCIQQCFRTHGGRIERHNKVARYLAEDMVSKGWTVEEEPRLRTGSRYPQARYYCCEG

SEQ ID NO: 1635 - protein, 1015 aa, Tinea semifulvella
MSSSVNTCTCGNKYNNNDHIIICDICQKWFHGKCVDISLDQLGQFQTSNTAWFCNFCSSLSITCQSQDQPQLSNDSLCNIRQCHECFICSRVFSSSKGLKIHNTRVHKDRLLFSPNQSPVASQNTSANCFETSLANFKKNIKIYKRIPRGARIAVADSLASLIRACVNKNDLISWEKLLTFAYRVLNIPSEKRCSVVSNIKTNLSLIESQTSDECTSNYNPSTFSVNKLIESKIADGDIKGAVRILCSDDVYASPDSETLKELSEKHPAANSDKILPPLPSNIVSNYQTNNDEVIKAIFSFPSGSAGGPDGLRPQHFKDLLTRNTGASGARFINALTDLINLMMSGSVPDEVCRILYGASLCALKKKQGGIRPIAVGNTIRRITAKIACSSVKSDLKEYFVPFQMGFGVKGGCEALVHATRQFLINPHLEKKAILKLDFRNAFNAIERSEMLKQAYLKIPSISRFISQCYTNASCLLYNGDILLSACGCQQGDPLGPALFSLTIQPMINELISDFNCWYLDDGTIAGSIENLLSDLSKIISLSNNLGLKLNPSKCEVFFLDEASENDYQRFNNLANGIILLNKNKFNLLGAPVTTEAIFNTLDLKLETYNRALNKCESLQPHVALFLIKNCLAAPKLIYLLRCCPSWLALDKLHNFDIILKSTIEKVLNINLSNTSWSQACLPIRLGGLGLRRLTDLSIPAYLASAHSSRVLVDLILKSNVDLDLHCVVDARKLWTDSLPDVSEPDNKCSQAAWDIPLINKSYQSIVDISNNTYDCARLLASTQKEAGAWLHAVPSAPLGTLLDKDSLRIAVSVRLGSKLCQPHICKCGSQVDEMGLHGLSCQKSAGRFSRHQALNELIKRSLWSAKIPSVLEPSGLSRSDGKRPDGMSLVPWSEGRCLVWDATCVDTFAACHISSTSKKAGSAAHTAEFRKHIKYNSIKQNYNFVAFGVETMGVYSLDTHKFIKELGKRIFQECGDPKCHNYLKQNISIIIQRGNAASVLGTLPGGKPLVYFVE

SEQ ID NO: 1636 - protein, 1015 aa, Tinea semifulvella
MSSSVNTCTCGNKYNNNDHIIICDICQKWFHGKCVDISLDQLGQFQTSNTAWFCNFCSSLSITCQSQDQPQLSNDSLCNIRQCHECFICSRVFSSSKGLKIHNTRVHKDRLLFSPNQSPVASQNTSANCFETSLANFKKNIKIYKRIPRGARIAVADSLASLIRACVNKNDLISWEKLLTFAYRVLNIPSEKRCSVVSNIKTNLSLIESQTSDECTSNYNPSTFSVNKLIESKIADGDIKGAVRILCSDDVYASPDSETLKELSEKHPAANSDKILPPLPSNIVSNYQTNNDEVIKAIFSFPSGSAGGPDGLRPQHFKDLLTRNTGASGARFINALTDLINLMMSGSVPDEVCRILYGASLCALKKKQGGIRPIAVGNTIRRITAKIACSSVKSDLKEYFVPFQMGFGVKGGCEALVHATRQFLINPHLEKKAILKLDFRNAFNAIERSEMLKQAYFKIPSISRFISQCYTNASCLLYNGDILLSACGCQQGDPLGPALFSLTIQPMINELISDFNCWYLDDGTIAGSIENLLSDLSKIISLSNNLGLKLNPSKCEVFFLDEASENDYQRFNNLANGIILLNKNKFNLLGAPVTTEAIFNTLDLKLETYNRALNKCESLQPHVALFLIKNCLAAPKLIYLLRCCPSWLALDKLHNFDIILKSTIEKVLNINLSNTSWSQACLPIRLGGLGLRRLTDLSIPVYLASAHSSRVLVDLILKSNVDLDLHCVVDARKLWTDSLPDVSEPDNKCSQAAWDIPLINKSYQSIVDISNNTYDCARLLASTQKEAGAWLHAVPSAPLGTLLDKDSLRIAVSLRLGSKICQPHICKCGSQVDEMGLHGLSCQKSAGRFSRHQALNELIKRSLWSAKIPSVLEPSGLSRSDGKRPDGMSLVPWSEGRCLVWDATCVDTFAACHISSTSKKAGSAAHTAEFRKHIKYNSIKQNYNFVAFGVETMGVYSLDTHKFIKELGKRIFQECGDPKCHNYLKQNISIIIQRGNAASVLGTLPGGKPLVYFVE

SEQ ID NO: 1637 - protein, 1015 aa, Tinea semifulvella
MSSSVNTCTCGNKYNNNDHIIICDICQKWFHGKCVDISLDQLGQFQTSNTAWFCNFCSSLSITCQSQDQPQLSNDSLCNIRQCHECFICSRVFSSSKGLKIHNTRVHKDRLLFSPNQSPVASQNTSANCFETSLANFKKNIKIYKRIPRGARIAVADSLASLIRACVNKNDLISWEKLLTFAYRVLNIPSEKRCSVVSNIKTNLSLIESQTSDECTSNYNPSTFSVNKLIESKIADGDIKGAVRILCSDDVYASPDSETLKELSEKHPAANSDKILPPLPSNIVSNYQTNNDEVIKAIFSFPSGSAGGPDGLRPQHFKDLLTRNTGASGARFINALTDLINLMMSGSVPDEVCRILYGASLCALKKKQGGIRPIAVGNTIRRITAKIACSSVKSDLKEYFVPFQMGFGVKGGCEALVHATRQFLINPHLEKKAILKLDFRNAFNAIERSEMLKQAYLKIPSISRFISQCYTNASCLLYNGDILLSACGCQQGDPLGPALFSLTIQPMINELISDFNCWYLDDGTIAGSIENLLSDLSKIISLSNNLGLKLNPSKCEVFFLDEASENDYQRFNNLANGIILLNKNKFNLLGAPVTTEAIFNTLDLKLETYNRALNKCESLQPHVALFLIKNCLAAPKLIYLLRCCPSWLALDKLHNFDIILKSTIEKVLNINLSNTSWSQACLPIRLGGLGLRRLTDLSIPAYLASAHSSRVLVDLILKSNVDLDLHCVVDARKLWTDSLPDVSEPDNKCSQAAWDIPLINKSYQSIVDISNNTYDCARLLASTQKEAGAWLHAVPSAPLGTLLDKDSLRIAVSLRLGSKICQPHICKCGSQVDEMGLHGLSCQKSAGRFSRHQALNELIKRSLWSAKIPSVLEPSGLSRSDGKRPDGMSLVPWSEGRCLVWDATCVDTFAACHISSTSKKAGSAAHTAEIRKHIKYNSIKQNYNFVAFGVETMGVYSLDTHKFIKELGKRIFQECGDPKCHNYLKQNISIIIQRGNAASVLGTLPGGKPLVYFVE

SEQ ID NO: 1638 - protein, 1015 aa, Tinea semifulvella
MSSSVNTCICGNKYNNNDHIIICDICQKWFHGKCVDISLDQLGQFQTSNTAWFCNFCSSLSITCQSQDQPQLSNDSLCNIRQCHECVICSRVFSSSKGLKIHNTRVHKDRLLFSPIQSPVASQNTSANCFETSLANLKKNIKIYKRIPRGARIAVADSLASLIRACVNKNDLISWEKLLTFAYRVLNIPSEKRCSVVSNIKTNLSLIESQTSDECTSNYNPSTFSVNKLIESKITDGDIKGAVRILCSDDVYATPDSETLKELSEKHPAANSNKILPPLPSNIVSNYQTNNDEVIKAIFSFPSGSAGGPDGLRPQHFKDLLTRNTGASGARFINALTDLINLMMSGSVPDEVCRILYGASLCALKKKQGGIRPIAVGNTIRRITAKIACSSVKSDLKEYFVPFQMGFGVKGGCEALVHATRQFLINPHLEKKAILKLDFRNAFNAIERSEMLKQAYLKIPSISRFISQCYTNASCLLYNGDILLSACGCQQGDPLGPALFSLTIQPMINELISDFNCWYLDDGTIAGSIENLLSDLSKIISLSNNLGLKLNPSKCEVFFLDEASVNDYQRFNNLANGIILLNKNKFNLLGAPVTTEAIFNTLDLKLETYKRALNKCESLQPHVALFLIKNCLAAPKLIYLLRCCPSWLALDKLHNFDIILKSTIEKVLNINLSNTSWSQACLPIRLGGLGLRRLTDLSIPAYLASAHSSRVLVDLILKSNVDLDLHCVVDARKLWTDSLPDVSEPDNKCSQAAWNIPLINKSYQSILDISNNSYDCARLLASTQKEAGAWLHAVPSAPLGTLLDKDSLRIAVSLRLGSKICQPHICKCGSQVDEMGLHGLSCQKSAGRFSRHQALNEFIKRSLWSAKIPSVLEPSGLSRSDGKRPDGMSLVPWSEGRCLVWDATCVDTFAACHISSTSKKAGSAAHTAEFRKHIKYNSIKQNYNFVAFGVETMGVYSLDTHKFIKELGKRIFQECGDPKCHNYLKQNMSIIIQRGNAASVLGTLPGGKPLVYFVE

SEQ ID NO: 1639 - protein, 673 aa, Tinea semifulvella
MMSGSVPDEVCRILYGASLCALKKKQGGIRPIAVGNTIRRITAKIACSSVKSDLKEYFVPFQMGFGVKGGCEALVHATRQFLINPHLEKKAILKLDFRNAFNAIERSEMLKQAYLKIPSISRFISQCYTNASCLLYNGDILLSACGCQQGDPLGPALFSLTIQPMINELISDFNCWYLDDGTIAGSIENLLSDLSKIISLSNNLGLKLNPSKCEVFFLDEASENDYQRFNNLANGIILLNKNKFNLLGAPVTTEAIFNTLDLKLETYKRALNKCESLQPHVALFFIKNCLAAPKLIYLLRCCPSWLALDKLHNFDIILKSTIEKVLNINLSNTSWSQACLPIRLGGLGLRRLTDLSIPAYLASAHSSRVLVDLILKSNVDLDLHCVVDARKLWTDSLPDVSEPDNKCSQAAWDIPLINKSYQSILDISNNSYDCARLLASTQKEAGAWLHAVPSAPLGTLLDKDSLRIAVSLRLGSKICQPHICKCGSQVDEMGLHGLSCQKSAGRFSRHQALNEFIKRSLWSAKIPSVLEPSGLSRSDGKRPDGMSLVPWSEGRCLVWDATCVDTFAACHISSTSKKAGSAAHTAEFRKHIKYNSIKQNYNFVAFGVETMGVYSLDTHKFIKELGKRIFQECGDPKCHNYLKQNMSIIIQRGNAASVLGTLPSGKPLVYFVE

SEQ ID NO: 1640 - protein, 1015 aa, Tinea semifulvella
MSSSVNTCTCGNKYNNNDHIIICDICQKWFHGKCVDISLDQLGQFQTSNTAWFCNFCSSLSITCQSQDQPQLSNDSLCNIRQCHECFICSRVFSSSKGLKIHNTRVHKDRLLFSPNQSPVASQNTSANCFETSLANFKKNIKIYKRIPRGARIAVADSLASLIRACVNKNDLISWEKLLTFAYRVLNIPSEKRCSVVSNIKTNLSLIESQTSDECTSNYNPSTFSVNKLIESKIADGDIKGAVRILCSDDVYASPDSETLKELSEKHPAANSDKILPPLPSNIVSNYQTNNDEVIKAIFSFPSGSAGGPDGLRPQHFKDLLTRNTGASGARFINALTDLINLMMSGSVPDEVCRILYGASLCALKKKQGGIRPIAVGNSIRRITAKIACSSVKSDLKEYFVPFQMGFGVKGGCEALVHATRQFLINPHLEKKAILKLDFRNAFNAIERSEMLKQAYLKIPSISRFISQCYTNASCLLYNGDILLSACGCQQGDPLGPALFSLTIQPMINELISDFNCWYLDDGTIAGSIENLLSDLSKIISLSNNLGLKLNPSKCEVFFLDEASENDYQRFNNLANGIILLNKNKFNLLGAPVTTEAIFNTLDLKLETYNRALNKCESLQPHVALFLIKNCLAAPKLIYLLRCCPSWLALDKLHNFDIILKSTIEKVLNINLSNTSWSQACLPIRLGGLGLRRLTDLSIPAYLASAHSSRVLVDLILKSNVDLDLHCVVDARKLWTDSLPDVSEPDNKCSQAAWDIPLINKSYQSIVDISNNTYDCARLLASTQKEAGAWLHAVPSAPLGTLLDKDSLRIAVSLRLGSKICQPHICKCGSQVDEMGLHGLSCQKSAGRFSRHQALNELIKRSLWSAKIPSVLEPSGLSRSDGKRPDGMSLVPWSEGRCLVWDATCVDTFAACHISSTSKKAGSAAHTAEFRKHIKYNSIKQNYNFVAFGVETMGVYSLDTHKFIKELGKRIFQECGDPKCHNYLKQNISIIIQRGNAASVLGTLPGGKPLVYFVE

SEQ ID NO: 1641 - protein, 673 aa, Tinea semifulvella
MMSGSVPDEVCRILYGASLCALKKKQGGIRPIAVGNTIRRITAKIACSSVKSDLKEYFVPFQMGFGVKGGCEALVHATRQFLINPHLEKKAILKLDFRNAFNAIERSEMLKQAYLKIPSISRFISQCYTNASCLLYNGDILLSACGCQQGDPLGPALFSLTIQPMINELISDFNCWYLDDGTIAGSIENLLSDLSKIISLSNNLGLKLNPSKCEVFFLDEASENDYQRFNNLANGIILLNKNKFNLLGAPVTTEAIFNTLDLKLETYNRALNKCESLQPHVALFLIKNCLAAPKLIYLLRCCPSWLALDKLHNFDIILKSTIEKVLNINLSNTSWSQACLPIRLGGLGLRRLTDLSIPAYLASAHSSRVLVDLILKSNVDLDLHCVVDARKLWTDSLPDVSEPDNKCSQAAWDIPLINKSYQSIVDISNNTYDCARLLASTQKEAGAWLHAVPSAPLGTLLDKDSLRIAVSLRLGSKICQPHICKCGSQVDEMGLHGLSCQKSAGRFSRHQALNELIKRSLWSAKIPSVLEPSGLSRSDGKRPDGMSLVPWSEGRCLVWDATCVDTFAACHISSTSKKAGSAAHTAEFRKHIKYNSIKQNYNFVAFGVETMGVYSLDTHKFIKELGKRIFQECGDPKCHNYLKQNISIIIQRGNAASVLGTLPGGKPLVYFVE

SEQ ID NO: 1642 - protein, 1052 aa, Tinea semifulvella
MAFGIATLLENSFTQLFYEFVGIKRIYPHCFNQYLLNLFSSVNTCICGNKYNNNDHIIICDICQKWFHGKCVDISLDQLGQFQTSNTAWFCNFCSSLSITCQSQDQPQLSNDSLCNIRQCHECVICSRVFLSSKGLKIHNTRVHKDRLLFSPIQSPVASQNTSANCFETSLANLKKNIKIYKRIPRGARIAVADSLASLIRACVNKNDLISWEKLLTFAYRVLNIPSEKRCSVVSNIKTNLSLIESQTSDECTSNYNPSTFSVNKLIESKIADGDIKGAVRILCSDDVYATPDSETLKELSEKHPAANSDKILPPLPSNIVSNYQTNNDEVIKAIFSFPSGSAGGPDGLRPQHFKDLLTRNTGASGARFINALTDLINLMMSGSVPDEVCRILYGASLCALKKKQGGIRPIAVGNTIRRITAKIACSSVKSDLKEYFVPFQMGFGVKGGCEALVHATRQFLINPHLEKKAILKLDFRNAFNAIERSEMLKQAYLKIPSISRFISQCYTNASCLLYNGDILLSACGCQQGDPLGPALFSLTIQPMINELISDFNCWYLDDGTIAGSIENLLSDLSKIISLSNNLGLKLNPSKCEVFFLDEASENNYQRFNNLANGIILLNKNKFNLLGAPVTTEAIFNTLDLKLETYKRALNKCESLQPHVALFLIKNCLAAPKLIYLLRCCPSWLALDKLHNFDIILKSTIEKVLNINLSNTSWSQACLPIRLGGLGLRRLTDLSIPAYLASAHSSRVLVDLILKSNVDLDLHCVVDARKLWTDSLPDVSEPDNKCSQAAWDIPLINKSYQSILDISNNSYDCARLLASTQKEAGAWLHAVPSAPLGTLLDKDSLRIAVSLRLGSKICQPHICKCGSQVDEMGLHGLSCQKSAGRFSRHQALNEFIKRSLWSAKIPSVLEPSGLSRSDGKRPDGMSLVPWSEGRCLVWDATCVDTFAACHISSTSKKAGSAAHTAEFRKHIKYNSIKQNYNFVAFGVETMGVYSLDTHKFIKELGKRIFQECGDPKCHNYLKQNMSIIIQRGNAASVLGTLPSGKPLVYFVE

SEQ ID NO: 1643 - protein, 1015 aa, Tinea semifulvella
MSSSVNTCICGNKYNNNDHIIICDICQKWFHGKCVDISLDQLGQFQTSNTAWFCNFCSSLSITCQSQDQPQLSNDSLCNIRQCHECVICSRVFLSSKGLKIHNTRVHKDRLLFSPIQSPVASQNTSANCFETSLANLKKNIKIYKRIPRGARIAVADSLASLIRACVNKNDLISWEKLLTFAYRVLNIPSEKRCSVVSNIKTNLSLIESQTSDECTSNYNPSTFSVNKLIESKIADGDIKGAVRILCSDDVYATPDSETLKELSEKHPAANSDKILPPLPSNIVSNYQTNNDEVIKAIFSFPSGSAGGPDGLRPQHFKDLLTRNTGASGARFINALTDLINLMMSGSVPDEVCRILYGASLCALKKKQGGIRPIAVGNTIRRITAKIACSSVKSDLKEYFVPFQMGFGVKGGCEALVHATRQFLINPHLEKKAILKLDFRNAFNAIERSEMLKQAYLKIPSISRFISQCYTNASCLLYNGDILLSACGCQQGDPLGPALFSLTIQPMINELISDFNCWYLDDGTIAGSIENLLSDLSKIISLSNNLGLKLNPSKCEVFFLDEASENDYQRFNNLANGIILLNKNKFNLLGAPVTTEAIFNTLDLKLETYKRALNKCESLQPHVALFLIKNCLAAPKLIYLLRCCPSWLALDKLHNFDIILKSTIEKVLNINLSNTSWSQACLPIRLGGLGLRRLTDLSIPAYLASAHSSRVLVDLILKSNVDLDLHCVVDARKLWTDSLPDVSEPDNKCSQAAWDIPLINKSYQSILDISNNSYDCARLLASTQKEAGAWLHAVPSAPLGTLLDKDSLRIAVSLRLGSKICQPHICKCGSQVDEMGLHGLSCQKSAGRFSRHQALNEFIKRSLWSAKIPSVLEPSGLSRSDGKRPDGMSLVPWSEGRCLVWDATCVDTFAACHISSTSKKAGSAAHTAEFRKHIKYNSIKQNYNFVAFGVETMGVYSLDTHKFIKELGKRIFQECGDPKCHNYLKQNMSIIIQRGNAASVLGTLPSGKPLVYFVE

SEQ ID NO: 1644 - protein, 1015 aa, Tinea semifulvella
MSSSVNTCICGNKYNNNDHIIICDICQKWFHGKCVDISLDQLGQFQTSNTAWFCNFCSSLSITCQSQDQPQLSNDSLCNIRQCHECVICSRVFSSSKGLKIHNTRVHKDRLLFSPIQSPVASQNTSANCFETSLANLKKNIKIYKRIPRGARIAVADSLASLIRACVNKNDLISWEKLLTFAYRVLNIPSEKRCSVVSNIKTNLSLIESQTSDECTSNYNPSTFSVNKLIESKITDGDIKGAVRILCSDDVYATPDSETLKELSEKHPAANSNKILPPLPSNIVSNYQTNNDEVIKAIFSFPSGSAGGPDGLRPQHFKDLLTRNTGASGARFINALTDLINLMMSGSVPDEVCRILYGASLCALKKKQGGIRPIAVGNTIRRITAKIACSSVKSDLKEYFVPFQMGFGVKGGCEALVHATRQFLINPHLEKKAILKLDFRNAFNAIERSEMLKQAYLKIPSISRFISQCYTNASCLLYNGDILLSACGCQQGDPLGPALFSLTIQPMINELISDFNCWYLDDGTIAGSIENLLSDLSKIISLSNNLGLKLNPSKCEVFFLDEASENDYQRFNNLANGIILLNKNKFNLLGAPVTTEAIFNTLDLKLETYKRALNKCESLQPHVALFLIKNCLAAPKLIYLLRCCPSWLALDKLHNFDIILKSTIEKVLNINLSNTSWSQACLPIRLGGLGLRRLTDLSIPAYLASAHSSRVLVDLILKSNVDLDLHCVVDARKLWTDSLPDVSEPDNKCSQAAWDIPLINKSYQSILDISNNSYDCARLLASTQKEAGAWLHAVPSAPLGTLLDKDSLRIAVSLRLGSKICQPHICKCGSQVDEMGLHGLSCQKSAGRFSRHQALNEFIKRSLWSAKIPSVLEPSGLSRSDGKRPDGMSLVPWSEGRCLVWDATCVDTFAACHISSTSKKAGSAAHTAEFRKHIKYNSIKQNYNFVAFGVETMGVYSLDTHKFIKELGKRIFQECGDPKCHNYLKQNMSIIIQRGNAASVLGTLPSGKPLVYFVE

SEQ ID NO: 1645 - protein, 1015 aa, Tinea semifulvella
MSSSVNTCICGNKYNNNDHIIICDICQKWFHGKCVDISLDQLGQFQTSNTAWFCNFCSSLSITCQSQDQPQLSNDSLCNIRQCHECVICSRVFLSSKGLKIHNTRVHKDRLLFSPIQSPVASQNTSANCFETSLANLKKNIKIYKRIPRGARIAVADSLASLIRACVNKNDLISWEKLLTFAYRVLNIPSEKRCSVVSNIKTNLSLIESQTSDECTSNYNPSTFSVNKLIESKIADGDIKGAVRILCSDDVYATPDSETLKELSEKHPAANSDKILPPLPSNIVSNYQTNNDEVIKAIFSFPSGSAGGPDGLRPQHFKDLLTRNTGASGARFINALTDLINLMMSGSVPDEVCRILYGASLCALKKKQGGIRPIAVGNTIRRITAKIACSSVKSDLKEYFVPFQMGFGVKGGCEALVHATRQFLINPHLEKKAILKLDFRNAFNAIERSEMLKQAYLKIPSISRFISQCYTNASCLLYNGDILLSACGCQQGDPLGPALFSLTIQPMINELISDFNCWYLDDGTIAGSIENLLSDLSKIISLSNNLGLKLNPSKCEVFFLDEASENDYQRFNNLANGIILLNKNKFNLLGAPVTTEAIFNTLDLKLETYKRALNKCESLQPHVALFLIKNCLAAPKLIYLLRCCPSWLALDKLHNFDIILKSTIEKVLNINLSNTSWSQACLPIRLGGLGLRRLTDLSIPAYLASAHSSRVLVDLILKSNVDLDLHCVVDARKLWTDSLPDVSEPDNKCSQAAWDIPLINKSYQSILDISNNSYDCARLLASTQKEAGAWLHAVPSAPLGTLLDKDSLRIAVSLRLGSKICQPHICKCGSQVDEMGLHGLSCQKSAGRFSRHQALNEFIKRSLWSAKIPSVLEPSGLSRSDGKRPDGMSLVPWSEGRCLVWDANCVDTFAACHISSTSKKAGSAAHTAEFRKHIKYNSIKQNYNFVAFGVETMGVYSLDTHKFIKELGKRIFQECGDPKCHNYLKQNMSIIIQRGNAASVLGTLPSGKPLVYFVE

SEQ ID NO: 1646 - protein, 1015 aa, Tinea semifulvella
MSSSVNTCTCGNKYNNNDHIIICDICQKWFHGKCVDISLDQLGQFQTSNTAWFCNFCSSLSITCQSQDQPQLSNDSLCNIRQCHECFICSRVFSSSKGLKIHNTRVHKDRLLFSPNQSPVASQNTSANCFETSLANFKKNIKIYKRIPRGARIAVADSLASLIRACVNKNDLISWEKLLTFAYRVLNIPSEKRCSVVSNIKTNLSLIESQTSDECTSNYNPSTFSVNKLIESKIADGDIKGAVRILCSDDVYASPDSETLKELSEKHPAANSDKILPPLPSNIVSNYQTNNDEVIKAIFSFPSGSAGGPDGLRPQHFKDLLTRNTGASGARFINALTDLINLMMSGSVPDEVCRILYGASLCALKKKQGGIRPIAVGNTIRRITAKIACSSVKSDLKEYFVPFQMGFGVKGGCEALVHATRQFLINPHLEKKAILKLDFRNAFNAIERSEMLKQAYLKIPSISRFISQCYTNASCLLYNGDILLSACGCQQGDPLGPALFSLTIQPMINELISDFNCWYLDDGTIAGSIENLLSDLSKIISLSNNLGLKLNPSKCEVFFLDEASENDYQRFNNLANGIILLNKNKFNLLGAPVTTEAIFNTLDLKLETYNRALNKCESLQPHVALFLIKNCLAAPKLIYLLRCCPSWLALDKLHNFDIILKSTIEKVLNINLSNTSWSQACLPIRLGGLGLRRLTDLSIPAYLASAHSSRVLVDLILKSNVDLDLHCVVDARKLWTDSLPDVSEPDNKCSQAAWDIPLINKSYQSIVDISNNTYDCARLLASTQKEAGAWLHAVPSAPLGTLLDKDSLRIAVSLRLGSKICQPHICKCGSQVDEMGLHGLSCQKSAGRFSRHQALNELIKRSLWSAKIPSVLEPSGLSRSDGKRPDGMSLVPWSEGRCLVWDATCVDTFAACHISSTSKKAGSAAHTAEFRKHIKYNSIKQNYNFVAFGVETMGVYSLDTHKFIKELGKRIFQECGDPKCHNYLKQNISIIIQRGNAASVLGTLPGGKPLVYFVE

SEQ ID NO: 1647 - protein, 1015 aa, Tinea semifulvella
MSSSVNTCICGNKYNNNDHIIICDICQKWFHGKCVDISLDQLGQFQTSNTAWFCNFCSSLSITCQSQDQPQLSNDSLCNIRQCHECVICSRVFLSSKGLKIHNTRVHKDRLLFSPIQSPVASQNTSANCFETSLANLKKNIKIYKRIPRGARIAVADSLASLIRACVNKNDLISWEKLLTFAYRVLNIPSEKRCSVVSNIKTNLSLIESQTSDECTSNYNPSTFSVNKLIESKIADGDIKGAVRILCSDDVYATPDSETLKELSEKHPAANSDKILPPLPSNIVSNYQTNNDEVIKAIFSFPSGSAGGPDGLRPQHFKDLLTRNTGASGARFINALTDLINLMMSGSVPDEVCRILYGASLCALKKKQGGIRPIAVGNTIRRITAKIACSSVKSDLKEYFVPFQMGFGVKGGCEALVHATRQFLINPHLEKKAILKLDFRNAFNAIERSEMLKQAYLKIPSISRFISQCYTNASCLLYNGDILLSACGCQQGDPLGPALFSLTIQPMINELISDFNCWYLDDGTIAGSIENLLSDLSKIICLSNNLGLKLNPSKCEVFFLDEASENDYQRFNNLANGIILLNKNKFNLLGAPVTTEAIFNTLDLKLETYKRALNKCESLQPHVALFLIKNCLAAPKLIYLLRCCPSWLALDKLHNFDIILKSTIEKVLNINLSNTSWSQACLPIRLGGLGLRRLTDLSIPAYLASAHSSRVLVDLILKSNVDLDLHCVVDARKLWTDSLPDVSEPDNKCSQAAWDIPLINKSYQSILDISNNSYDCARLLASTQKEAGAWLHAVPSAPLGTLLDKDSLRIAVSLRLGSKICQPHICKCGSQVDEMGLHGLSCQKSAGRFSRHQALNEFIKRSLWSAKIPSVLEPSGLSRSDGKRPDGMSLVPWSEGRCLVWDATCVDTFAACHISSTSKKAGSAAHTAEFRKHIKYNSIKQNYNFVAFGVETMGVYSLDTHKFIKELGKRIFQECGDPKCHNYLKQNMSIIIQRGNAASVLGTLPSGKPLVYFVE

SEQ ID NO: 1648 - protein, 915 aa, Tinea semifulvella
MLYTRVHKDRLLFSPNQSPVASQNTSANCFETSLANFKKNIKIYKRIPRGARIAVADSLASLIRACVNKNDLISWEKLLTFAYRVLNIPSEKRCSVVSNIKTNLSLIESQTSDECTSNYNPSTFSVNKLIESKIADGDIKGAVRILCSDDVYASPDSETLKELSEKHPAANSDKILPPLPSNIVSNYQTNNDEVIKAIFSFPSGSAGGPDGLRPQHFKDLLTRNTGASGARFINALTDLINLMMSGSVPDEVCRILYGASLCALKKKQGGIRPIAVGNTIRRITAKIACSSVKSDLKEYFVPFQMGFGVKGGCEALVHATRQFLINPHLEKKAILKLDFRNAFNAIERSEMLKQAYLKIPSISRFISQCYTNASCLLYNGDILLSACGCQQGDPLGPALFSLTIQPMINELISDFNCWYLDDGTIAGSIENLLSDLSKIISLSNNLGLKLNPSKCEVFFLDEASENDYQRFNNLANGIILLNKNKFNLLGAPVTTEAIFNTLDLKLETYNRALNKCESLQPHVALFLIKNCLAAPKLIYLLRCCPSWLALDKLHNFDIILKSTIEKVLNINLSNTSWSQACLPIRLGGLGLRRLTDLSIPAYLASAHSSRVLVDLILKSNVDLDLHCVVDARKLWTDSLPDVSEPDNKCSQAAWDIPLINKSYQSIVDISNNTYDCARLLASTQKEAGAWLHAVPSAPLGTLLDKDSLRIAVSLRLGSKICQPHICKCGSQVDEMGLHGLSCQKSAGRFSRHQALNELIKRSLWSAKIPSVLEPSGLSRSDGKRPDGMSLVPWSEGRCLVWDATCVDTFAACHISSTSKKAGSAAHTAEFRKHIKYNSIKQNYNFVAFGVETMGVYSLDTHKFIKELGKRIFQECGDPKCHNYLKQNISIIIQRGNAASVLGTLPGGKPLVYFVE

SEQ ID NO: 1649 - protein, 1015 aa, Tinea semifulvella
MSSSVNTCICGNKYNNNDHIIICDICQKWFHGKCVDISLDQLGQFQTSNTAWFCNFCSSLSITCQSQDQPQLSNDSLCNIRQCHECVICSRVFLSSKGLKIHNTRVHKDRLLFSPIQSPVASQNTSANCFETSLANLKKNIKIYKRIPRGARIAVADSLASLIRACVNKNDLISWEKLLTFAYRVLNIPSEKRCSVVSNIKTNLSLIESQTSDECTSNYNPSTFSVNKLIESKIADGDIKGAVRILCSDDVYATPDSETLKELSEKHPAANSEKILPPLPSNIVSNYQTNNDEVIKAIFSFPSGSAGGPDGLRPQHFKDLLTRNTGASGARFINALTDLINLMMSGSVPDEVCRILYGASLCALKKKQGGIRPIAVGNTIRRITAKIACSSVKSDLKEYFVPFQMGFGVKGGCEALVHATRQFLINPHLEKKAILKLDFRNAFNAIERSEMLKQAYLKIPSISRFISQCYTNASCLLYNGDILLSACGCQQGDPLGPALFSLTIQPMINELISDFNCWYLDDGTIAGSIENLLSDLSKIISLSNNLGLKLNPSKCEVFFLDEASENDYQRFNNLANGIILLNKNKFNLLGAPVTTEAIFNTLDLKLETYKRALNKCESLQPHVALFLIKNCLAAPKLIYLLRCCPSWLALDKLHNFDIILKSTIEKVLNINLSNTSWSQACLPIRLGGLGLRRLTDLSIPAYLASAHSSRVLVDLILKSNVDLDLHCVVDARKLWTDSLPDVSVPDNKCSQAAWDIPLINKSYQSILDISNNSYDCARLLASTQKEAGAWLHAVPSAPLGTLLDKDSLRIAVSLRLGSKICQPHICKCGSQVDEMGLHGLSCQKSAGRFSRHQALNEFIKRSLWSAKIPSVLEPSGLSRSDGKRPDGMSLVPWSEGRCLVWDATCVDTFAACHISSTSKKAGSAAHTAEFRKHIKYNSIKQNYNFVAFGVETMGVYSLDTHNFIKELGKRIFQECGDPKCHNYLKQNMSIIIQRGNAASVLGTLPSGKPLVYFVE

SEQ ID NO: 1650 - protein, 974 aa, Tinea semifulvella
MSSNPTDSACSSNLPVTHNTNISLPNRQDDPCTLDSQLSDLQQSSSDLSTCNICNKIFKGTRGLRIHYARIHKEHVFPSSVSSDTPTVFPLQASFEDFFRYQRNKIKVLKRIPKGARYCAADKLSFLIRKCVDNNDIQDWENLFTFAYTALRVPNKSKKSLTASIKENVYNYNTPPISNVFAGHAPSRLSKRIEAKVSDGDVRGAVRLLLSTDDIAPFDVSTVASLQSKHPLPSRPLNFPQEPAPNATHLKAEIKDIISAIKSFPNGSAGGLDGLRPQILKDLTSFSSGDAGHRLLDSIFGLTNLMLSGSINVSFTKYLYGASLCALKKKDGGLRPIAVGNVFRRIASKIACASIFESVSTYLSPIQVGFAVRNGCEAAVHSTRFFLESNKDTSKIILKIDYKNAFNSVERDCMLKEIIDICPNIFPYMWQSYSSSSSLLFGECMIESVVGCQQGDPMGPAAFALSIHPLIRQLASELNIWYLDDGTLGGDPSTVLQDFSKIIKESKKIGLDVNTNKCELYFPGDFDQEVFDSFNNIAPGIHLVNSKPSLLGAPLTDDGIPSMLDSKLTSLKLACSRLADVDPHTVLFLLKNCLASPRFIYNLRTAPTWDSDILFQVDSILKTTIQDVLNINLSSSQFIQSSLPIWSGGLGVRRVSDLSIPAYLGSISNVKHLCQSILLKSNNNISQLYRESEVIALWKTKSMLTDLPTVCTQHELDKPIVKTIFKSLPKFSITDESRLLASCESESGAWLRAIPSPNTGTQLDPTSLRIAVSLRLGCQLYEAHKCVCGELADPFGHHGLSCSKSAGRFTRHRSLNLIIQKALSSANYPSTLEPTGIFRSDGKRPDGLTLVPYKQGKSLVWDATCTDTLCASRVGATRKRAGAAAELAANGKRNKYIELANRYYFVPFAVETMGPWSEDAKSLIRDISVAIRASTGDPLSREYLIQRISVAIQRGNVAGVLGTLGSSSPGFDDM

SEQ ID NO: 1651 - protein, 969 aa, Tinea semifulvella
MSSNPTDSACSSNLPVTHNTNISLPNRQDDPCTLDSQLSDLQQSSSDLSTCNICNKIFKGTRGLRIHMEHVFPSSVSSDTPTVFPLQASFEDFFRYQRNKIKVLKRIPKGARYCAADKLSFLIRKCVDNNDIQDWENLFTFAYTALRVPNKSKKSLTASIKENVYNYNTPPISNVFAGHAPSRLSKRIEAKVSDGDVRGAVRLLLSTDDIAPFDVSTVASLQSKHPLPSRPLNFPQEPAPNATHLKAEIKDIISAIKSFPNGSAGGLDGLRPQILKDLTSFSSGDAGHRLLDSIFGLTNLMLSGSINVSFTKYLYGASLCALKKKDGGLRPIAVGNVFRRIASKIACASIFESVSTYLSPIQVGFAVRNGCEAAVHSTRFFLESNKDTSKIILKIDYKNAFNSVERDCMLKEIIDICPNIFPYMWQSYSSSSSLLFGECMIESVVGCQQGDPMGPAAFALSIHPLIRQLASELNIWYLDDGTLGGDPSTVLQDFSKIIKESKKIGLDVNTNKCELYFPGDFDQEVFDSFNNIAPGIHLVNSKPSLLGAPLTDDGIPSMLDSKLTSLKLACSRLADVDPHTVLFLLKNCLASPRFIYNLRTAPTWDSDILFQVDSILKTTIQDVLNINLSSSQFIQSSLPIWSGGLGVRRVSDLSIPAYLGSISNVKHLCQSILLKSNNNISQLYRESEVIALWKTKSMLTDLPTVCTQHELDKPIVKTIFKSLPKFSITDESRLLASCESESGAWLRAIPSPNTGTQLDPTSLRIAVSLRLGCQLYEAHKCVCGELADPFGHHGLSCSKSAGRFTRHRSLNLIIQKALSSANYPSTLEPTGIFRSDGKRPDGLTLVPYKQGKSLVWDATCTDTLCASRVGATRKRAGAAAELAANGKRNKYIELANRYYFVPFAVETMGPWSEDAKSLIRDISVAIRASTGDPLSREYLIQRISVAIQRGNVAGVLGTLGSSSPGFDDM

SEQ ID NO: 1652 - protein, 974 aa, Tinea semifulvella
MSSNPTDSACSSNLPVTHNTNISLPNRQDDPCTLDSQLSDLQQSSSDLSTCNICNKIFKGTRGLRIHYARIHKEHVFPSSVSSDTPTVFPLQASFEDFFRYQRNKIKVLKRIPKGARYCAADKLSFLIRKCVDNNDIQDWENLFTFAYTALRVPNKSKKSLTASIKENVYNYNTPPISNVFAGHAPSRLSKRIEAKVSDGDVRGAVRLLLSTDDIAPFDVSTVASLQSKHPLPSIPLNFPQEPAPNATHLKAEIKDIISAIKSFPNGSAGGLDGLRPQILKDLTSFSSGDAGHRLLDSIFGLTNLMLSGSINVSFTKYLYGASLCALKKKDGGLRPIAVGNVFRRIASKIACASIFESVSTYLSPIQVGFAVRNGCEAAVHSTRFFLESNKDTSKIILKIDYKNAFNSVERDCMLKEIIDICPNIFPYMWQSYSSSSSLLFGECMIESVVGCQQGDPMGPAAFALSIHPLIRQLASELNIWYLDDGTLGGDPSTVLQDFSKIIKESKKIGLDVNTNKCELYFPGDFDQEVFDSFNNIAPGIHLVNSKPSLLGAPLTDDGIPSMLDSKLTSLKLACSRLADVDPHTVLFLLKNCLASPRFIYNLRTAPTWDSDILFQVDSILKTTIQDVLNINLSSSQFIQSSLPIWSGGLGVRRVSDLSIPAYLGSISNVKHLCQSILLKSNNNISQLYRESEVIALWKTKSMLTDLPTVCTQHELDKPIVKTIFKSLPKFSITDESRLLASCESESGAWLRAIPSPNTGTQLDPTSLRIAVSLRLGCQLYEAHKCVCGELADPFGHHGLSCSKSAGRFTRHRSLNLIIQKALSSANYPSTLEPTGIFRSDGKRPDGLTLVPYKQGKSLVWDATCTDTLCASRVGATRKRAGAAAELAANGKRNKYIELANRYYFVPFAVETMGPWSEDAKSLIRDISVAIRASTGDPLSREYLIQRISVAIQRGNVAGVLGTLGSSSPGFDDM

SEQ ID NO: 1653 - protein, 974 aa, Tinea semifulvella
MSSNPTDSACSSNLPVTHKTNISLPNRQDDPCTLDSQLSDLQQSSSDLSTCNICNKIFKGTRGLRIHYARIHKEHVFPSSVSSDTPTVFPLQASFEDFFRYQRNKIKVLKRIPKGARYCAADKLSFLIRKCVDNNDIQDWENLFTFAYTALRVPNKSKKSLTASIKENVYSYNTPPISNVFAGHAPSRLSKRIEAKGSDGDVRGAVRLLLSTDDIAPFDVSTVASLQSKHPLPSRPLNFPQEPAPNATHLKAEIKDIISAIKSFPNGSAGGLDGLRPQILKDLTSFSSGDAGHRLLDSIFGLTNLMLSGSINVSFTKYLYGASLCALKKKDGGLRPIAVGNVFRRIASKIACASIFESVSTYLSPIQVGFAVRNGCEAAVHSTRFFLESNKDTSKIILKIDYKNAFNSVERDCMLKEIIDICPNIFPYMWQSYSSSSSLLFGECMIESVVGCQQGDPMGPAAFALSIHPLIRQLASELNIWYLDDGTLGGDPSTVLQDFSKIIKESKKIGLDVNTNKCELYFPGDFDQEVFDSFNNIAPGIHLVNSKPSLLGAPLTDDGIPSMLDSKLTSLKLACSRLADVDPHTVLFLLKNCLASPRFIYNLRTAPTWDSDILFQVDSILKTTIQDVLNINLSSSQFIQSSLPIWSGGLGVRRVSDLSIPAYLGSISNVKHLCQSILLKSNNNISQLYRESEVIALWKTKSMLTDLPTVCTQHELDKPIVKTIFKSLPKFSITDESRLLASCESESGAWLRAIPSPNTGTQLDPTSLRIAVSLRLGCQLYEAHKCVCGELADPFGHHGLSCSKSAGRFTRHRSLNLIIQKALSSANYPSTLEPTGIFRSDGKRPDGLTLVPYKQGKSLVWDATCTDTLCASRVGATRKRAGAAAELAANGKRNKYIELANRYYFVPFAVETMGPWSEDAKSLIRDISVAIRASTGDPLSREYLIQRISVAIQRGNVAGVLGTLGSSSPGFDDM

SEQ ID NO: 1654 - protein, 974 aa, Tinea semifulvella
MSSNPTDSACSSNLPVTHNTNISLPNRQDDPCTLDSQLSDLQQSSSDLSTCNICNKIFKGTRGLRIHYARIHKEHIFPSSVSSDTPTVFPLQASFEDFFRYQRNKIKVLKRIPKGARYCAADKLSFLIRKCVDNNDIQDWENLFTFAYTALRVPNKSKKSLTASIKENVYNYNTPPISNVFAGHAPSRLSKRIEAKVSDGDVRGAVRLLLSTDDIAPFDVSTVASLQSKHPLPSRPLNFPQEPAPNATHLKAEIKDIISAIKSFPNGSAGGLDGLRPQILKDLTSFSSGDAGHRLLDSIFGLTNLMLSGSINVSFTKYLYGASLCALKKKDGGLRPIAVGNVFRRIASKIACASIFESVSTYLSPIQVGFAVRNGCEAAVHSTRFFLESNKDTSKIILKIDYKNAFNSVERDCMLKEIIDICPNIFPYMWQSYSSSSSLLFGECMIESVVGCQQGDPMGPAAFALSIHPLIRQLASELNIWYLDDGTLGGDPSTVLQDFSKIIKESKKIGLDVNTNKCELYFPGDFDQEVFDSFNNIAPGIHLVNSKPSLLGAPLTDDGIPSMLDSKLTSLKLACSRLADVDPHTVLFLLKNCLASPRFIYNLRTAPTWDSDILFQVDSILKTTIQDVLNINLSSSQFIQSSLPIWSGGLGVRRVSDLSIPAYLGSISNVKHLCQSILLKSNNNISQLYRESEVIALWKTKSMLTDLPTVCTQHELDKPIVKTIFKSLPKFSITDESRLLASCESESGAWLRAIPSPNTGTQLDPTSLRIAVSLRLGCQLYEAHKCVCGELADPFGHHGLSCSKSAGRFTRHRSLNLIIQKALSSANYPSTLEPTGIFRSDGKRPDGLTLVPYKQGKSLVWDATCTDTLCASRVGATRKRAGAAAELAANGKRNKYIELANRYYFVPFAVETMGPWSEDAKSLIRDISVAIRASTGDPLSREYLIQRISVAIQRGNVAGVLGTLGSSSPGFDDM

SEQ ID NO: 1655 - protein, 847 aa, Tinea semifulvella
MDTLKQKLNVLASRLNRYLKCTDRKRQNTQFINNESVFYRTLANKHCHRTDMHEATSPTPHELHKYWADIWENPIRHNDSADWISDIPIQSTQGMQFDNITLDIFVKVLLRAHNWKAPGSDNIHNYWYKKITYLHPFIYNHINKFIKSPDTMPTYLTKGVTYMIPKEANSIDPAKYRPITCLQTFYKLLTACISESIYTHLTTNDILSEEQKGCRKNSQGCKEQLTIDAIVMKKACIKKHNIYSMYVDYRKAFDSIPHSWLLHILKLYKIHPIIVLFFENIMTTWQTTLKTKEISTDPIKIQRGIFQGDALSPLWFCMAINPLSTLLNNSIAGIELKGNNNHQILTHLMYMDDIKLYSNSKQNLFKLADITQQFSQDIRMQFGVDKCKTHSINKGKINKTEYNLDNGEQIEPLDENSSYKYLGFHQAKEIYHKDTKKELTDKFRYRLNLILKSHLTSRNIIKAINSFAIPILTYSFGIIKWSKTDLEKIQRIINTNLTKHRKHHPKSCIQRLTLPRSEGGRGLIDVQNLHNKQITTLRKFFHSKSEHSQLHKIITEIDLKYTPLNLQTYETQPNETIISIQDKINKWSEKSLHGRHRADLNQPHVDKEASNAWLKSGDLFPETEAFMIAIQDQVVLTRNYLKYIIKQPNLPTDLCRLCNSASETIQHITGACKSLVQSDYKHRHDQVAAIVHQILASKYKLVNQIVPYYKYKPSTVLQNDNIRLYWDRTIITDKTVHYNRPDITLINKENKTAYLIDIAVPNTHNLITTHTEKNTKYRDLAIELKSKLKLEKVTTVPILVSTTGVIPKTLHDNLKTINVDQHTYRQLQKATILNTCRIVRKFGVKEA

SEQ ID NO: 1656 - protein, 1256 aa, Tinea semifulvella
MATAINSPPTIDKPLAKKKWSLKMNEFIWHNYLIITNLEHDTKSYLGQLHTQFTQHFPAMNVTKQRIGDQRRAIIRNKLLSQNQLDNIRRQVQLELQSQSQAPDQAAQPIFTSQATRRMKWSNHINETIIRCYFEVTDQETHLTAYRNKMFTRFVEYYPYLAHLSEQRIADQRRYLMSNNIIAKDRIDEIRKEVETQQRNTHPNIIQDPIPHTPYIIDTNAETTPPCDTIHLGDTTNGVSTEATNNITSLSSYINLANIKTQFEDAFNKFRHTDPTNRPYIPKQKSSKKLSHILDLLNTEILPQYITLNSDFLTLQTATYTAAYTTAICNGAKIFNQSDTVKRGTKIFKPQWQRRLERRIKDLRADIGRLTQFTKGIRSTKVLKAVQSIKTKYRTHAQYENPNTETEHFMDTLKQKLNVLASRLNRYLKCTDRKRQNTQFINNESVFYRTLANKHCHRTDMHEATSPTPHELHKYWSDIWENPIRHNDSADWISDIPIQSTQGMQFDNITLDIFVKVLLRAHNWKAPGSDNIHNYWYKKITYLHPFIYNHINKFIKSPDTMPTYLTKGVTYMIPKEANSIDPAKYRPITCLQTFYKLLTACISESIYTHLTTNDILSEEQKGCRKNSQGCKEQLTIDAIVMKKACIKKHNIYSMYVDYRKAFDSIPHSWLLHIFKLYKIHPIIVLFFENIMTTWQTTLKTKEISTDPIKIQRGIFQGDALSPLWFCMAINPLSTLLNNSIAGIKLKGNNNHQILTHLMYMDDIKLYSNSKQNLFKLADITQQFSQDIRMQFGVDKCKTHSINKGKINKTEYNLDNGEQIEPLDENSSYKYLGFHQAKEIYHKDTKKELTDKFRYRLNLILKSHLTSRNIIKAINSFAIPILTYSFGIIKWSKTDLEKIQRIINTNLTKHRKHHPKSCIQRLTLPRSEGGRGLIDVQNLHNKQITTLRKFFHSKSEHSQLHKIITEIDLKYTPLNLQTYETQPNETIISIQDKINKWSEKSLHGRHRADLNQPHVDKEASNAWLKSGDLFPETEAFMIAIQDQVVLTRNYLKYIIKQPNLPTDLCRLCNSASETIQHITGACKSLVQSDYKHRHDQVAAIVHQILASKYKLVNQIVPYYKYKPSTVLQNDNIRLYWDRTIITDKTVHYNRPDITLINKENKTAYLIDIAVPNTHNLITTHTEKNTKYRDLAIELKSQLKLEKVTTVPILVSTTGVIPKTLHDSLKTINVDQHTYRQLQKATILNTCRIVRKFGVKEA

SEQ ID NO: 1657 - protein, 1362 aa, Tinea semifulvella
METRLMKKKRIMLLPEGDHRGTSGAGAGCLSMRTTGGEELSRRALVDSNNITAEIITHSVPSSPLSSVSLFQSPNSSHHSYGTLAYSSSTSTSSLPSSLHSIDVVGMATAINSPPTIDKPLAKKKWSLKMNEFIWHNYLIITNLEHDTKSYLDQLHTQFTQHFPAMNVTKQRIGDQRRAIIRNKLLSQNQLDNIRRQVQLELQSQSQAPDQAAQPIFTSQATRRMKWSNHINETIIRCYFEVTDQETHLTAYRNKMFTRFVEYYPYLAHLSEQRIADQRRYLMSNNIITKDRIDEIRKEVETQQRNTHPNITQDPIPHTPNIIDTNAETTPPCDTIHLRDTTNGVSTEATNNITSLSSYINLANIKTQFEDAFNKFRHTDPTNRPYIPKQKSSKKLSHILDLLNTEILPQYITLNSDFLTLQTATYTAAYTTAICNGAKIFNQSDTVKRGTKFFKPQWQRRLERRIKDLRADIGRLTQFTKGIRSTKVLKAVQSIKTKYRTHAQYENPNTETEHFMDTLKQKLNVLASRLNRYLKCTDRKRQNTQFINNESVFYRTLANKHCHRTDMHEATSPTPHELHKYWADIWENPIRHNDSADWISDIPIQSTQGMQFDNITLDIFVKVLLRAHNWKAPGSDNIHNYWYKKITYLHPFIYNYINKFIKSPDTMPTYLTKGVTYMIPKEANSIDPAKYRPITCLQTFYKLLTACISESIYTHLTTNDILSEEQKGCRKNSQGCKEQLTIDAIVMKKACIKKHNIYSMYVDYRKAFDSIPHSWLLHILKLYKIHPIIVLFFENIMTTWQTTLKTKEISTDPIKIQRGIFQGDALSPLWFCMAINPLSTLLNNSIAGIELKGNNNHQILTHLMYMDDIKLYSNSKQNLFKLADITQQFSQDIRMQFGVDKCKTHSINKGKINKTEYNLDNGEQIEPLDENSSYKYLGFHQAKEIYHKDTKKELTDKFRYRLNLILKSHLTSRNIIKAINSFAIPILTYSFGIIKWSKTDLEKIQRIINTNLTKHRKHHPKSCIQRLILPRSEGGRGLIDVQNLHNKQITTLRKFFHSKSEHSQLHKIITEIDLKYTPLNLQTYETQPNETIISIQDKINKWSEKSLHGRHRADLNQPHVDKEASNAWLKSGDLFPETEAFMIAIQDQVVLTRNYLKYIIKQPNLPTDLCRLCNSASETIQHITGACKSLVQSDYKHRHDQVAAIVHQILASKYKLVNQIVPYYKYKPSTVLQNDNIRLYWDRTIITDKTVHYNRPDITLINKENKTAYLIDIAVPNTHNLITTHTEKNTKYRDLAIELKSQLKLEKVTTVPILVSTTGVIPKTLHDNLKTINVDQHTYRQLQKATILNTCRIVRKFGVKEA

SEQ ID NO: 1658 - protein, 847 aa, Tinea semifulvella
MDTLKQKLNVLASRLNIYLKCTDRKRQNTQFINNESVFYRTLANKHCHRTDMHEATSPTPHELHKYWADIWENPIRHNDSADWISDIPIQSTQGMQFDNITLDIFVKVLLRAHNWKAPGSDNIHNYWYKKITYLHPFIYNHINKFIKSPDTMPTYLTKGVTYMIPKEANSIDPAKYRPITCLQTFYKLLTACISESIYTHLTTNDILSEEQKGCRKNSQGCKEQLTIDAIVMKKACIKKHNIYSMYVDYRKAFDSIPHSWLLHILKLYKIHPIIVLFFENIMTTWQTTLKTKEISTDPIKIQRGIFQGDALSPLWFCMAINPLSTLLNNSIAGIKLKGNNNHQILTHLMYMDDIKLYSNSKQNLFKLADITQQFSQDIRMQFGVDKCKTHSINKGKINKTEYNLDNGEQIEPLDENSSYKYLGFHQAKEIYHKDTKKELTDKFRYRLNLILKSHLTSRNIIKAINSFAIPILTYSFGIIKWSKTDLEKIQRIINTNLTKHRKHHPKSCIQRLTLPRSEGGRGLIDVQNLHNKQITTLRKFFHSKSEHSQLHKIITEIDLKYTPLNLQTYETQPNETIISIQDKINKWSEKSLHGRHRADLNQPHVDKEASNAWLKSGDLFPETEAFMIAIQDQVVLTRNYLKYIIKQPNLPTDLCRLCNSTSETIQHITGACKSLVQSDYKHRHDQVAAIVHQILASKYKLVNQIVPYYKYKPSTVLQNDNIRLYWDRTIITDKTVHYNRPDITLINKENKTAYLIDIAVPNTHNLITTHTEKNTKYRDLAIELKSQLKLEKVTTVPILVSTTGVIPKTLHDNLKTINVDQHTYRQLQKATILNTCRIVRKFGVKEA

SEQ ID NO: 1659 - protein, 1362 aa, Tinea semifulvella
METRSMKKKRIMLLPEGDHRGTSGAGAGCLSMRTTGGEELSRRALVDSNNITAEIITHSVPSSPLSSVSLFQSPNSSHHSYGTLEYSSSTSTSSLPSSLHSIDVVGMATAINSPPTIDKPLAKKKWSLKMNEFIWHNYLIITNLEHDTKSYLGQLHTQFTQHFPAMNVTKQRIGDQRRAIIRNKLLSQNQLDNIRRQVQLELQSQSQAPDQAAQPIFTSQATRRMKWSNHINETIIRCYFEVTDQETHLTAYRNKMFTRFVEYYPYLAHLSEQRIADQRRYLMSNNIIAKDRIDEIRKEVETQQRNTHPNIIQDPIPHTPYIIDTNAETTPPCDTIHLGDTTNGVSTEATNNITSLSSYINLANIKTQFEDAFNKFRHTDPTNRPYIPKQKSSKKLSHILDLLNTEILPQYITLNSDFSTLQTATYTAAYTTAIYNGAKIFNQSDTVKRGTKIFKPQWQRRLERRIKDLRADIGRLTQFTKGIRSTKVLKAVQSIKTKYRTHAQYENPNTETEHFMDTLKQTLNVLASRLNRYLKCTDRKRQNTQFINNESVFYRTLANKHCHRTDMHEATSPTPHELHKYWSDIWENPIRHNDSADWISDIPIQSTQGMQFDNITLDIFVKVLLRAHNWKAPGSDNIHNYWYKKITYLHPFIYNHINKFIKSPDTMPTYLTKGVTYMIPKEANSIDPAKYRPITCLQTFYKLLTACISESIYTHLTTNDILSEEQKGCRKNSQGCKEQLTIDAIVMKKACIKKHNIYSMYVDYRKAFDSIPHSWLLHIFKLYKIHPIIVLFFENIMTTWQTTLKTKEISTDPIKIQRGIFQGDALSPLWFCMAINPLSTLLNNSIAGIKLKGNNNHQILTHLMYMDDIKLYSNSKQNLFKLADITQQFSQDIRMQFGVDKCKTHSINKGKINKTEYNLDNGEQIEPLDENSSYKYLGFHQAKEIYHKDTKKELTDKFRYRLNLILKSHLTSRNIIKAINSFAIPILTYSFGIIKWSKTDLEKIQRIINTNLTKHRKHHPKSCIQRLTLPRSEGGRGLIDVQNLHNKQITTLRKFFHSKSEHSQLHKIITEIDLKYTPLNLQTYETQPNETIISIQDKINKWSEKSLHGRHRADLNQPHVDKEASNAWLKSGDLFPETEAFMIAIQDQVVLTRNYLKYIIKQPNLPTDLCRLCNSASETIQHITGACKSLVQSDYKHRHDQVAAIVHQILASKYKLVNQIVPYYKYKPSTVLQNDNIRLYWDRTIITDKTVHYNRPDITLINKENKTAYLIDIAVPNTHNLITTHTEKNTKYRDLAIELKSQLKLEKVTTVPILVSTTGVIPKTLHDSLKTINVDQHTYRQLQKATILNTCRIVRKFGVKEA

SEQ ID NO: 1660 - protein, 1362 aa, Tinea semifulvella
METRSMKKKRIMLLPEGDHRGTSGAGAGCLSMRTTGGEELSRRALVDSNNITAEIITHSVPSSPLSSVSLFQSPNSSHHSYGTLAYSSSTSTSSLPSSLHSIDVVGMATAINSPPTIDKPLAKKKWSLKMNEFIWHNYLIITNLEHDTKSYLDQLHTQFTQHFPAMNVTKQRIGDQRRAIIRNKLLSQNQLDNIRRQVQLELQSQSQAPDQAAQPIFTSQATRRMKWSNHINETIIRCYFEVTDQETHLTAYRNKMFTRFVEYYPYLAHLSEQRIADQRRYLMSNNIIKKDRIDEIRKEVETQQRNTHPNITQDPIPHTPYIIDTNAETTPPCDTIHLRDTTNGVSTEATNNITSLSSYINLANIKTQFEDAFNKFRHTDPTNRPYIPKQKSSKKLSHILDLLNTEILPQYITLNSDFLTLQTATYTAAYTTAICNGTKIFNQSDTVKRGTKFFKPQWQRRLERRIKDLRADIGRLTQFTKGIRSTKVLKAVQSIKTKYRTHAQYENPNKETEHFMDTLKQKLNVLASRLNRYLKCTDRKRQNTQFINNESVFYRTLANKHCHRTDMHEATSPTPHELHKYWADIWENPIRHNDSADWISDIPIQSTQGMQFDNITLDIFVKVLLRAHNWKAPGSDNIHNYWYKKITYLHPFIYNHINKFIKSPDTMPTYLTKGVTYMIPKEANSIDPAKYRPITCLQTFYKLLTACISESIYTHLTTNDILSEEQKGCRKNSQGCKEQLTIDAIVMKKACIKKHNIYSMYVDYRKAFDSIPHSWLLHILKLYKIHPIIVLFFENIMTTWQTTLKTKEISTDPIKIQRGIFQGDALSPLWFCMAINPLSTLLNNSIAGIKLKGNNNHQILTHLMYMDDIKLYSNSKQNLFKLADITQQFSQDIRMQFGVDKCKTHSINKGKINKTEYNLDNGEQIEPLDENSSYKYLGFHQAKEIYHKDTKKELTDKFRYRLNLILKSHLTSRNIIKAINSFAIPILTYSFGIIKWSKTDLEKIQRIINTNLTKHRKHHPKSCTQRLTLPRCEGGRGLIDVQNLHNKQITTLRKFFHSKSEHSQLHKIITEIDLKYTPLNLQTYETQPNETIISIQDKINKWSEKSLHGRHRADLNQPHVDKEASNAWLKSGDLFPETEAFMIAIQDQVVLTRNYLKYIIKQPNLPTDLCRLCNSASETIQHITGACKSLVQSDYKHRHDQVAAIVHQILASKYKLVNQIVPYYKYKPSTVLQNDNIRLYWDRTIITDKTVHYNRPDITLINKENKTAYLIDIAVPNTHNLITTHTEKNTKYRDLAIELKSQLKLEKVTTVPILVSTTGVIPKTLHDNLKTINVDQHTYRQLQKATILNTCRIVRKFGVKEA

SEQ ID NO: 1661 - protein, 847 aa, Tinea semifulvella
MDTLKQKLNVLASRLNRYLKCTDRKRQNTQFINNESVFYRTLANKHCHRTDMHEATSPTPHELHKYWADIWENPIRHNDSADWISDIPIQSTQGMQFDNITLDIFVKVLLRAHNWKAPGSDNIHNYWYKKITYLHPFIYNHINKFIKSPDTMPTYLTKGVTYMIPKEANSIDPAKYRPITCLQTFYKLLTACISESIYTHLTTNDILSEEQKGCRKNSQGCKEQLTIDAIVMKKACIKKHNIYSMYVDYRKAFDSIPHSWLLHILKLYKIHPIIVLFFENIMTTWQTTLKTKEISTDPIKIQRGIFQGDALSPLWFCMAINPLSTLLNNSIAGIKLKGNNNHQILTHLMYMDDIKLYSNSKQNLFKLADITQQFSQDIRMQFGVDKCKTHSINKGKINKTEYNLDNGEQIEPLDENSSYKYLGFHQAKEIYHKDTKKELTDKFRYRLNLILKSHLTSRNIIKAINSFAIPILTYSFGIIKWSKTDLEKIQRIINTNLTKHRKHHPKSCIQRLTLPRSEGGRGLIDVQNLQNKQITTLRKFFHSKSEHSQLHKIITEIDLKYTPLNLQTYETQPNETIISIQDKINKWSEKSLHGRHRADLNQPHVDKEASNAWLKSGDLFPETEAFMIAIQDQVVLTRNYLKYIIKQPNLPTDLCRLCNSASETIQHITGACKSLVQSDYKHRHDQVAAIVHQILASKYKLVNQIVPYYKYKPSTVLQNDNIRLYWDRTIITDKTVHYNRPDITLINKENKTAYLIDIAVPNTHNLITTHTEKNTKYRDLAIELKSQLKLEKVTTVPILVSTTGVIPKTLHDNLKTINVDQHTYRQLQKATILNTCRIVRKFGVKEA

SEQ ID NO: 1662 - protein, 1362 aa, Tinea semifulvella
METRSMKKKRIMLLPEGDHRGTSGAGAGCLSMRTTGGEELSRRALVDSNNITAEIITHSVPSSPLSSVSLFQSPNSSHHSYGTLEYSSSTSTSSLPSSLHSIDVVGMATAINSPPTIDKPLAKKKWSLKMNEFIWHNYLIITNLEHDTKSYLGQLHTQFTQHFPAMNVTKQRIGDQRRAIIRNKLLSQNQLDNIRRQVQLELQSQSQAPDQAAQPIFTSQATRRMKWSNHINETIIRCYFEVTDQETHLTAYRNKMFTRFVEYYPYLAHLSEQRIADQRRYLMSNNIIAKDRIDEIRKEVETQQRNTHPNIIQDPIPHTPYIIDTNAETTPPCDTIHLGDTTNGVSTEATNNITSLSSYINLANIKTQFEDAFNKFRHTDPTNRPYIPKQKSSKKLSHILDLLNTKILPQYITLNSDFSTLQTATYTAAYTTAICNGAKIFNQSDTVKRGTNFFKPQWQRRLERRIKDLRADIGRLTQFTKGIRSTKVLKAVQSIKTKYRTHAQYENPNTETEHFMDTLKQKLNVLASRLNRYLKCTDRKRQNTQFINNESVFYRTLANKHCHRTDMHEATSPTPHELHKYWSDIWENPIRHNDSADWISDIPIQSTQGMQFDNITLDIFVKVLLRAHNWKAPGSDNIHNYWYKKITYLHPFIYNHINKFIKSPDTMPTYLTKGVTYMIPKEANSIDPAKYRPITCLQTFYKLLTACISESIYTHLTTNDILSEEQKGCRKNSQGCKEQLTIDAIVMKKACIKKHNIYSMYVDYRKAFDSIPHSWLLHIFKLYKIHPIIVLFFENIMTTWQTTLKTKEISTDPIKIQRGIFQGDALSPLWFCMAINPLSTLLNNSIAGIKLKGNNNHQILTHLMYMDDIKLYSNSKQNLFKLADITQQFSQDIRMQFGVDKCKTHSINKGKINKTEYNLDNGEQIEPLDENSSYKYLGFHQAKEIYHKDTKKELTDKFRYRLNLILKSHLTSRNIIKAINSFAIPILTYSFGIIKWSKTDLEKIQRIINTNLTKHRKHHPKSCIQRLTLPRSEGGRGLIDVQNLHNKQITTLRKFFHSKSEHSQLHKIITEIDLKYTPLNLQTYETQPNETIISIQDKINKWSEKSLHGRHRADLNQPHVDKEASNAWLKSGDLFPETEAFMIAIQDQVVLTRNYLKYIIKQPNLPTDLCRLCNSASETIQHITGACKSLVQSDYKHRHDQVAAIVHQILASKYKLVNQIVPYYKYKPSTVLQNDNIRLYWDRTIITDKTVHYNRPDITLINKENKTAYLIDIAVPNTHNLITTHTEKNTKYRDLAIELKSQLKLEKVTTVPILVSTTGVIPKTLHDSLKTINVDQHTYRQLQKATILNTCRIVRKFGVKEA

SEQ ID NO: 1663 - protein, 901 aa, Galerucella tenella
MVQKYVAEMRSVDQGPGPSNAAPVAVNENLREAEDTLAAIVNVFDTLDKPKEKPAFQEDRLIKICNNMAKNRPETTSEQVALFLKDVFRNKTVDIANRSGNRERAQSPKSNRQARRSEYARVQDLWKKNRCRCIKMILNDVPNVSSLPKDLMVPYWEQVMTQKKLEFPVIDGAQEEVAGLWGPIMVNEIRNALPERSKAAGPDGVSPRLLRAVPVGVLCRIFNIFLWCGRLPESLYESRTVLIPKKQNAQDPSDFRPITISSVITRTFHKILASRLHRAIKVDKRQRGFQNIDGCSENTFLLDLITRYHGEKKKPLFMASLDVAKAFDSVSFGAIDAALTAKEVPRTMRCYLQQVYKSSYTRLSSGSWISEKIKPTCGVKQGDPTSPFIFNTIIDESVKRIPNEIVVYIDDININIIAFADDMFLVANTELGLQKLITITSDFLSSCGLAINTGKSMTVALETIAEQKKIVVDASCIFTCAGRPLPALRRTDQFKYLGIPFAPEGIIIGEPRKEITSYLEKITRAPLKPQQRMAALRITVIPKILYQLGLSNIHIGVLKEVDKVIRNFVRKWLALPHESPNAYIHAEVEDGGLGIPSLRWLAPRTKLDRLTALSINEQPVLGNARVYLAQEKDRARRRLTDNGRLLLTAEYSRRRWAELHYEKIDGQALKDSAKTPKHHEWIKDGTKFLSGRDYMNAVKLRINALPTRSRVSRGRYKERVCRAGCGVVETLNHVLQRCHRTHDARVRRHNADANYIAKKMINQEYAVEWEPIFRTADGNRKPDLVATRGKTAIVIDVQVMSENTDLDREHRRKVWKYRMHDSITNDIKLKTKCETVRYTAATLSCRGVWSPEAAKELRELGIISNQDIKIITTRVVIGGIAAFRIFNSRMAVRRMGRAGIG

SEQ ID NO: 1664 - protein, 1188 aa, Cerceris rybyensis
MDSEGGEQPWKVVAGRRARRTPPPQSPPEMSARSVVSPPIRVSPPPPPVTDVNSPLLPPPGSRGGKHIRKGIDSAPFFRALNERRGSDSRTDEGSPEAAGVTTATPTRRCPATRVPAERRVHAPVSTGVNRSYAAGPQAPSSSPRSGRPDSGRVTTSQRGRSERPGGNPAGSNPSRAGASKRRATREELQQRDLLLEIANSVSCIEDLECMATEVAIYFQGCGENRGSTARSEAGTSRSGRSTAGDAGAAGARRGGSGRDTGRAGRPSRPTPSQGEGRRNPVREAARLQRLYRLNRSRAIREVFGGSSPFCQVQREKIQRYFEEVYGGGNDLSGSPPARNTGAPAVGAEGLARPFTEKEVERRLGRMSNSAPGPDGVSYADLRMADPGSRLLTAVFNACYRLESVPASWKTSNTVLVFKKGEKDDLSNWRPLALGNTASKLFAALLADRLTDWAVTNGRLSWSQKGFLRCEGCYEHNFVLGEILADARRPRKQAVVAWLDLSNAFGSIPHSTISSALEAAGVHPRLHATWKAMYTGCSTRVRAAEGYTSPIPIRSGVKQGCPLSPIVFNLAIESVVRKAIGTRAGYTLHGQRFNILAYADDLALVAETPEGMRDLLRAVEDEARRIGLRFNPAKCATLHIIGGNGGRVLPSEFVLQDVPIRALGAGEPYEHLGIPTGFRVQQTPIATLEQLIECLRAVDASKLTPWQKLESVAVFILPRLDFLLRGSKLLRGPLKEVDKYIKRLAKSWMNLPQRASAEVVFLPPSRGGAGLLPLADLADALTIAHAFRLLTSPDAPVRELAWSSLREATFRKTGLSPSNVDLAAYLSGSREGRLQRDATSPGIWANARNAARRQGERLLIRWKWTSEREELSLRLRGSNGRPVILTPRSRSQVVHRVREAVAEFYLHTLLLKKDQGKVYEVSARSKVSNHFLRTGSFTRFADWRFIHRARLDVVPLNGNRRWGEGDKRCRRCGGGLETLPHVLCHCGPHSAAIQLRHNAVLDRLKNASRLPGVLRVNQRIEGVDGELASLRPDLVVRHEASRTIVMVDVAIPFENRAEAFKEARECKLAKYAPLAERLARDGYRVYVDAFLVGALGSWCPKNEAVLRLLRVSERYAAMMRRLMISDTIRWSRDIYVEHVSGVRQYGDPSAESAVGQPAALEGPSQNCISASVDAEEATGTRPGCERAS

SEQ ID NO: 1665 - protein, 1755 aa, Cerceris rybyensis
MDKFLVAYPCVDGYSCEKCSELCADPRMLRSGGVYAGRGELVKHLKKAHGISAVAYKCGKCDFIGQGVYTLKSVKSHYAKVHGPVPVTPPRACSRINAADIGSLAPGASASSETGGRVGDLAISAGISSVSETVVTPLSAGGSPTILTVAAAQTTSTVSVTAATAITSNAERISPAFRRETISNLIARQPATTYAAVTIAPPSAAALAVQATRAAIQRASKPRLPKEAGPRSAGISVTRRPSGDGRPPARTSISKLSPPKSTASTTTAPSTSRPAQGNAPPRAAAAGRAKGPSTTTPPSSRRSSPRHVGGVRNAGFTPPRAVRPRLPGERTRRAGTAPPADRRAPRAAGGRKSNEGRVIPATTCAPRGPGGRKGTEGGERISPPVSRSRRAASVPVVVQLPPRTKIVTRPVVTGPVKGALRVKSLGTSPPRPAAAIERNLTGPSSPPTSGGEILPKVPVEALTGVHFSPMRLPATTGLPFSRSPVGVAVNNTRPCTSAASVALTTATITTSCCGAPLVSASVSVPARPIQGDRPAERALPVVREVVILRPASKKTTPADHQPSLAEEKETMDSEGGEQPWKVVAGRRARRTPPPQSPPEMSARSVLSPPIRVSPPPPPVTEVNFPLLPPPGSRVGRLKEKNGDSAPFFRALNERRGSDSRTDEGSPEAAGITSATPTRRCPTTRVPAERRVHAPVSTGVSRSYAAGPQAPSSSPRSGRPDSGRVTTSQRGRSERPGGNPAGSNPSRAGASKRRATREELQQRDLLLEIANSVSCTEELECMATEVAIYFQGCGENRGSTARSEAGTSRSGRSTAGDAGAAGARRGGSGRDTGRAGRPSRPTPSQGEGRRNPVREAARLQRLYRLNRSRAIREVFGGSSPFCQVQREKIQRYFEEVYGGGNDLSGSPPARNTGAPAVGAEGLAQLFTEKEVERRLGRMSNSAPGPDGVSYADLRMADPGSRLLTAVFNACYRLESVPASWKTSNTVLVFKKGDKDDLSNWRPLALGNTASKLFAALLADRLTGWAVANGRLSWSQKGFLRCEGCYEHNFVLGEILADARRPRKQAVVAWLDLSNAFGSIPHSTISSALEAAGVHPRLHATWKAMYTGCSTRVRAAEGYTSPIPIRSGVKQGCPLSPIVFNLAIESVVRKAIGTKAGYTLHGQRFNILAYADDLALVAETPEGMRDLLRAVEDEARRIGLRFNPAKCATLHIIGGNGGRVLPSEFVLQDVPIRALGAGEPYEHLGIPTGFRVQQTPIATLEQLIECLRAVDASKLTPWQKLESVAVFILPRLDFLLRGSKLLRGPLKEVDKYIKRLAKSWMNLPQRASAEVVFLPPSRGGAGLLPLADLADALTIAHAFRLLTSPDAPVRELAWSSLREATFRKTGLSPSNVDLAAYLSGSREGRLQRDATSPGIWANARNAARRQSERLLIRWQWTSEREELSLRLRGSNGRPVILTPRSRSQVVHRVREAVAEYYLHTLLLKKDQGKVYEVSARSKVSNHFLRTGSFTRFADWRFIHRARLDVVPLNGNRRWGEGDKRCRRCGGGLETLPHVLCHCGPHSAAIQLRHNAVLDRLKNASRLPGVLRVNQRIEGVDGELASLRPDLVVRHEASRTIVMVDVAIPFENRAEAFKEARELKLAKYAPLAERLARDGYRVYVDAFLVGALGSWCPKNEAVLRLLRVSERYAAMMRRLMISDTIRWSRDIYVEHVSGVRQYGDPSAESAVGQPDAREGPTQNCIEASVDAEEAMGTRPGYE

SEQ ID NO: 1666 - protein, 1755 aa, Cerceris rybyensis
MDKFLVAYPCVDGYSCAKCSELCADPRMLRSGGVYAGRGELVKHLKKAHGISAVAYKCGKCDFIGQGVYTLKSVKSHYAKVHGPVPVTPPRANSRINAADIGQLAPGPSASSEAGGRVGDLAVSAGIFPLSETVVTPLSAGGSPTILTVAAAQTTLTVSVTAATAITSNAERISPAFRRETNSNLIARQPATTYAAVTIAPPSAAALAVQATRAAIQRASKPRLPKEAGPRSAGISVTRRPSGEGRPPARVLNAKISPPKKTTSTTTAPTTSRPAQRNAPPKAAAAGRAQGSSTTTPPSSRRSSPRHVGGARNAGSTPPRAVRPRLSGERTRRAGTAPPADRRAPRAAGGRKSNEGRFIPATTCAPRGPGGRKGSIGGERISPPALRSRRAASVPVVGKLPPRTSTVTRPVVTGPAKGALQVKPLGKSPPRPAATVERKNAGPSSPPTSGGEKLPKVPVEAQTGVRISPMRLPATTGLPFSRSPVGVAVNNTRPCTSAASVALTTATITTSCCGAPIVSAIVSAPARPIQGDRPAERALPVVREVVILRPASKKRTPADHQPSLAEEREKTDSEGEEQPWRVVAGRRARRTPPPLSPPELSARSVVSPPTRVSPPPPPVTEVNFPLLPPPGSRVGKYKCTNFDSAPSFRALNERRGSDSRTDEGSPEAAGITSATPTRRCPTTRVPAERRVHAPVSTGVNRSYAAGPQAPSSSPRSGRPDSGRVTTSQRGRSERPGGNPAGSNPSRAGASKRRATREELQQRDLLLEIANSVSCIEDLECMATEVAIYFQGCGENRGSTARSEAGTSRSGRSTAGDAGAAGARRGGSGRDTGRAGRPSRPTPSQGEGRRNPVREAARLQRLYRLNRSRAIREVFGGSSPFCQVQREKIQRYFEEVYGGGNVLSGSPPARNTGAPVVGAEGLAQQFTEKEVERRLGRMSNSAPGPDGVSYADLRMADPGSRLLTAVFNACYRLESVPASWKTSNTVLVFKKGDKDDLSNWRPLALGNTASKLFAALLADRLTGWAVANGRLSWSQKGFLRCEGCYEHNFVLGEILADARRPRKQAVVAWLDLSNAFGSIPHSTISSALEAAGVHPRLHATWKAMYTGCSTRVRAAEGYTSPIPIRSGVRQGCPLSPIVFNLAIESVVRKAIGTRAGYTLHGQRFNILAYADDLALVAETPEGMRDLLRAVEDEARRIGLRFNPAKCASLHVIGGNGGRVLPSEFVLQDVPIRALGAGEPYEHLGIPTGFRVQQTPIATLEQLIECLRAVDASKLTPWQKLESVAVFILPRLDFLLRGSKILRGPLKEVDKYIKRLAKSWMNLPQRASAEAVFLPPSRGGAGLLPLADLADALTIAHAFRLLTSPDAPVRELAWSSLGEATFRKTGLSPSNVDLAAYLSGSREGRLQRDATSPGIWANARNAARRQGERLLIRWQWTSEREELSLRLRGSNGRPVILTPRSRSQVVHRVREAVAEFYLHTLLLKKDQGKVYEVSARSKVSNHFLRTGSFTRFADWRFIHRARLDVVPLNGNRRWGEGDKRCRRCGGGLETLPHVLCHCGPHSAAIQLRHNAVLDRLKNASRLPGVLRVNQRIEGVDGELASLRPDLVVRHEASRTIVMVDVAIPFENRAEAFKEARERKLAKYAPLAERLARDGYRVYVDAFLVGALGSWCPRNEAVLRLLRVSERYAAMMRRLMISDTIRWSRDIYVEHVSGVRQYGGPSEESAVGQPDAREGSMQTCNAASDVAELARGTRPGNE

SEQ ID NO: 1667 - protein, 1755 aa, Cerceris rybyensis
MDKFLVAYPCVEGYSCAKCSELCADPRVLRSGGVYAGRGELVKHLKKAHGISAVAYRCGKCDFIGQGVYTLKSVKSHYAKVHGPVPVTPPRACSRINAADIGSLAPGASASSETGGRVGDFAISAGILPISETVVTPLSAGGSPTILTVAAALTTSTVSVTAATAITNVAERISPAFRREEISNLTARQPATTYAAVTIAPPSAAALAVQATRAAIQRASKPRLPKEAGPRSAGISVTRRPSGEGRPPARKSNVKISPPKTTASTTTAPTTSRPAQGNAPPRAAAAGRAKGPSTTTPPSSRRSSPRHVGGARNAGSTPPRAVRPRLSGERTRRAGTAPPADRRAPRAAGGRKSIEERATPATTCAPRGPGGRKGTEGGERISPPVSRSRRAASVPVVVQLPHRTKIVTRPVVTGPVKGALRVKSLGTSPPRPAATIERKNSGPSSPLTRGGEILPKLPVEAQTGVHSSPMRLPATTGLPFSRSPVGVAVNNTRPCTSAASVALTTATITTSCCGAPLVSASVSVPARPIQGDRPAERALPVVREVVILRPASKKITPTDQQSSLALEKEKLDSEGEEQPWRVVAGRRARRTPPPLSPPELSARSVISPPTRVSPPPPPVTEVNFPLLPPPGSRMGKLIRKNFDSANVFRALNERRGSDSRTDEGSPEAAGVTSATPTRRCPTTRVPAERRVHAPVSTGVSRSYAAGPQAPSSSPRSGRPDSGRVTTSQRGRSERPGGNPAGSNPSRAGASKRRATREELQQRDLLLEIANSVSCIEDLECMATEVAIYFQGCGENRGSTARSEAGTSRSGRTAVGDAGAAGARRGGSGRDTGRAGRPSRPTPSQGEGRRNPVREAARLQRLYRLNRSRAIREVFGGSSPFCQVQREKIQRYFEEVYGGGNVLSGSPPARNTGAPVVGAEGLAQLFTEKEVERRLGRMSNSAPGPDGVSYADLRMADPGSRLLTAVFNACYRLESVPASWKTSNTVLVFKKGEKDDLSNWRPLALGNTASKLFAALLADRLTDWAVTNGRLSWSQKGFLRCEGCYEHNFVLGEILADARRPRKQAVVAWLDLSNAFGSIPHSTISNALEAAGVHPRLHATWKAMYTGCSTRVRAAEGYTSPIPIRSGVKQGCPLSPIVFNLAIESVVRKAIGTRAGYTLHGQRFNILAYADDLALVAETPEGMRDLLRAVEDEARRIGLRFNPAKCASLHVIGGNGGRVLPSEFVLQDVPIRALGAGEPYEHLGIPTGFRVQQTPIATLEQLIECLRAVDASKLTPWQKLESVAVFILPRLDFLLRGSKLLRGPLKEVDKYIKRLAKSWMNLPQRASAEVVFLPPSRGGAGLLPLADLADALTIAHAFRLLTSRDAPVRELAWSSLREATFRKTGLSPSNVDLAAYLSGSREGRLQRDATSPGIWANARNAARRQGERLLIRWQWTSEREELSLRLRGSNGRPVILTPRSRSQVVHRVREAVAEFYLHTLLLKKDQGKVYEVSARSKVSNHFLRTGSFTRFADWRFIHRARLDVVPLNGNRRWGEGDKRCRRCGGGLETLPHVLCHCGPHSAAIQLRHNAVLDRLKNASRLPGVLRVNQRIEGVDGELASLRPDLVVRHEASRTIVMVDVAIPFENRAEAFKEARERKLAKYAPLAERLARDGYRVYVDAFLVGALGSWCPKNEAVLRLLRVSERYAAMMRRLMISDTIRWSRDIYVEHVSGVRQYGDPSVESAVGQPAAREGPSQNSIEASGDAEEATGTRPGCE

SEQ ID NO: 1668 - protein, 1061 aa, Cerceris rybyensis
MSTGVSRSYAAGPQASSVPPRSGRPDSGRVTTSQRGRSERPGGNPAGSNPSRAGASKRRATREELQQWDLLLEIANSVSCIEDLECMATEVAVYFQGCGENRGSTARSDAGTNRSGRSAARNAGAAGARRGGSGRDTGRAGRPSRPTPSQGEGRRNPVREAARLQRLYRLNRSRAIREVFGESLPFCQVRKEEIQRYFEEVYGGGNDLPGLTPARNTVTSEVGAEGLAQPFTGKEVQRRLGRMSNSAPGPDGVSYADLRMADPGSRLLTAVFKACYRLESVPTPWKTSNTVLVFKKGNKDDLSNWRPLALGNTASKLYAALLADRLTDWAVANGRLSWSQKGFLRCEGCYEHNFVLGEILADARRPRKQAVVAWLDLSNAFGSIPHSTISNALEAAGVHPRLHATWKAMYTGCSTRVRAAEGYTSPIPIRSGVKQGCPLSPIVFILAIESVVRKAIGTRAGYTLHGQRFNILAYADDLALVAESPEGMPDLLRAVEDEARRIGLRFNPAKCASLHVIGGNGGRVLPSEFVLQDVPIRALGAGEPYEHLGIPTGFRVQQTPIATLEQLIECLRAVDASKLTPWRKLESVAVFILPRLDFLLRGAKLLRGPLKEVDKFIKRLAKSWMNLPQRASAEVVFLPPSRGGAGLLPLADLAGALTIAHAFTMLTSPEAPVRELAWASLRKATLRKTGLSPSNVDLTAYLSGSREGRLQRDATSPGIWANARNAARRLEEKLQIRWQWTSEREELSLRLRGSNGRPVILTPRSRSQVVHRVREAVAEYYLHTLLLKKEQGKVYEVSARSKVSNHFFRTGSFTRFADWRFIHRARLDVVPLNGNRRWGEGDKRCRRCGGGLETLPHVLCHCGPHSAAIQLRHNAVLDRLKNASRLPGVLRVNQQIEGVDGESASLRPDLVVRHEASRTIVMVDVAIPFENRAEAFKEARERKLAKYAPLAERLARDGYRVYVDAFLVGALGSWCPKNEAVLRLLRVSERYAAMMRRLMISDTICWSRDIYVEHVSGVRQYGGPSLETAVGQPAALEGPSQNCIGASVDAEEATGTRPGYE

SEQ ID NO: 1669 - protein, 975 aa, Cerceris rybyensis
MATEVAMYFQGCGENRGSTARSEAGTSRSGRTAVGDAGGAEARRGGSGRDTGRAGRPSHPTPSQGEGRRNPVREAARLQRLYRLNRSRAIREVFGGSSPFCQVQREEIQRYFEEVYGGGNDLSGLTPAWNTGAPAVGAEGLAQPFTEKEVERRLGRMSNSAPGPDGVSYADLRMADPGSRLLTAVFNACYRLESVPTPWKTSNTVLVFKKGDMDDLSNWRPLALGNTASKLFAALLADRLTDWAVTNGRLSWSQKGFLRCEGCYEHNFVLGEILADARRPRKQAVVAWVDLSNAFGSIPHSTISNALEAAGVHPRLHATWKAMYTGCSTRARAAEGYTSPIPIRSGVKQGCPLSPIVFNLAIESVVRKAIGTRAGYTLHGQRFNILAYADDLALVAETPEGMRDLLRAVEDEARRIGLRFNPAKCASLHVIGGNGGRVLPSEFVLQDVPIRALGAGEPYEHLGILTGFRVQQTPIATLEQLIECLRAVDASKLTPWQRLESVAVFILPQLDFLLRGSKILRGPLKEVDKYIKRLAKSWMNLPQRASAEVVFLPPSRGGAGLLPLADLADALTIAHAIRLLTSPDAPVRELAWSSLREATLRKTGLFPSNVDLAAYLSGSREGRLQRDATSPGIWANARNAARRQGERLLIRWQWTSEREELSLRLRGSNGRPVILTPQSRSQVVHRVREAVAEFYLHTLLLKKDQGKVYEVSVRSKVSNHFLRTGSFTRFADWRFIHRARLDVVPLNGNRRWGEGDKRCRRCGGGLETLPHVLCHCGPHSAAIQLRHNAVLDRLKNASRLPGVLRVNQRIEGVDGELASLRSDLVVRHEASRTIVMVDVAIPFENRAEAFKEARERKLAKYAPLAERLARDGYRVYVDAFLVGALGSWCPKNEAVLRLLRVSELYAAMMRRLMISDTIRWSRDIYVEHVSGVRQYRDPSSESTVGQPAALEGPSQNCIGASVDAEEATGTRPGYE

SEQ ID NO: 1670 - protein, 1755 aa, Cerceris rybyensis
MDKFLVAYPCVDGYPCAKCSETCADPRVLRSGGVYAGRGELVKHLKKVHGISAVAYKCGKCDFIGQGVYTLKSVKSHHAKVHGPVPVTPPRANSRINAADIGSLAPGASASSEAGGRVGDFAISAGISSVSETVVTPLSAGGSPTILTVAAAQITSTVSVTAATATTSYAERISPAFRREEILNTTARQPATTYAAVTIAPPSAAALAVQATRDAIKRATKPRLPKEAGPRSAGISVTRRPSGEGRPPARNSNVKISPPKKTASTSTAPTTSRPAQRNAPPKAAAAGRAQGSSTTTPPSSRRSSPRHVGGARNAGSTPPRAVRPRLSGERTRRAGTAPPADRRAPRAAGGRKSIEERATPATTCAPRGPGGRKGTEGGERISPPVSRSRRAASVPVVVQLPHRTKIVTRPVVTGPVKGALRVKSLGTSPPRPAATIERKNSGPSSPLTRGGEILPKLPVEAQTGVHSSPMRLPATTGLPFSRSPVGVAVNNTRPCTSAASVALTTATITTSCCGAPLVSASVSVPARPIQGDRPAERALPVVREVVILRPASKKITPTDQQSSLALEKEKLDSEGEEQPWKVVAGRRARRTPPPLSPPELSARSVISPPTRVSPPPPPVTEVNFPLLPPPGSRMGKLIRKNFDSANVFRALNERRGSDSRTDEGSPEAAGVTSATPTRRCPTTRVPAERRVHAPVSTGVSRSYAAGPQAPSSSPRSGRPDSGRVTTSQRGRSERPGGNPAGSNPSRAGASKRRATREELQQRDLLLEIANSVSCIEDLECMATEVAIYFQGCGENRGSTARSEAGTSRSGRTAVGDAGAAGARRGGSGRDTGRAGRPSRPTPSQGEGRRNPVREAARLQRLYRLNRSRAIREVFGGSSPFCQVQREKIQRYFEEVYGGGNVLSGSPPARNTGAPVVGAEGLAQLFTEKEVERRLGRMSNSAPGPDGVSYADLRMADPGSRLLTAVFNACYRLESVPASWKTSNTVLVFKKGEKDDLSNWRPLALGNTASKLFAALLADRLTDWAVTNGRLSWSQKGFLRCEGCYEHNFVLGEILADARRPRKQAVVAWLDLSNAFGSIPHSTISNALEAAGVHPRLHATWKAMYTGCSTRVRAAEGYTSPIPIRSGVKQGCPLSPIVFNLAIESVVRKAIGTRAGYTLHGQRFNILAYADDLALVAETPEGMRDLLRAVEDEARRIGLRFNPAKCASLHVIGGNGGRVLPSEFVLQDVPIRALGAGEPYEHLGIPTGFRVQQTPIATLEQLIECLRAVDASKLTPWQKLESVAVFILPRLDFLLRGSKLLRGPLKEVDKYIKRLAKSWMNLPQRASAEVVFLPPSRGGAGLLPLADLADALTIAHAFRLLTSPDAPVRELAWSSLREATFRKTGLSPSNVDLAAYLSGSREGRLQRDATSPGIWANARNAARRQGERLLIRWQWTSEREELSLRLRGSNGRPVILTPRSRSQVVHRVREAVAEFYLHTLLLKKDQGKVYEVSARSKVSNHFLRTGSFTRFADWRFIHRARLDVVPLNGNRRWGEGDKRCRRCGGGLETLPHVLCHCGPHSAAIQLRHNAVLDRLKNASRLPGVLRVNQRIEGVDGELASLRPDLVVRHEASRTIVMVDVAIPFENRAEAFKEARERKLAKYAPLAERLARDGYRVYVDAFLVGALGSWCPKNEAVLRLLRVSERYAAMMRRLMISDTIRWSRDIYVEHVSGVRQYGDPSVESAVDQPAAREGPSQNSIEASGDAEEATGTRPGCE

SEQ ID NO: 1671 - protein, 1754 aa, Cerceris rybyensis
MDKFLVAYPCVDGYSCEKCSELCADPRMLRSGGVYAGRGELVKHLKKAHGISAVAYKCGKCDFIGQGVYTLKSVKSHYAKVHGPVPVTPPRACSRINAADIGQLAPGASASSETGGRVGDFAISAGISSVSETVVTPLSAGGSPTILTVAAAQTTSTVSVTAATAIINVAERISPAFRREEILNSTARQPATTYAAVTIAPPSAAALAVQATRAAIQRASKPRLPKEAGPRSAGISATRRPSGEGRPPARISTSKLSPPKKTASTSTAPTTSRPAQRNAPTKAAAAGRAQGSSTTTPPSSRRSSPRHVGGARNAGSTPPRAVRPRLSGERTRRAGTAPPADRRAPRAAGGRKSIEERATPATTCAPRGPGGRKGSIGGERISPPGLRSRRAASVPVVVKLPSRTSTVTRPVVTGPAKGALQVKPLGKSPPRPAATVERKNAGPSSPPTSGGEKLPKLPVEAQTGVHFPSMRLPATTGLPFSRSPVGVAVNNTRPCTSAASVALTTATITTSCCGAPIVSAIVSAPARPIQGDRPAERALPVVRGVVILRPASKKRTPADHQPSLAEEIEMDSEGGEQPWRVVAGRRARRTPPPQSPPEMSARSVFSLPIRVSPPPPPVTEVNFPLLPPPGSRVGKQNKKNIDSAYSFRALNERRGSDSRTDEGSPEAAGITSATPTRRCPTTRVPTERRVHAPVSTGVNRSYAAGPQAPSSSPRSGRPDSGRVTTSQRGRSERPGGNPAGSNPSRAGASKRRATREELQQRDLLLEIANSVSCTEELECMATEVAIYFQGCGENRGSTARSEAGTSRPGRTAVGGAGAAGARRGGSGRDIGRAGRPSRPTPSQGEGRRNPVREAARLQRLYRLNRSRAIREVFGGSSPFCQVQREKIQRYFEEVYGGGNDLSGSPPARNTGAPVVGAEGLAQQFTEKEVERRLGRMSNSAPGPDGVSYADLRMADPGSWLLTAVFNACYRLESVPASWKTSNTVLVFKKGEKDDLSNWRPLALGNTASKLFAALLADRLTGWAVTNGRLSWSQKGFLRCEGCYEHNFVLGEILADARRPRKQAVVAWLDLSNAFGSIPHSTISNALEAAGVHPRLHATWKAMYTGCSTRVRAAEGYTSPIPIRSGVKQGCPLSPIVFNLAIESVVRKAIGTRAGYTLHGQRFNILAYADDLALVAETPEGMRDLLRAVEDEARRIGLRFNPAKCASLHVIGGNGGRVLPSEFVLQDVPIRALGAGEPYEHLGIPTGFRVQQTPIATLEQLIECLRAVDASKLTPWQKLESVAVFILPRLDFLLRGSKILRGPLKEVDKYIKRLAKSWMNLPQRASAEAVFLPPSRGGAGLLPLADLADALTIAHAFRLLTSPDAPVRELAWSSLREATFRKTGLSPSNVDLAAYLSGSREGRLQRDATSPGIWANARNAARRQGERLLIRWQWTSEREELSLRLRGSNGRPVILTPRSRSQVVHRVREAVAEYYLHTLLLKKDQGKVYEVSARSKVSNHFLRTGSFTRFADWRFIHRARLDVVPLNGNRRWGEGDKRCRRCGGGLETLPHVLCHCGPHSAAIQLRHNAVLDRLKNASRLPGVLRVNQRIEGVDGELASLRPDLVVRHEASRTIVMVDVAIPFENRAEAFKEARERKLAKYAPLAERLARDGYRVYVDAFLVGALGSWCPKNEAVLRLLRVSERYAAMMRRLMISDTIRWSRDIYVEHVSGVRQYGDPSAESAVGQPAALEGPLQNLIEAPVDAGEATGTRPVYE

SEQ ID NO: 1672 - protein, 1425 aa, Cerceris rybyensis
MRRAGTAPPADRRAPRAAGGRKSNEGRVIPATTCAPRGPGGRKGTEGGERISPPGLRSRRAASVPVVVKLPSRTSTVTRPVVTGPAKGALQVKPLGKSPPRPAATVERKNAGPSSPPTSGREKLPKVPVEVQADVHISPMRLPATTGLPFSRSPVGVAVNNTRPCTSAASVALTTATITTACCGAPIVSAIVSAPARPIQGDRPAERALPVVREVVILRPASKKRTPADHQPSVAEEREKTDSEGEEQPWKVVAWRRARRTPPPLSPPELSARSVVSPPTRVSPPPPPVTEVNFPLLPPPGSRVGKYKCTNFDSAPSFRALNERRGSDSRTDEGSPEAAGITSATPTRRCPATRVPAERRVHAPVSTGVSRSYAAGPQAPSSSPRSGRPDSGRVTTSQRGRSERPGGNPAGSNPSRAGASKRRATREELQQRDLLLEIANSVSCIEDLECMAAEVAIYFQGCGENRGSTARSEAGTNRSGRSAARDAGAAGARRGGSGRDTGRAGRPSRPTPSQGEGCRNPVREAARLQRLYRLNRSRAIREVFGGSSPFCQVQREKIQRYFEEVYGGGNDLSGSPPARNTGAPAVGAEGLAQPFTEKEVERRLGRMSNSAPGPDGVSYADLRMADPGSRLLTAVFNACYRLESVPAPWKTSNTVLVFKKGDKDDLSNWRPLALGNTASKLFAALLADRLTDWAVTNGRLSWSQKGFLRCEGCYEHNFVLGEILADARRPRKQAVVAWLDLSNAFGSIPHSTISSALEAAGVHPRLHATWKAMYTGCSTRVRAAEGYTSPIPIRSGVKQGCPLSPIVFNLAIESVVRKAIGTRAGYTLHGQRFNILAYADDLALVAETPEGMRDLLRAVEDEARRIGLRFNPAKCASLHVIGGNGGRVLPSEFVLQDVPIRALGAGEPYEHLGIPTGFRVQQTPIATLEQLIECLRAVDASKLTPWQKLESVAVFILPRLDFLLRGSKLLRGPLKEVDKYIKRLAKSWMNLPQRASAEVVFLPPSRGGAGLLPLADLADALTIAHAFRLLTSPDAPVRELAWSSLREATFRKTGLSPSNVDLAAYLSGSREGRLQRDATSPGIWANARNAARRQGERLLIRWQWTSEREELSLRLRGSNGRPVILTPRSRSQVVHRVREAVAEFYLHTLLLKKDQGKVYEVSARSKVSNHFLRTGSFTRFADWRFIHRARLDVVPLNGNRRWGEVDKRCRRCGGGLETLPHVLCHCGPHSAAIQLRHNAVLDRLKNASRLPGVLRVNQRIEGVDGELASLRPDLVVRHEASRTIVMVDVAIPFENRAEAFKEARERKLAKYAPLAERLARDGYRVYVDAFLVGAHGSWCPKNEAVLRLLRVSERYAAMMRRLMISDTIRWSRDIYVEHVSGVRQYGDPSVESAVGQPAAREGPTRNHIEASVDAEEATGTRPGSE

SEQ ID NO: 1673 - protein, 1478 aa, Cerceris rybyensis
MRHRRPRLLGERRDPPPRPPPAVAEAAPGTSGGARNAGSTPPRAVRPRLSGERTRRAGTAPPADRRAPRAAGGRKSIEERATPATTCAPRGPGGRKGSIGGERISPPGLRSRRAASVPVVVKLPSRTSTVTRPVVTGPAKGALQVKPLGKSPPRPAATVERKNAGPSSPPTSGGEKLPKLPVEAQTGVHFPSMRLPATTGLPFSRSPVGVAVNNTRPCTSAASVALTTATITTSCCGAPIVSAIVSAPARPIQGDRPAERALPVVREVVILRPASEKRTPDDHQPSLAEKKEMMDSEGGEQPWKVVAGRRARRTPPPLSPPELSARSAFSPPIRVSPPPPPVTEVNFPLLPPPGGRVGKHISVKINSALSSRALNERRGSDSRTDEGSPEAAGKTSATPTRRCPATRVPAERRVHAPVSTGVSRSYAAGPQAPSSSPRSGRPDSGRVTTSQRGRSERPGGNPAGSNPSRAGASKRRATREELQQRDLLLEIANSVSCIEDLECMATEVAIYFQGCGENRGSTARSEAGTSRSGRSTAGDADAARARRGGSGRDTGRAGRPSRPTPSQGEGRRNPVREAARLQRLYRLNRNRAIREVFGGSSPFCQVQREKIQRYFEEVYGGGNDLSGSPPARNTGAPVVGAEGLAQQFTEKEVERRLGRMSNSAPGPDGVSYADLRMADPGSRLLTAVFNACYRLESVPASWKTSNTVLVFKKGEKDDLSNWRPLALGNTASKLFAALLADRLTDWAVTNGRLSWSQKGFLRCEGCYEHNFVLGEILADARRPRKQAVVAWLDLSNAFGSIPHSTISNALEAAGVHPRLHATWKAMYTGCSTRVRAAEGYTSPIPIRSGVKQGCPLSPIVFNLAIESVVRKAIGTRAGYALHGQRFNILAYADDLALVAETPEGMRDLLRAVEDEARRIGLRFNPAKCASLHVIGGNGGRVLPSEFVLQDVPIRALGAGEPYEHLGIPTGFRVQQTPIATLEQLIECLRAVDASKLTPWQKLESVAVFILPRLDFLLRGSKLLRGPLKEVDKYIKRLAKSWMNLPQRASAEVVFLPPSRGGAGLLPLADLADALTIAHAFRLLTSPDAPVRELAWSSLREATFRKTGLSPSNVDLAAYLSGSREGRLQRDATSPGIWANARNAARRQGERLLIRWQWTSEREELSLRLRGSNGRPVILTPRSRSQVVHRVREAVAEFYLHTLLLKKDQGKVYEVSARSKVSNHFLRTGSFTRFADWRFIHRARLDVVPLNGNRRWGEGDKRCRRCGGGLETLPHVLCHCGPHSAAIQLRHNAVLDRLKNASRLPGVLRVNQRIEGVDGELASLRPDLVVRHEASRTIVMVDVAIPFENRAEAFKEARERKLAKYAPLAERLARDGYRVYVDAFLVGALGSWCPKNEAVLRLLRVSERYAAMMRRLMISDTIRWSRDIYVEHVSGVRQYGDPSAESAVGQPDAREGPMQNRIEASDDAEEATGTRPGYE

SEQ ID NO: 1674 - protein, 1755 aa, Cerceris rybyensis
MDKFLVAYPCVDGYPCAKCSETCADPRVLRSGGVYAGRGELVKHLKKVHGISAVAYKCGKCDFIGQGVYTLKSVKSHHAKVHGPVPVTPPRANSRINAADIGSLAPGASASSETGGRVGDLAISAGILPISETVVTPLSAGGSPTILTVAAAQTTLTVSVTAATATTSAAERVSPAFRREEILNSTARQPATTYAAVTIAPPSAAALAVQATRDAIKRASKPRLPKEAGPRSAGISATRRPSGEGRPPARNSNGKISPPKKTTSYTTASTTSRPAQGNAPPRAAAAGRAKGPSTTTPPSSRRSSPRHVGGVRNAGSTPPRAVRPRLSGERTRRAGTAPPADRRAPRAAGGRKSIEERATPATTCAPRGPGGRKGTEGGERNSPPVVRTRRAASVPVVVKLPPRTSTVTRPVVTGPAKGALQVKPLGKSPPRPAATVERKDAGPSSPPTSGGEKLPKVPVEAQTGVHLSSMRLPATTGLPFSRSPVGVAVNNTRPCTSAASVALTTATITTSCCGAPLVSASVSVPARPIQGDRPAERALPVVREVVILRPASKKTTPADHQPSLAEEKKVEDSEGGEQPWKVVAGRRARRTPPPLSPPELSARSVFSPPTRVSPPPPPVTEVNFPLLPPPGSRVGKHNRRNFDSAHSFRALNERRGSDSRTDEGSPEAAGISSATPTRRCPTTRVPAEGRGHAPVSTGVSRSYAAGPQAPSSSPRSGRPDSGRVTTSQRGRSERPGGNPAGSNPSRAGASKRRATREELQQRDLLLEIANSVSCIEDLECMATEVAIYFQGCGENRGSTARSEAGTSRSGRSTAGDAGAAGARRGGSGRDTGRAGRPSRPTPSQGEGRRNPVREAARLQRLYRLNRSRAIREVFGGSSPFCQVQREKIQRYFEEVYGGGNDLSGSPPARNTGAPAVGAEGLAQPFTEKEVERRLGRMSNSAPGPDGVSYADLRMADPGSRLLTAVFNACYRLESVPAPWKTSNTVLVFKKGDKDDLSNWRPLALGNTASKLFAALLADRLTGWAVANGRLSWSQKGFLRCEGCYEHNFVLGEILADARRPRKQAVVAWLDLSNAFGSIPHSTISNALEAAGVHPRLHATWKAMYTGCSTRVRAAEGYTSPIPIRSGVKQGCPLSPIVFNLAIESVVRKAIGTRAGYTLHGQRFNILAYADDLALVAETPEGMRDLLRAVEDEARRIGLRFNPAKCASLHVIGGNGGRVLPSEFVLQDVPIRALGAGEPYEHLGIPTGFRVQQTPIATLEQLIECLRAVDASKLTPWQKLGSVAVFILPRLDFLLRGSKILRGPLKEVDKYIKRLAKSWMNLPQRASAEVVFLPPSRGGAGLLPLADLADALTIAHAFRLLTSPDAPVRELAWSSLREATFRKTGLSPSNVDLAAYLSGSREGRLQRDATSPGIWANARNAARRQGERLLIRWQWTSEREELSLRLRGSNGRPVILTPRSRSQVVHRVREAVAEYYLHTLLLKKDQGKVYEVSARSKVSNHFLRTGSFTRFADWRFIHRARLDVVPLNGNRRWGEGDKRCRRCGGGLETLPHVLCHCGPHSAAIQLRHNAVLDRLKNASRLPGVLRVNQRIEGVEGELASLRPDLVVRHEASRTIVMVDVAIPFENRAEAFKEARERKLAKYAPLAERLARGGYRVYVDAFLVGALGSWCPKNEAVLRLLRVSERYAAMMRRLMISDTIRWSRDIYVEHVSGVRQYGDPSAESAVGQPAALEGPSQNCIGASVDAEEATGTRPGSE

SEQ ID NO: 1675 - protein, 1754 aa, Cerceris rybyensis
MERILISYPSADGFTCPICTTTGVDPRLLRGGVYAGRAELTKHLKRVHGADSVGYKCNECGFIGDGRYPLKSVKSHYAKAHGPVPVTPPRKSSRINASAMGQLAPGTSAERASDTASPAGGQSPLTAGETTISIAAVNIMTPLTAGGSPTIITAAAAQTTATVTVTAAASKTSAAARVAPIFLRGGSSNSNARQPATTYAAVTAAPPSVAVAAVRATRAAILRATKPRLPIEAASRSAGTSVTRRSSESSGPPAHNSTSRRPSLPKSSSTKATASTSRPSPKTATMTKAAAAGRVRRSTTISPPSSRRSIPRHSGGGNSAGPTPPGAVRSPVSGARTRRAGTAPPDGRRAPRSQGGRKSSEGEVTPPTACAPRGAGGRKGVEEKGRKSPPMTRSRRAASVPVEIIPLRTTTLSRPTATGPAKGPLRDKPLKPQRAPPAAAVERRSAGPSTPPTIGGRELPTSPVEASAGVPTPPTRLTVTGGLPFSSSPVAVTANNTRICTSAASVALTTETVTTTCCGAPLVAASVSAPTFSGQGVRPATRGVPVVREVVILRPASKKEQPHHQQPPIAEEEEDEVGEGVQSWQVVVGRRAQRTPPRISPPGSPARNISPLPVRVSPPPPPVTTANFPLLPPPGSRVKKLTNKNNNNNIMPSHRSRGERERGATPVGAPASPPTHLDAVRVPTDQSASVRGAAGVSRRVAAGPLTASDTPRSGRPESGRASNPQQERTRGARRPSGGGNPRRSGAFNRRVTREELQQRDLLIGLAEAASTAEDLEVVATEVAAYFQSCGEKRSATARSETGNGRRGGTAGSDRRYAGGNRGGAERGGGRRDETSRSDPSQGERRWNPVREAARIQRLYRQNRSRAIREVFGGSSPFCQVQGEEVFRYFKEVHGESDCLPSPPPPFGRNTVTPEVDSEGLARLFSEKEVGDRLGRASNSAPGPDGITYSDLRMADPGSRLLTAVYNLCYRLESVPSSWKTSNTVLVYKKGDKSDLSNWRPLALGNTAGKLFAALIADRLTDWAVGSGRISWAQKGFLRCEGCYEHNFVLGEVLADARKTRKQAVVAWLDLSNAFGSIPHATIRNALVSAGVHPRILNTWNSMYNGCTTRIRAAEGYTNPIPIRSGVRQGCPLSPITFNLAIESVIRKAIGSGAGYSLHGQRFTILAYADDLALIADTPEGMRDLLRAVEGEARRIGLCFNPAKCATLHDIGGRGGGVIPSVFTLQDIPMRALAEGVSYDHLGIPTGFRVDQTPIASIEELIECLRAVDDSKLAPWQKLEAVAVFVLPRLDFLLRGAKILRGPLKEVDKYVRRLAKSWMNLPQRASAEIVFLPPRRGGGGLLPLADLADALTIAHAFRLLRAPDAPVRDLAWSSLRVAATRGLATATSNADLAAFLSGDRTGRSQWAATVPGIWSSTRTAARKHANRWGFSWRWSSELNELALSLRGARGRPVIVTPRSRGQVVARMRETVAEYYQSTLLLKRDQGKVFEVSGRERVSNHFLRTGSFTRFADWRFIHRARLDVVPLNGNRRWGDGNKRCRRCGESLETLPHVICHCGPHSAAIQLRHNAILERLKAATRMPGSIRINQRIEGAGEEFAALRPDLVVRHEASRTIVIVDVAVPFENRLEAFVAARERKIAKYAPLAEKLSRDGYRVLVHAFLVGALGSWWPENESVLSLLRVSERYAAMMRRLMISDTIRWSRDIYVEHVSGVRQYREPPPARPARNDPRGQEPNENDAEASGGVGGTTGTRPGNV

SEQ ID NO: 1676 - protein, 1755 aa, Cerceris rybyensis
MDKFLVAYPCVEGYSCAKCSELCADPRVLRSGGVYAGRGELVKHLKKAHGISAVAYRCGKCDFIGQGVYTLKSVKSHYAKVHGPVPVTPPRANSRINAADIGQLAPGPSASSESGGRVGDFAFSAGISSISETVVTPLSAGGSPTILTVAAAQITSTVSVTAATATTSYAERISPAFRREEILNTTARQPATTYAAVTIAPPSAAALAVQATRDAIKRATKPRLPKEAGPRSAGISVTRRPSGEGRPPARISTSKISPPKKSSSTSTAPTTSRPAQGNAPPRAAAAGRAKGPSTTTPPSSRRSSPRHVGGVRNAGSTPPRAVRPRLSGERTRRAGTAPPADRRAPRAAGGRKSNEGRFIPATTCAPRGPGGRKGTEGGERVSPPVSRTRRAASVPVVVNLPSRTTTATRPVVTGPEKGALRVKPHGTSPPRPAATIERKSSGPSSPLTRGGEILPKLPVEAQADVRISPLRLPATTGLPFSRSPVGVAVNNTRPCTSAASVALTTATITTSCCGAPIVSAIVSAPARPIQGDRPAERALPVVREVVILRPASKKRTPADHQPSLAEEKETMDSEGGEQPWKVVAGRRARRTPPPQSPPEMSARSVLSPPIRVSPPPPPVTEVNFPLLPPPGSRVGKLKEKNGDSAPFFRALNERRGSDSRTDEGSPEAAGVTSATPTRRCPATCVPAERRVHAPVSTGVSRSYAAGPQAPSSSPRSGRPDSGRVTTSQRGRSERPGGNPAGSNPSRAGASKRRATREELQQRDLLLEIANSVSCIEDLECMATEVAIYFQGCGENRGSTARSEAGTSRSGRTAVGDAGAAGARRGGPGRDTGRAGRSSRPTPSQGEGRRNPVREAARLQRLYRLNRSRAIREVFGGSSPFCQVQREKIQRYFEEVYGGGNVLSGSPPARNTGAPAVGAEGLAQPFTEKEVERRLGRMSNSAPGPDGVSYADLRMADPGSRLLTAVFNACYRLESVPAPWKTSNTVLVFKKGDKDDLSNWRPLALGNTASKLFAALLADRLTGWAVANGRLSWSQKGFLRCEGCYEHNFVLGEILADARRPRKQAVVAWLDLSNAFGSIPHSTISNALEAAGVHPRLHATWKAMYTGCSTRVRAAEGYTSPIPIRSGVKQGCPLSPIVFNLAIESVVRKAIGTRAGYTLHGQRFNILAYADDLALVAETPEGMRDLLRAVEGEARRIGLRFNPAKCASLHVIGGNGGRVLPSEFVLQDVPIRALGAGEPYEHLGIPTGFRVQQTPIATLEQLIECLRAVDASKLTPWQKLESVAVFILPRLDFLLRGSKILRGPLKEVDKYIKRLAKSWMNLPQRASAEVVFLPPSRGGAGLLPLADLADALTIAHAFRLLTSPDAPVRELAWSSLREATFRKTGLSPSNVDLAAYLSGSREGRLQRDATSPGIWANARNAARRQGERLLIRWQWTSEREELSLRLRGSNGRPVILTPRSRSQVVHRVREAVAEFYLHTLLLKKDQGKVYEVSARSKVSNHFLRTGSFTRFADWRFIHRARLDVVPLNGNRRWGEGDKRCRRCGGGLETLPHVLCHCGPHSAAIQLRHNAVLDRLKNASRLPGVLRVNQRIEGVDGELASLRPDLVVRHEASRTIVMVDVAIPFENRAEAFKEARERKLAKYAPLAERLARDGYRVYVDAFLVGALGSWCPKNEAVLRLLRVSERYAAMMRRLMISDTIRWSRDIYVEHVSGVRQYGDPSSESTVGQPAALEGPLQNVIEALVDAEEATGARPVCE

SEQ ID NO: 1677 - protein, 1755 aa, Cerceris rybyensis
MDKFLVAYPCVDGYPCAKCSETCADPRVLRSGGVYAGRGELVKHLKKVHGISAVAYKCGKCDFIGQGVYTLKSVKSHHAKVHGPVPVTPPRANSRINAADIGSLAPGASASSETGGRVGDLAISAGILPISETVVTPLSAGGSPTILTVAAAQTTLTVSVTAATATTSAAERVSPAFRREEILNSTARQPATTYAAVTIAPPSAAALAVQATRDAIKRATKPRLPKEAGPRSAGISATRRPSGEGRPPARNSNGKISPPKKTTSYTTASTTSRPAQGNAPPRAAAAGRAKGPSTTTPPSSRRSSPRHVGGVRNAGSTPPRAVRPRLSGERTRRAGTAPPADRRAPRAAGGRKSIEERATPATTCAPRGPGGRKGTEGGERNSPPVVRTRRAASVPVVVKLPPRTSTVTRPVVTGPAKGALQVKPLGKSPPRPAATVERKDAGPSSPPTSGGEKLPKVPVEAQTGVHLSSMRLPATTGLPFSRSPVGVAVNNTRPCTSAASVALTTATITTSCCGAPLVSASVSVPARPIQGDRPAERALPVVREVVILRPASKKTTPADHQPSLAEEKRVEDSEGGEQPWKVVAGRRARRTPPPLSPPELSARSVFSPPTRVSPPPPPVTEVNFPLLPPPGSRVGKHNRRNFDSAHSFRALNERRGSDSRTDEGSPEAAGISSATPTRRCPTTRVPAEGRGHAPVSTGVSRSYAAGPQAPSSSPRSGRPDSGRVTTSQRGRSERPGGNPAGSNPSRAGASKRRATREELQQRDLLLEIANSVSCIEDLECMATEVAIYFQGCGENRGSTARSEAGTSRSGRSTAGDAGAAGARRGGSGRDTGRAGRPSRPTPSQGEGRRNPVREAARLQRLYRLNRSRAIREVFGGSSPFCQVQREKIQRYFEEVYGGGNDLSGSPPARNTGAPAVGAEGLAQPFTEKEVERRLGRMSNSAPGPDGVSYADLRMADPGSRLLTAVFNACYRLESVPAPWKTSNTVLVYKKGDKDDLSNWRPLALGNTASKLFAALLADRLTGWAVANGRLSWSQKGFLRCEGCYEHNFVLGEILADARRPRKQAVVAWLDLSNAFGSIPHSTISNALEAAGVHPRLHATWKAMYTGCSTRVRAAEGYTSPIPIRSGVKQGCPLSPIVFNLAIESVVRKAIGTRAGYTLHGQRFNILAYADDLALVAETPEGMRDLLRAVEDEARRIGLRFNPAKCASLHVIGGNGGRVLPSEFVLQDVPIRALGAGEPYEHLGIPTGFRVQQTPIATLEQLIECLRAVDASKLTPWQKLESVAVFILPRLDFLLRGSKILRGPLKEVDKYIKRLAKSWMNLPQRASAEVVFLPPSRGGAGLLPLADLADALTIAHAFRLLTSPDAPVRELAWSSLREATFRKTGLSPSNVDLAAYLSGSREGRLQRDATSPGIWANARNAARRQGERLLIRWQWTSEREELSLRLRGSNGRPVILTPRSRSQVVHRVREAVAEYYLHTLLLKKDQGKVYEVSARSKVSNHFLRTGSFTRFADWRFIHRARLDVVPLNGNRRWGEGDKRCRRCGGGLETLPHVLCHCGPHSAAIQLRHNAVLDRLKNASRLPGVLRVNQRIEGVEGELASLRPDLVVRHEASRTIVMVDVAIPFENRAEAFKEARERKLAKYAPLAERLARGGYRVYVDAFLVGALGSWCPKNEAVLRLLRVSERYAAMMRRLMISDTIRWSRDIYVEHVSGVRQYGDPSAESAVGQPAALEGPSQNCIGASVDAEEATGTRPGSE

SEQ ID NO: 1678 - protein, 1755 aa, Cerceris rybyensis
MDKFLVAYPCVDGYPCAKCSETCADPRVLRSGGVYAGRGELVKHLKKVHGISAVAYKCGKCGFIGQGVYTLKSVKSHYAKVHGPVPVTPPRACSRINAADIGSLAPGASASSETGGRVGDLAISAGISSVSETVVTPLSAGGSPTILTVAAAQTTSTVSVTAAAAIINVAERISPAFRREEISNLTARQPATTYAAVTIAPPSAAALAVQATRDAIKRATKPRLPKEAGPRSAGISVTRRPSGDGRPPARISTSKISPPKKTASTSTAPTTSRPAQRNAPTKAAAAGRAQGSSTTTPPSSRRSSPRHVGGARNAGSTPPRAVRPRLSGERTRRAGTAPPADRRAPRAAGGRKSIEERATPATTCAPRGPGGRKGSIGGERISPPGLRSRRAASVPVVVKLPSRTSTVTRPVVTGPAKGALQVKPLGKSPPRPAATVERKNAGPSSPPTSGGEKLPKLPVEAQADVRISPMRLPATTGLPFSRSPVGVAVNNTRPCTSAASVALTTATITTSCCGAPIVSAIVSAPARPIQGDRPAERALPVVREVVILRPASKKRTPADHQPSLAEEKETMDSEGGEQPWKVVAGRRARRTPPPQSPPEMSARSVLSPPIRVSPPPPPVTEVNFPLLPPPGSRVGKLKEKNGDSAPFFRALNERRGSDSRTDEGSPEAAGITSATPTRRCPTTRVPAERRVHAPVSTGVSRSYAAGPQAPSSSPRSGRPDSGRVTTSQRGRSERPGGNPAGSNPSRAGASKRRATREELQQRDLLLEIANSVSCIEDLECMATEVAIYFQGCGENRGSTARSEAGTSRSGRTAVGDAGAAGARRGGSGRDTGRAGRPSRPTPSQGEGRRNPVREAARLQRLYRLNRSRAIREVFGGSSPFCQVQREKIQRYFEEVYGGGNDLSGSPPARNTGAPAVGAEGLAQLFTEKEVERRLGRMSNSAPGPDGVSYADLRMADPGSRLLTAVFNACYRLESVPASWKTSNTVLVFKKGEKDDLSNWRPLALGNTASKLFAALLADRLTDWAVTNGRLSWSQKGFLRCEGCYEHNFVLGEILADARRPRKQAVVAWLDLSNAFGSIPHSTISNALEAAGVHPRLHATWKAMYTGCSTRVRAAEGYTSPIPIRSGVKQGCPLSPIVFNLAIESVVRKAIGTRAGYTLHGQRFNILAYADDLALVAETPEGMRDLLRAVEDEARRIGLRFNPAKCASLHVIGGNGGRVLPSEFVLQDVPIRALGAGEPYEHLGIPTGFRVQQTPIATLEQLIECLRAVDASKLTPWQKLESVAVFILPRLDFLLRGSKILRGPLKEVDKYIKRLAKSWMNLPQRASAEAVFLPPSRGGAGLLPLADLADALTIAHAFRLLTSPDAPVRELAWSSLREATFRKTGLSPSNVDLAAYLSGSREGRLQRDATSPGIWANARNAARRQSERLLIRWQWTSEREELSLRLRGSNGRPVILTPRSRSQVVHRVREAVAEYYLHTLLLKKDQGKVYEVSARSKVSNHFLRTGSFTRFADWRFIHRARLDVVPLNGNRRWGEGDKRCRRCGGGLETLPHVLCHCGPHSAAIQLRHNAVLDRLKNASRLPGVLRVNQRIEGVDGELASLRPDLVVRHEASRTIVMVDVAIPFENRAEAFKEARERKLAKYAPLAERLARDGYRVYVDAFLVGALGSWCPKNEAVLRLLRVSERYAAMMRRLMISDTIRWSRDIYVEHVSGVRQYGDPSAESAVGQPDAREGPTQNCIEASVDAEEAMGTRPGYE

SEQ ID NO: 1679 - protein, 1755 aa, Cerceris rybyensis
MDKFLVAYPCVDGYPCAKCSETCADPRVLRSGGVYAGRGELVKHLKKVHGISAVAYKCGKCDFIGQGVYTLKSVKSHHAKVHGPVPVTPPRANSRINAADIGSLAPGASASSETGGRVGDLAISAGILPISETVVTPLSAGGSPTILTVAAAQTTLTVSVTAATATTSAAERVSPAFRREEILNSTARQPATTYAAVTIAPPSAAALAVQATRDAIKRASKPRLPKEAGPRSAGISATRRPSGEGRPPARNSNGKISPPKKTTSYTTASTTSRPAQGNAPPRAAAAGRAKGPSTTTPPSSRRSSPRHVGGVRNAGSTPPRAVRPRLSGERTRRAGTAPPADRRAPRAAGGRKSIEERATPATTCAPRGPGGRKGTEGGERNSPPVVRTRRAASVPVVVKLPPRTSTVTRPVVTGPAKGALQVKPLGKSPPRPAATVERKDAGPSSPPTSGGEKLPKVPVEAQTGVHLSSMRLPATTGLPFSRSPVGVAVNNTRPCTSAASVALTTATITTSCCGAPLVSASVSVPARPIQGDRPAERALPVVREVVILRPASKKTTPADHQPSLAEEKKVEDSEGGEQPWKVVAGRRARRTPPPLSPPELSARSVFSPPTRVSPPPPPVTEVNFPLLPPPGSRVGKHNRRNFDSAHSFRALNERRGSDSRTDEGSPEAAGISSATPTRRCPTTRVPAEGRGHAPVSTGVSRSYAAGPQAPSSSPRSGRPDSGRVTTSQRGRSERPGGNPAGSNPSRAGASKRRATREELQQRDLLLEIANSVSCIEDLECMATEVAIYFQGCGENRGSTARSEAGTSRSGRSTAGDAGAAGARRGGSGRDTGRAGRPSRPTPSQGEGRRNPVREAARLQRLYRLNRSRAIREVFGGSSPFCQVQREKIQRYFEEVYGGGNDLSGSPPARNTGAPAVGAEGLAQPFTEKEVERRLGRMSNSAPGPDGVSYADLRMADPGSRLLTAVFNACYRLESVPAPWKTSNTVLVYKKGDKDDLSNWRPLALGNTASKLFAALLADRLTGWAVANGRLSWSQKGFLRCEGCYEHNFVLGEILADARRPRKQAVVAWLDLSNAFGSIPHSTISNALEAAGVHPRLHATWKAMYTGCSTRVRAAEGYTSPIPIRSGVKQGCPLSPIVFNLAIESVVRKAIGTRAGYTLHGQRFNILAYADDLALVAETPEGMRDLLRAVEDEARRIGLRFNPAKCASLHVIGGNGGRVLPSEFVLQDVPIRALGAGEPYEHLGIPTGFRVQQTPIATLEQLIECLRAVDASKLTPWQKLESVAVFILPRLDFLLRGSKILRGPLKEVDKYIKRLAKSWMNLPQRASAEVVFLPPSRGGAGLLPLADLADALTIAHAFRLLTSPDAPVRELAWSSLREATFRKTGLSPSNVDLAAYLSGSREGRLQRDATSPGIWANARNAARRQGERLLIRWQWTSEREELSLRLRGSNGRPVILTPRSRSQVVHRVREAVAEYYLHTLLLKKDQGKVYEVSARSKVSNHFLRTGSFTRFADWRFIHRARLDVVPLNGNRRWGEGDKRCRRCGGGLETLPHVLCHCGPHSAAIQLRHNAVLDRLKNASRLPGVLRVNQRIEGVEGELASLRPDLVVRHEASRTIVMVDVAIPFENRAEAFKEARERKLAKYAPLAERLARGGYRVYVDAFLVGALGSWCPKNEAVLRLLRVSERYAAMMRRLMISDTIRWSRDIYVEHVSGVRQYGDPSAESAVGQPAALEGPSQNCIGASVDAEEATGTRPGSE

SEQ ID NO: 1680 - protein, 1285 aa, Cerceris rybyensis
MRLPATTGLPFSRSPVGVAVNNTRPCTSAASVALTTATITTSCCGAPIVSAIVSAPARPIQGDRPAERALPVVREVMILRPASKKRTPADHQPSLAEEIEMDSEGGEQPWRVVAGRRARRSPPPPPPPELSARSGFSPPIRVSPPPPPVTEVDFPLLPPPGSSVGKHKIVKINSAPSFRALNERRGSDSRTDEGSPEAAGVTSATPTRRCPTTRVPAERRVHAPVSTGVSRSYAAGPQAPSSSPRSGRPDSGRVTTSQRGRSERPGGNPAGSNPSRAGASKRRATREELQQRDLLLEIANSVSCIEDLECMATEVAIYFQGCGENRGSTARSEAGINRSGRAAARDAGAAGARRGGSGRDTGRAGRPSRPTPSQGEGRRNPVREAARLQRLYRLNRSRAIREVFGGSSPFCQVQREKIQRYFEEVYGGGNVLSGSPPARNTGAPAVGAEGLAQPFTEKEVERRLGRMSNSAPGPDGVSYADLRMADPGSRLLTAVFNACYRLESVPASWKTSNTVLVFKKGEKDDLSNWRPLALGNTASKLFAALLADRLTDWAVTNGRLSWSQKGFLRCEGCYEHNFVLGEILADARRPRKQAVVAWLDLSNAFGSIPHSTISNALEAAGVHPRLHATWKAMYTGCSTRVRAGEGYTSPIPIRSGVKQGCPLSPIVFNLAIESVVRKAIGTRAGYTLHGQRFNILAYADDLALVAETPEGMRDLLRAVEGEARRIGLRFNPAKCASLHVIGGNGGRVLPSEFVLQDVPIRALGAGEPYEHLGIPTGFRVQQTPIATLEQLIECLRAVDASKLTPWQKLESVAVFILPRLDFLLRGAKILRGPLKEVDKFIKRLAKSWMNLPQRASAEVVFLPPSRGGAGLLPLADLADALTIAHAFRMLTSPDAPVRELAWASLREATLRKTGLSPSNVDLAAYLSGSREGRLQRDATSPGIWANARNAARRQEEKLQIRWQWTSEREELSLRLRGTNGRPVILTPRSRSQVVHRVREAVAEYYLHTLLLKKDQGKVYEVSARSKVSNHFLRTGSFTRFADWRFIHRARLDVVPLNGNRRWGEGDKRCRRCGGGLETLPHVLCHCGPHSAAIQLRHNAVLDRLKNASRLPGVLRVNQRIEGVDGELASLRPDLVVRHEASRTIVMVDVAIPFENRAEAFKEARERKLAKYAPLAERLARDGYRVYVDAFLVGALGSWCPKNEAVLRLLRVSERYAAMMRRLMISDTIRWSRDIYVEHVSGVRQYRGPSSESAVGQPDAREGSVQNGIEALGDAMEAMGTRPGNE

SEQ ID NO: 1681 - protein, 1755 aa, Cerceris rybyensis
MDKFLVAYPCVDGYPCAKCSETCADPRVLRSGGVYAGRGELVKHLKKVHGISAVAYKCGKCGFIGQGVYTLKSVKSHYAKVHGPVPVTPPRACSRINAADIGSLAPGASASSETGGRVGDLAISAGISSVSETVVTPLSAGGSPTILTVAAAQTTSTVSVTAAAAIINVAERISPAFRREEISNLTARQPATTYAAVTIAPPSAAALAVQATRDAIKRATKPRLPKEAGPRSAGISVTRRPSGDGRPPARISTSKISPPKKTASTSTAPTTSRPAQRNAPTKAAAAGRAQGSSTTTPPSSRRSSPRHVGGARNAGSTPPRAVRPRLSGERTRRAGTAPPADRRAPRAAGGRKSIEERATPATTCAPRGPGGRKGSIGGERISPPGLRSRRAASVPVVVKLPSRTSTVTRPVVTGPAKGALQVKPLGKSPPRPAATVERKNAGPSSPPTSGGEKLPKLPVEAQADVRISPMRLPATTGLPFSRSPVGVAVNNTRPCTSAASVALTTATITTSCCGAPIVSAIVSAPARPIQGDRPAERALPVVREVVILRPASKKRTPADHQPSLAEEKETMDSEGGEQPWKVVAGRRARRTPPPQSPPEMSARSVLSPPIRVSPPPPPVTEVNFPLLPPPGSRVGKLKEKNGDSAPFFRALNERRGSDSRTDEGSPEAAGITSATPTRRCPTTRVPAERRVHAPVSTGVSRSYAAGPQAPSSSPRSGRPDSGRVTTSQRGRSERPGGNPAGSNPSRAGASKRRATREELQQRDLLLEIANSVSCIEDLECMATEVAIYFQGCGENRGSTARSEAGTSRSGRTAVGDAGAAGARRGGSGRDTGRAGRPSRPTPSQGEGRRNPVREAARLQRLYRLNRSRAIREVFGGSSPFCQVQREKIQRYFEEVYGGGNDLSGSPPARNTGAPAVGAEGLAQLFTEKEVERRLGRMSNSAPGPDGVSYADLRMADPGSRLLTAVFNACYRLESVPASWKTSNTVLVFKKGEKDDLSNWRPLALGNTASKLFAALLADRLTDWAVTNGRLSWSQKGFLRCEGCYEHNFVLGEILADARRPRKQAVVAWLDLSNAFGSIPHSTISNALEAAGVHPRLHATWKAMYTGCSTRVRAAEGYTSPIPIRSGVKQGCPLSPIVFNLAIESVVRKAIGTRAGYTLHGQRFNILAYADDLALVAETLEGMRDLLRAVEDEARRIGLRFNPAKCASLHVIGGNGGRVLPSEFVLQDVPIRALGAGEPYEHLGIPTGFRVQQTPIATLEQLIECLRAVDASKLTPWQKLESVAVFILPRLDFLLRGSKILRGPLKEVDKYIKRLAKSWMNLPQRASAEAVFLPPSRGGAGLLPLADLADALTIAHAFRLLTSPDAPVRELAWSSLREATFRKTGLSPSNVDLAAYLSGSREGRLQRDATSPGIWANARNAARRQSERLLIRWQWTSEREELSLRLRGSNGRPVILTPRSRSQVVHRVREAVAEYYLHTLLLKKDQGKVYEVSARSKVSNHFLRTGSFTRFADWRFIHRARLDVVPLNGNRRWGEGDKRCRRCGGGLETLPHVLCHCGPHSAAIQLRHNAVLDRLKNASRLPGVLRVNQRIEGVDGELASLRPDLVVRHEASRTIVMVDVAIPFENRAEAFKEARERKLAKYAPLAERLARDGYRVYVDAFLVGALGSWCPKNEAVLRLLRVSERYAAMMRRLMISDTIRWSRDIYVEHVSGVRQYGDPSAESAVGQPDAREGPTQNCIEASVDAEEAMGTRPGYE

SEQ ID NO: 1682 - protein, 1754 aa, Cerceris rybyensis
MDKFLVAYPCVDGYSCEKCSELCADPRMLRSGGVYAGRGELVKHLKKVHGISAVAYKCGKCDFIGQGVYTLKSVKSHHAKVHGPVPVTPPRANSRINAADIGSLAPGTSASSETGGRVGDFAISAGISTVTETVVTPLSAGGSPTILTVAAAQTTSTVSVTAATAIINVAERISPAFRREEISNLTARQPATTYAAVTIAPPSAAALAVQATRDAIKRATKPRLPKEAGPRSAGISVTRRPSGEGRPPARTSTSKLSPPKRTTSTMTAPTTSRPAQRNAPPKAAAAGRAQGSSTTTPPSSRRSSPRHVGGARNAGSTPPRAVRPRLSGERTRRAGTAPPADRRAPRAAGGRKSIEERATPATTCAPRGPGGRKGTEGGERISPPVSRSRRAASVPVVVQLPPRTKIVTRPVVTGPVKGALRVKSLGTSPPRPAATIERKNSGPSSPLTRGGEKLPKLPVEAQTGVHFPSMRLPATTGLPFSRSPVGVAVNNTRPCTSAASVALTTATITTSCCGAPIVSAIVSAPARPIQGDRPAERALPVVREVVILRPASKKRTPADHQPSLAEEVEMDSEGGEQPWKVVAGRRARRTPPPQSPPELSARSVVSPPIRVSPPPPPVTEVTFPLLPPPGSRGGKHFRKNFDSAPFFRALNERRGSDSRTDEGSPEAVGITSATPTRRCPATRVPAEGRGHAPVSTGVSRSYAAGPQAPSSSPRSGRPDSGRVTTSQRGRSERPGGNPAGSNPSRAGASKRRATREELQQRDLLLEIANSVSCTEDLECMATEVAIYFQGCGENRGSTARSEAGTSRSGRTAVGGAGAAGARRGGPERDTGRAGRSSRPTPSQGEGRRNPVREAARLQRLYRLNRSRAIREVFGGSSPFCQVQREKIQRYFEEVYGGGNDLSGSPPARNTGAPVVGAEGLAQQFTEKEVERRLGRMSNSAPGPDGVSYADLRMADPGSRLLTAVFNACYRLESVPASWKTSNTVLVFKKGEKDDLSNWRPLALGNTASKLFAALLADRLTDWAVTNGRLSWSQKGFLRCEGCYEHNFVLGEILADARRPRKQAVVAWLDLSNAFGSIPHSTISNALEAAGVHPRLHATWKAMYTGCSTRVRAGEGYTSPIPIRSGVKQGCPLSPIVFNLAIESVVRKAIGTRAGYTLHGQRFNILAYADDLALVAETPEGMRDLLRAVEDEARRIGLRFNPAKCATLHIIGGNGGRVLPSEFVLQDVPIRALGAGEPYEHLGIPTGFRVQQTPIATLEQLIECLRAVDASKLTPWQKLESVAVFILPRLDFLLRGSKILRGPLKEVDKYIKRLAKSWMNLPQRASAEVVFLPPSRGGAGLLPLADLADALTIAHAFRLLTSPDAPVRELAWSSLREATFRKTGLSPSNVDLAAYLSGSREGRLQRDATSPGIWANARNAARRQGERLLIRWQWTSEREELSLRLRGSNGRPVILTPRSRSQVVHRVREAVAEFYLHTLLLKKDQGKVYEVSARSKVSNHFVRTGSFTRFADWRFIHRARLDVVPLNGNRRWGEGDKRCRRCGGGLETLPHVLCHCGPHSAAIQLRHNAVLDRLKNASRLPGVLRVNQRIEGVDGELASLRPDLVVRHEASRTIVMVDVAIPFENRAEAFKEARERKLAKYAPLAERLARDGYRVYVDAFLVGALGSWCPKNEAVLRLLRVSERYAAMMRRLMISDTIRWSRDIYVEHVSGVRQYGDPSAESAVGQPAALEGPSRNHIEASVDVGEATGTRPGNE

SEQ ID NO: 1683 - protein, 1755 aa, Cerceris rybyensis
MDKFLVAYPCVDGYSCAKCSELCADPRMLRSGGVYAGRGELVKHLKKAHGISAVAYKCGKCDFIGQGVYTLKSVKSHHAKVHGPVPVTPPRANSRINAADIGSLAPGLSASSESGGRVGDFANSAGISTVSETVVTPLSAGGSPTILTVAAAQTTSTVSVTAAAAITSYAERISPAFRRETISNLIARQPATTYAAVTIAPPSAAALAVQATRAAIQRASKPRLPKEAGPRSAGISVTRRPSGDGRPPARTSTSKLSPPKRTTSTTTAPTTSRPAQRNAPPKAAAAGRAQGSSTTTPPSSRRSSPRHVGGARNAGSTPPRAVRPRLSGERTRRAGTAPPADRRAPRAAGGRKSIEERATPATTCAPRGPGGRKGTEGGERVSPPVSRSRRAASVPVVVQLPPRTKIVTRPVVTGPEKGALQVKPPGTSPPRPAATIKRISSGPSSPPTRGGEILPKLPVEAQTGVHFPSMRLPATTGLPFSRSPVGVAVNNTRPCTSAASVALTTATITTSCCGAPIVSAIVSAPARPIQGDRPAERALPVVREVVILRPASKKRTPADHQPPLAEEKRKDDSEGEEQPWKVVAGRRARRTPPPQSPPEMSARSVISPPTRVSPPPPPVTEVNFPLLPPPGSRVGKHKIIKIDSALSFRALNERRGSDSRTDEGSPEAAGITSATPTRRCPATRVPAERRVHAPVSTGVSRSYAAGPQAPSSSPRSGRPDSGRVTTSQRGRSERPGGNPAGSNPSRAGASKRRATREELQQRDLLLEIANSVSCIEDLECMATEVAIYFQCCGENRGSTARSEAGASRSGRSTAGDAGAAGARRGGSGRDTGRAGRPSRPTPSQGEGRRNPVREAARLQRLYRLNRSRAIREVFGGSSPFCQVQREKIQRYFEEVYGGGNDLSGSPPARNTGAPVVGAEGLAQQFTEKEVERRLGRMSNSAPGPDGVSYADLRMADPGSRLLTAVFNACYRLESVPASWKTSNTVLVFKKGEKDDLSNWRPLALGNTASKLFAALLADRLTDWAVTNGRLSWSQKGFLRCEGCYEHNFVLGEILTDARRPRKQAVVAWLDLSNAFGSIPHSTISNALEAAGVHPRLHATWKAMYTGCSTRVRAGEGYTSPIPIRSGVKQGCPLSPIVFNLAIESVVRKAIGTRAGYTLHGQRFNILAYADDLALVAETPEGMRDLLRAVEDEARRIGLRFNPAKCASLHVIGGNGGRVLPSEFVLQDVPIRALGAGEPYEHLGIPTGFRVQQTPIATLEQLIECLRAVDASKLTPWQKLESVAVFILPRLDFLLRGSKILRGPLKEVDKYIKRLAKSWMNLPQRASAEVVFLPPSRGGAGLLPLADLADALTIAHAFRLLTSPDAPVRELAWSSLREATFRKTGLSPSNVDLAAYLTGSREGRLQRDATSPGIWANARNAARRQGERLLIRWQWTSEREELSLRLRGSNGRPVILTPRSRSQVVHRVREAVAEFYLHTLLLKKDQGKVYEVSARSKVSNHFLRTGSFTRFADWRFIHRARLDVVPLNGNRRWGEGDKRCRRCGGGLETLPHVLCHCGPHSAAIQLRHNAVLDRLKNASRLPGALRVNQRIEGVDGELASLRPDLVVRHEASRTIVMVDVAIPFENRAEAFKEARERKLAKYAPLAERLARDGYRVYVDAFLVGALGSWCPKNEAVLRLLRVSERYAAMMRRLMISDTIRWSRDIYVEHVSGVRQYGDPSAESAVGQPAALEGPSQNRIGASVDAEEATGTRPGYE

SEQ ID NO: 1684 - protein, 1754 aa, Cerceris rybyensis
MDKFLVAYPCVDGYSCEKCSELCADPRMLRSGGVYAGRGELVKHLKKAHGISAVAYKCGKCDFIGQGVYTLKSVKSHYAKVHGPVPVTPPRACSRINAADIGSLAPGASASSETGGRVGVFANSAGISSVSETVVTPLSAGGSPTILTVAAAQTTSTVSVTAATATISNAGRISPAFRREEISNLTARQPATTYAAVTTAPPSAAALAVQATRDAIKRATKPRLPKEAGPRSAGISVTRRPSGEGRPPARISTLKISPPKKSSSTSTAPTTSRPAQGNAPPRAAAAGRAKGPSTTTPPSSRRSSPRHVGGVRNAGSTPPRAIRPRLSGERMRRAGTAPPADRRAPRAAGGRKSNEGRVIPATTCAPRGPGGRKGTEGGERISPPGLRSRRAASVPVVVNLPSRTTTATRPVVTGPEKGPLRVKPHGTSPSRPAATIERKSSGPSSPLTRGGEILPKLPVEAQADVRISPLRLPATTGLPFSRSPVGVAVNNTRPCTSAASVALTTATITTSCCGAPLVSASVSVPARPIQGDRPAERALPVVREVVILRPASKKTTPADHQPSLAEEIEMDSEGGEQPWKVVAGRRARRTPPPLSPPELSARSVISPLIRVSPPPPPVTEVNFPLLPPPGSRVGKHMRKNIDSAPSFRALNERRGTGSRTDEGSPEAAGISSATPTRRCPTTRVPAEGRGHAPVSTGVSRSYAAGPQAPSSSPRSGRPDSGRVTTSQRGRSERPGGNPAGSNPSRAGASKRRATREELQQRDLLLEIANSVSCIEDLECMATEVAIYFQGCGENRGSTARSEAGTSRSGRTAVGDAGAAGARRGGSGRDTGRAGRPSRPTPSQGEGRRNPVREAARLQRLYRLNRSRAIREVFGGSSPFCQVQRERIQRYFEEVYGGGNVLSGSPPARNTGAPVVGAEGLAQLFTEKEVERRLGRMSNSAPGPDGVSYADLRMADPGSRLLTAVFNACYRLESVPASWKTSNTVLVFKKGEKDDLSNWRPLALGNTASKLFAALLADRLTDWAVTNGRLSWSQKGFLRCEGCYEHNFVLGEILADARRPRKQAVVAWLDLSNAFGSIPHSTISNALEAAGVHPRLHATWKAMYTGCSTRVRAAEGYTSPIPIRSGVKQGCPLSPIVFNLAIESVVRKAIGTRAGYTLHGQRFNILAYADDLALVAETPEGMRDLLRAVEDEARRIGLRFNPAKCASLHVIGGNGGRVLPSEFVLQDVPIRALGAGEPYEHLGIPTGFRVQQTPIATLEQLIECLRAVDASKLTPWQKLESVAVFILPRLDFLLRGSKLLRGPLKEVDKYIKRLAKSWMNLPRRASAEVVFLPPSRGGAGLLPLADLADALTIAHAFRLLTSPDAPVRELAWSSLGEATFRKTGLSPSNVDLAAYLSGSREGRLQRDATSPGIWANARNAARRQGERLLIRWQWTSEREELSLRLRGSNGRPVILTPRSRSQVVHRVREAVAEFYLHTLLLKKDQGKVYEVSARSKVSNHFLRTGSFTRFADWRFIHRARLDVVPLNGNRRWGEGDKRCRRCGGGLETLPHVLCHCGPHSAAIQLRHNAVLDRLKNASRLPGVLRVNQRIEGVDGELASLRPDLVVRHEASRTIVMVDVAIPFENRAEAFKEARERKLAKYAPLAERLARDGYRVYVDAFLVGALGSWCPKNEAVLRLLRVSERYAAMMRRLMISDTIRWSRDIYVEHVSGVRQYGDPSSESAVGQPAALEGPSQNCIGASVDAEEATGTRPGCE

SEQ ID NO: 1685 - protein, 1754 aa, Cerceris rybyensis
MDKFLVAYPCVDGYSCEKCSELCADPRMLRSGGVYAGRGELVKHLKKVHGISAVAYKCGKCDFIGQGVYTLKSVKSHHAKVHGPVPVTPPRANSRINAADIGSLAPGTSASSETGGRVGDSAISAGISTVTETVVTPLSAGGSPTILTVAAAQTTSTVSVTAATAIINVAERISPAFRREEISNLTARQPATTYAAVTIAPPSAAALAVQATRDAIKRATKPRLPKEAGPRSAGISVTRRPSGDGRPPARTSTSKLSPPKRTTSTTTAPTTSRPAQRNAPPKAAAAGRAQGSSTTTPPSSRRSSPRHVGGARNAGSTPPRAVRPRLSGERTRRAGTAPPADRRAPRAAGGRKSIEERATPATTCAPRGPGGRKGTEGGERISPPVSRSRRAASVPVVVQLPPRTKIVTRPVVTGPVKGALRVKSLGTSPPRPAATIERKNSGPSSPLTRGGEKLPKLPVEAQTGVHFPSMRLPATTGLPFSRSPVGVAVNNTRPCTSAASVALTTATITTSCCGAPIVSAIVSAPARPIQGDRPAERALPVVREVVILRPASKKRTPADHQPSLAEEVEMDSEGGEQPWKVVAGRRARRTPPPQSPPEMSARSVVSPPIRVSPPPPPVTEVTFPLLPPPGSRGGKHFRKNFDSAPFFRALNERRGSDSRTDEGSPEAVGITSATPTRRCPATRVPAEGRGHAPVSTGVSRSYAAGPQAPSSSPRSGRPDSGRVTTSQRGRSERPGGNPAGSNPSRAGASKRRATREELQQRDLLLEIANSVSCTEDLECMATEVAIYFQGCGENRGSTARSEAGTSRSGRTAVGGAGAAGARRGGPERDTGRAGRSSRPTPSQGEGRRNPVREAARLQRLYRLNRSRAIREVFGGSSPFCQVQREKIQRYFEEVYGGGNDLSGSPPARNTGAPVVGAEGLAQQFTEKEVERRLGRMSNSAPGPDGVSYADLRMADPGSRLLTAVFNACYRLESVPASWKTSNTVLVFKKGEKDDLSNWRPLALGNTASKLFAALLADRLTDWAVTNGRLSWSQKGFLRCEGCYEHNFVLGEILADARRPRKQAVVAWLDLSNAFGSIPHSTISNALEAAGVHPRLHATWKAMYTGCSTRVRAGEGYTSPIPIRSGVKQGCPLSPIVFNLAIESVVRKAIGTRAGYTLHGQRFNILAYADDLALVAETPEGMRDLLRAVEDEARRIGLRFNPAKCATLHIIGGNGGRVLPSEFVLQDVPIRALGAGEPYEHLGIPTGFRVQQTPIATLEQLIECLRAVDASKLTPWQKLESVAVFILPRLDFLLRGSKILRGPLKEVDKYIKRLAKSWMNLPQRASAEVVFLPPSRGGAGLLPLADLADALTIAHAFRLLTSPDAPVRELAWSSLREATFRKTGLSPSNVDLAAYLSGSREGRLQRDATSPGIWANARNAARRQGERLLIRWQWTSEREELSLRLRGSNGRPVILTPRSRSQVVHRVREAVAEFYLHTLLLKKDQGKVYEVSARSKVSNHFVRTGSFTRFADWRFIHRARLDVVPLNGSRRWGEGDKRCRRCGGGLETLPHVLCHCGPHSAAIQLRHNAVLDRLKNASRLPGVLRVNQRIEGVDGELASLRPDLVVRHEASRTIVMVDVAIPFENRAEAFKEARERKLAKYAPLAERLARDGYRVYVDAFLVGALGSWCPKNEAVLRLLRVSERYAAMMRRLMISDTIRWSRDIYVEHVSGVRQYGDPSAESAVGQPAALEGPSRNHIEASVDVGEATGTRPGNE

SEQ ID NO: 1686 - protein, 1755 aa, Cerceris rybyensis
MDKFLVAYPCVEGYSCAKCSELCADPRMLRSGGVYAGRGELVKHLKKAHGISAVAYKCGKCDFIGQGVYTLKSVKSHHAKVHGPVPVTPPRANSRINAADIGSLAPGLSASSESGGRVGDFANSAGISTVSETVVTPLSAGGSPTILTVAAAQTTSTVSVTAAAAITSYAERISPAFRRETISNLIARQPATTYAAVTIAPPSAAALAVQATRAAIQRASKPRLPKEAGPRSAGISVTRRPSGDGRPPARTSTSKLSPPKRTTSTTTAPTTSRPAQRNAPPKAAAAGRAQGSSTTTPPSSRRSSPRHVGGARNAGSTPPRAVRPRLSGERTRRAGTAPPADRRAPRAAGGRKSIEERATPATTCAPRGPGGRKGTEGGERVSPPVSRSRRAASVPVVVQLPPRTKIVTRPVVTGPEKGALQVKPPGTSPPRPAATIKRISSGPSSPPTRGGEILPKLPVEAQTGVHFPSMRLPATTGLPFSRSPVGVAVNNTRPCTSAASVALTTATITTSCCGAPIVSAIVSAPARPIQGDRPAERALPVVREVVILRPASKKRTPADHQPPLAEEKRKDDSEGEEQPWKVVAGRRARRTPPPQSPPEMSARSVISPPTRVSPPPPPVTEVNFPLLPPPGSRVGKHKIIKIDSALSFRALNERRGSDSRTDEGSPEAAGITSATPTRRCPATRVPAERRVHAPVSTGVSRSYAAGPQAPSSSPRSGRPDSGRVTTSQRGRSERPGGNPAGSNPSRAGASKRRATREELQQRDLLLEIANSVSCIEDLECMATEVAIYFQCCGENRGSTARSEAGASRSGRLTAGDAGAAGARRGGSGRDTGRAGRPSRPTPSQGEGRRNPVREAARLQRLYRLNRSRAIREVFGGSSPFCQVQREKIQRYFEEVYGGGNDLSGSPPARNTGTPVVGAEGLAQQFTEKEVERRLGRMSNSAPGPDGVSYADLRMADPGSRLLTAVFNACYRLESVPASWKTSNTVLVFKKGEKDDLSNWRPLALGNTASKLFAALLADRLTDWAVTNGRLSWSQKGFLRCEGCYEHNFVLGEILTDARRPRKQAVVAWLDLSNAFGSIPHSTISNALEAAGVHPRLHATWKAMYTGCSTRVRAGEGYTSPIPIRSGVKQGCPLSPIVFNLAIESVVRKAIGTRAGYTLHGQRFNILAYADDLALVAETPEGMRDLLRAVEDEARRIGLRFNPAKCASLHVIGGNGGRVLPSEFVLQDVPIRALGAGEPYEHLGIPTGFRVQQTPIATLEQLIECLRAVDASKLTPWQKLESVAVFILPRLDFLLRGSKILRGPLKEVDKYIKRLAKSWMNLPQRASAEVVFLPPSRGGAGLLPLADLADALTIAHAFRLLTSPDAPVRELAWSSLREATFRKTGLSPSNVDLAAYLSGSREGRLQRDATSPGIWANARNAARRQGERLLIRWQWTSEREELSLRLRGSNGRPVILTPRSRSQVVHRVREAVAEFYLHTLLLKKDQGKVYEVSARSKVSNHFLRTGSFTRFADWRFIHRARLDVVPLNGNRRWGEGDKRCRRCGGGLETLPHVLCHCGPHSAAIQLRHNAVLDRLKNASRLPGALRVNQRIEGVDGELASLRPDLVVRHEASRTIVMVDVAIPFENRAEAFKEARERKLAKYAPLAERLARDGYRVYVDAFLVGALGSWCPKNEAVLRLLRVSERYAAMMRRLMISDTIRWSRDIYVEHVSGVRQYRDPSSESTVGQPDAREGSMQNRIEASDDAGEATGTRPGNE

SEQ ID NO: 1687 - protein, 1754 aa, Cerceris rybyensis
MDKFLIEYPSVEGYSCAKCSELCADPRVLRSGGIYAGRGELVKHLKKAHGISAVAYKCGKCDFIGQGVYTLKSVKSHHAKVHGPVPVTPPRANSRINAADIGSLAPGASASSETGGRVGDFAISAGISSTSETVVTPLSAGGSPTILTVAAAQITSTVSVTAATATTSYAERISPAFRREETLNSTARQPATTYAAVTVAPPSAAALAVQATRNAIQRAMKPRLPKEAGPRSAGISVTRRPSGEGRPPARISTSKLSPPKRTTSTMTAPTTSRPAQRNAPPKAAAAGRAQGSSTTTPPSSRRSSPRHVGGARNAGSTPPRAVRPRLSGERTRRAGTAPPADRRAPRAAGGRKSIEERATPATTCAPRGPGGRKGMEGGERISPPGLRSRRAASVPVVVKLPPRTKIVTRPVVTGPVKGALRVKSLGTSPPRPAAAIERNSTGPSSPPTSGGEILPKLPVEAQTGVHSSPMRLPATTGLPFSRSPVGVAVNNTRPCTSAASVALTTATITTSCCGAPLVSASVSVPARPIQGDRPAERALPVVREVVILRPASKKTTPADHQPSLAEEIEMDSEGGEQPWKVVAGRRARRTPPPLSPPELSARSVISPPIRVSPPPPPVTEVNFPLLPPPGSRVGKHMRKNIDSAPSFRALNERRGTGSRTDEGSPEAAGISSATPTRRCPTTRVPSGGRGHAPVSTGVSRSYAAGPQAPSSSPRSGRPDSGRVTTSQRGRSERPGGNPAGSNPSRAGASKRRATREELQQRDLLLEIANSVSCIEDLECMATEVAIYFQGCGENRGSTARSEAGTSRSGRSTAGDADAARARRGGSGRDTGRAGRPSRPTPSQGEGRRNPVREAARLQRLYRLNRNRAIREVFGGSSPFCQVQREKIQRYFEEVYGGGNDLSGSPPARNTGAPVVGAEGLAQQFTEKEVERRLGRMSNSAPGPDGVSYADLRMADPGSRLLTAVFNACYRLESVPASWKTSNTVLVFKKGEKDDLSNWRPLALGNTASKLFAALLADRLTDWAVTNGRLSWSQKGFLRCEGCYEHNFVLGEILADARRPRKQAVVAWLDLSNAFGSIPHSTISNALEAAGVHPRLHATWKAMYTGCSTRVRAAEGYTSPIPIRSGVKQGCPLSPIVFNLAIESVVRKAIGTRAGYTLHGQRFNILAYADDLALVAETPEGMRDLLRAVEDEARRIGLRFNPAKCASLHVIGGNGGRVLPSEFVLQDVPIRALGAGEPYEHLGIPTGFRVQQTPIATLEQLIECLRAVDASKLTPWQKLESVAVFILPRLDFLLRGSKLLRGPLKEVDKYIKRLAKSWMNLPQRASAEVVFLPPSRGGAGLLPLADLADALTIAHAFRLLTSPDAPVRELAWSSLREATFRKTGLSPSNVDLAAYLSGSREGRLQRDATSPGIWANARNAARRQGERLLIRWQWTSEREELSLRLRGSNGRPVILTPRSRSQVVHRVREAVAEFYLHTLLLKKDQGKVYEASARSKVSNHFLRTGSFTRFADWRFIHRARLDVVPLNGNRRWGEGDKRCRRCGGGLETLPHVLCHCGPHSAAIQLRHNAVLDRLKNASRLPGVLRVNQRIEGVDGELASLRPDLVVRHEASRTIVMVDVAIPFENRAEAFKEARERKLAKYAPLAERLARDGYRVYVDAFLVGALGSWCPKNEAVLRLLRVSERYAAMMRRLMISDTIRWSRDIYVEHVSGVRQYGDPSLESAVGQPDAREGPRQNRIEASDDAEEATGTRPGYE

SEQ ID NO: 1688 - protein, 1757 aa, Cerceris rybyensis
MDKFLIEYPSVEGYSCAKCSELCADPRVLRSGGIYAGRGELVKHLKKAHGISAVAYKCGKCDFIGQGVYTLKSVKSHHAKVHGPVPVTPPRANSRINAADIGQVAPGTSASSESGGRVGDFAFSAGIFPISETVVTPLSAGGSPTILTVAAAQITSTVSVTAATATTSYAERISPAFRREETLNSTARQPATTYAAVTVAPPSAAALAVQATRNAIQRAMKPRLPKEAGPRSAGISVTRRPSGDGRPPARKSNAKLSPPKTTASTKTASTTSRPAQGNAPPRAAAAGRASGTSTTTPPSSRRSSPRHVGGVRNAGSTPPRAVRPRLSGGRTHRAGTAPPDDRRAPRAAGGRKSNEGRVIPATTCAPRGPGGRKGTERGERVTPPVLRSRRAASVPVVGNLPPRTKIVTRPVVTGPVKGALRVKSLGTSPPPPAATIERNLTGPSSPPTSGGEILPKLPVEAQTGVHSSPLRLPATTGLPFSRSPVGVAVNNTRPCTSAASVALTTVTITTSCCGAPIVSASVSAPARPIQGDRPAERALPVVREVVILRPASKKRTPADHQPSLAEEKEKDSEGEEQPWKVVAGRRARRTPPPLSPPELSARSVVSPPIRVSPPPPPVTEVNFPLLPPPGSRTWKHFRKNLDSAYSFRALNERRGSDSRTDEGSPEAAGITSATPTRRCPATRVPAGGRGHAPVSTGVSRSYAAGPQAPSSSPRSGRPDSGRVTTSQRGRSERPGGNPAGSNPSRAGASKRRATREELQQRDLLLEIANSVSCTEDLECMATEVAIYFQGCGENRGLTARSEAGTSRSGRSTAGDAGAAGARRGGSGRDTGRAGRSSRPTPSQGEGRRNPVREAARLQRLYRLNRSRAIREVFGGSSPFCQVQREKIQRYFEEVYGGGNVLSGSPPARNTGAPAVGAEGLAQPFTEKEVERRLGRMSNSAPGPDGVSYADLRMADPGSRLLTAVFNACYRLESVPASWKTSNTVLVFKKGEKDDLSNWRPLALGNTASKLFAALLADRLTDWAVTNGRLSWSQKGFLRCEGCYEHNFVLGEILADARRPRKQAVVAWLDLSNAFGSIPHSTISNALEAAGVHPRLHATWKAMYTGCSTRVRAAEGYTSPIPIRSGVKQGCPLSPIVFNLAIESVVRKAIGTRAGYTLHGQRFNILAYADDLALVAETPEGMRDLLRAVEDEARRIGLRFNPAKCASLHVIGGNGGRVLPSEFVLQDVPIRALGAGEPYEHLGIPTGFRVQQTPIATLEQLIECLRAVDASKLTPWQKLESVAVFILPRLDFLLRGSKILRGPLKEVDKYIKRLAKSWMNLPQRASAEVVFLPPSRGGAGLLPLADLADALTIAHAFRLLTSPDAPVRELAWSSLREATFRKTGLSPSNVDLAAYLSGSREGRLQRDATSPGIWANARNAARRQGERLLIRWQWTSEREELSLRLRGSNGRPVILTPRSRSQVVHRVREAVAEFYLHTLLLKKDQGKVYEVSARSKVSNHFLRTGSFTRFADWRFIHRARLDVVPLNGNRRWGEGDKRCRRCGGGLETLPHVLCHCGPHSAAIQLRHNAVLDRLKNASRLPGVLRVNQRIEGVDGELASLRPDLVVRHEASRTIVMVDVAIPFENRAEAFKEARERKLAKYAPLAERLARDGYRVYVDAFLVGALGSWCPKNEAVLRLLRVSERYAAMMRRLMISDTIRWSRDIYVEHVSGVRQYGDPSSESTVGQPDAREGSTQNRIEASDDAGEATGTRPGCERAS

SEQ ID NO: 1689 - protein, 1754 aa, Cerceris rybyensis
MDKFLIEYPSVEGYSCAKCSELCADPRVLRSGGIYAGRGELVKHLKKAHGISAVAYKCGKCDFIGQGVYTLKSVKSHHAKVHGPVPVTPPRANSRINAADIGQLAPGTSASSESGGRVGDFAFSAGIFPISETVVTPLSAGGSPTILTVAAAQTTSTVSVTAATAITNVAERIPPAFRREKILNLTARQPATTYAAVTTAPPSAAALAVQATRDAIKRATKPRLPKEAGPRSAGISVTRRPSGEGRPPARNSNGKISPPKKTTSYTTASTTSRPAQGNAPPRAAAAGRAKGPSTTTPPSSRRSSPRHVGGVRNAGSTPPRAVRPRLSGERTRRAGTAPPADRRAPRAAGGRNSTEGRVFPATSCAPRGPGGRKGMEGGEKNSPPVLRTRRAASVPVVGNLPPRTKIVTRPVVTGPVKGALRVKSLGTSPPPPAATIECKNSGPSSPLTRGGEKLPKVPVEAQADVRISPMRLPATTGLPFSRSPVGVAVNNTRPCTSAASVALTTATITTSCCGAPIVSAIVSAPARPIQGDRPAERALPVVREVVILRPASKKRTPADHQPSLAEEIEMDSEGGEQPWRVVAGRRARRTPPPQSPPEMSARSGFSPPIRVSPPPPPVTEVNFPLPPPPGSRVGKHKIVKINSAPSFRALNERRGSDSRTDEGSPEAAGVTSATPTRRCPATRVPAERRVHAPVSTGVSRSYAAGPQAPSSSPRSGRPDSGRVTTSQRGRSERPGGNPAGSNPSRAGDSKRRATREELQQRDLLLEIANSVSCIEDLECMATEVAIYFQGCGENRGSTARSEAGTSRSGRTAVGDAGAAGARRGGSGRDTGRAGRPSRPTPSQGEGRRNPVREAARLQRLYRLNRSRAIREVFGGSSPFCQVQREKIQRYFEEVYGGGNVLSGSPPARNTGAPVVGAEGLAQQFTEKEVERRLGRMINSAPGPDGVSYADLRMADPGSRLLTAVFNACYRLESVPASWKTSNTVLVFKKGDKDDLSNWRPLALGNTASKLFAALLADRLTDWAVTNGRLSWSQKGFLRCEGCYEHNFVLGEILADARRPRKQAVVAWLDLSNAFGSIPHSTISSALEAAGVHPRLHATWKAMYTGCSTRVRAAEGYTSPIPIRSGVKQGCPLSPIVFNLAIESVVRKAIGTRAGYTLHGQRFNILAYADDLALVAETPEGMRDLLRAVEDEARRIGLRFNPAKCASLHVIGGNGGRVLPSEFVLQDVPIRALGAGEPYEHLGIPTGFRVQQTPIATLEQLIECLRAVDASKLTPWQKLESVAVFILPRLDFLLRGSKILRGPLKEVDKYIKRLAKSWMNLPQRASAEVVFLPPSRGGAGLLPLADLADALTIAHAFRLLTSPDAPVRELAGSSLREATFRKTGLSPSNVDLAAYLSGSREGRLQRDATSPGIWANARNAARRQGERLLIRWQWTSEREELSLRLRGSNGRPVILTPRSRSQVVHRVREAVAEFYLHTLLLKKDQGKVYEVSARSKVSNHFLRTGSFTRFADWRFIHRARLDVVPLNGNRRWGEGDKRCRRCGGGLETLPHVLCHCGPHSAAIQLRHNAVLDRLKNASRIPGVLRVNQRIEGVDGELASLRPDLVVRHEASRTIVMVDVAIPFENRAEAFKEARERKLAKYAPLAERLARDGYRVYVDAFLVGALGSWCPKNEAVLRLLRVSERYAAMMRRLMISDTIRWSRDIYVEHVSGVRQYRDPSSESTVGQPDAREGSMQNRIEASDDAGEATGTRPGNE

SEQ ID NO: 1690 - protein, 1755 aa, Cerceris rybyensis
MDKFLVAYPCVDGYSCAKCSELCADPRVLRSGGVSAGRGELVKHLKKAHGISAVAYKCGKCDFIGQGVYTLKSVKSHYAKVHGPVPVTPPRANSRINAADIGQLAPGASASSESGGRVGDFAFSAGIFPISETVVTPLSAGGSPTILTVAAAQTTSTVSVTAATAIINVAERISPAFRREEILNSTARQPATTYAAVTIAPPSAAALAVQATRAAIQRASKPRLPKEAGPRSAGISVTRRPSGEGRPPARISTSKLSPPKKTTSTSTAPTTSRPAQRNAPTKAAAAGRASGTSTITPPSSRRSSPRHVGGVRNAGSTPPRAVRPRLSGERTRRAGTAPPADRRAPRAAGGRKSNEGRFIPATTCAPRGPGGRKGTEGGERVSPPVSRSRRAASVPVVVQLPPRTKIVTRPVVTGPEKGALQVKPPGTSPPRPAATIERISSGPSSPPTRGGEILPKLPVEAQTGVHFPSMRLPATTGLPFSRSPVGVAVNNTRPCTSAASVALTTATITTSCCGAPIVSAIVSAPARPIQGDRPAERALPVVREVVILRPASKKRTPADHQPSLAEEREKTDSEGEEQPWRVVAGRRARRTPPPPSPPELSARSGFSPPIRVSPPPPPVTEVNFPLLPPPGSRMGKLIRKNFDSANVFRALNERRGSDSRTDEGSPEAAGITSATPTRRCPTTRVPAEGRGHAPVSTGVSRSYAAGPQAPSSSPRSGRPDSGRVTTSQRGRSERPGGNPAGSNPSRAGASKRRATREELQQRDLLLEIANSVSCIEDLECMATEVAIYFQGCGENRGSTARSEAGTSRSGRSTAGDAGAAGARRGGSGRDTGRAGRPSRPTPSQGEGRRNPVREAARLQRLYRLNRSRAIREVFGGSSPFCQVQREKIQRYFEEVYGGGNVLSGSPPARNTGAPAVGAEGLAQPFTEKEVERRLGRMSNSAPGPDGVSYADLRMADPGSRLLTAVFNACYRLESVPASWKTSNTVLVFKKGEKDDLSNWRPLALGNTASKLFAALLADRLTDWAVTNGRLSWSQKGFLRCEGCYEHNFVLGEILADARRPRKQAVVAWLDLSNAFGSIPHSTISNALEAAGVHPRLHATWKAMYTGCSTRVRAAEGYTSPIPIRSGVKQGCPLSPIVFNLAIESVVRKAIGTRAGYTLHGQRFNILAYADDLALVAETPEGMRDLLRAVEDEARRIGLRFNPAKCASLHVIGGNGGRVLPSEFVLQDVPIRALGAGEPYEHLGIPTGFRVQQTPIATLEQLIECLRAVDASKLTPWQKLESVAVFILPRLDFLLRGSKILRGPLKEVDKYIKRLAKSWMNLPQRASAEVVFLPPSRGGAGLLPLADLADALTIAHAFRLLTSPDAPVRELAWSSLREATFRKTGLSPSNVDLAAYLSGSREGRLQRDATSPGIWANARNAARRQSERLLIRWQWTSEREELSLRLRGSNGRPVILTPRSRSQVVHRVREAVAEFYLHALLLKKDQGKVYEVSARSKVSNHFLRTGSFTRFADWRFIHRARLDVVPLNGNRRWGEGDKRCRRCGGGLETLPHVLCHCGPHSAAIQLRHNAVLDRLKNASRLPGVLRVNQRIEGVDGELASLRPDLVVRHEASRTIVMVDVAIPFENRAEAFKEARERKLAKYAPLAERLARDGYRVYVDAFLVGALGSWCPKNEAVLRLLRVSERYAAMMRRLMISDTIRWSRDIYVEHVSGVRQYGGPSLESAVGQPDAREGPTQNSIEASVDAEVATGTRPVCE

SEQ ID NO: 1691 - protein, 1757 aa, Cerceris rybyensis
MDKFLIEYPSVEGYSCAKCSELCADPRVLRSGGIYAGRGELVKHLKKAHGISAVAYKCGKCDFIGQGVYTLKSVKSHHAKVHGPVPVTPPRANSRINAADIGQVAPGTSASSESGGRVGDFAFSAGIFPISETVVTPLSAGGSPTILTVAAAQITSTVSVTAATATTSYAERISPAFRREETLNSTARQPATTYAAVTVAPPSAAALAVQATRNAIQRAMKPRLPKEAGPRSAGISVTRRPSGDGRPPARKSNAKLSPPKTTASTKTASTTSRPAQGNAPPRAAAAGRASGTSTTTPPSSRRSSPRHVGGVRNAGSTPPRAVRPRLSGGRTHRAGTAPPDDRRAPRAAGGRKSNEGRVIPATTCAPRGPGGRKGTERGERVTPPVLRSRRAASVPVVGNLPPRTKIVTRPVVTGPVKGALRVKSLGTSPPPPAATIERNLTGPSSPPTSGGEILPKLPVEAQTGVHSSPLRLPATTGLPFSRSPVGVAVNNTRPCTSAASVALTTVTITTSCCGAPIVSASVSAPARPIQGDRPAERALPVVREVVILRPASKKRTPADHQPSLAEEKEKDSEGEEQPWKVVAGRRARRTPPPLSPPELSARSVVSPPIRVSPPPPPVTEVNFPLLPPPGSRTGKHFRKNLDSAYSFRALNERRGSDSRTDEGSPEAAGITSATPTRRCPATRVPAGGRGHAPVSTGVSRSYAAGPQAPSSSPRSGRPDSGRVTTSQRGRSERPGGNPAGSNPSRAGASKRRATREELQQRDLLLEIANSVSCTEDLECMATEVAIYFQGCGENRGLTARSEAGTSRSGRSTAGDAGAAGARRGGSGRDTGRAGRSSRPTPSQGEGRRNPVREAARLQRLYRLNRSRAIREVFGGSSPFCQVQREKIQRYFEEVYGGGNVLSGSPPARNTGAPAVGAEGLAQPFTEKEVERRLGRMSNSAPGPDGVSYADLRMADPGSRLLTAVFNACYRLESVPASWKTSNTVLVFKKGEKDDLSNWRPLALGNTASKLFAALLADRLTDWAVTNGRLSWSQKGFLRCEGCYEHNFVLGEILADARRPRKQAVVAWLDLSNAFGSIPHSTISNALEAAGVHPRLHATWKAMYTGCSTRVRAAEGYTSPIPIRSGVKQGCPLSPIVFNLAIESVVRKAIGTRAGYTLHGQRFNILAYADDLALVAETPEGMRDLLRAVEDEARRIGLRFNPAKCASLHVIGGNGGRVLPSEFVLQDVPIRALGAGEPYEHLGIPTGFRVQQTPIATLEQLIECLRAVDASKLTPWQKLESVAVFILPRLDFLLRGSKILRGPLKEVDKYIKRLAKSWMNLPQRASAEVVFLPPSRGGAGLLPLADLADALTIAHAFRLLTSPDAPVRELAWSSLREAAFRKTGLSPSNVDLAAYLSGSREGRLQRDATSPGIWANARNAARRQGERLLIRWQWTSEREELSLRLRGSNGRPVILTPRSRSQVVHRVREAVAEFYLHTLLLKKDQGKVYEVSARSKVSNHFLRTGSFTRFADWRFIHRARLDVVPLNGNRRWGEGDKRCRRCGGGLETLPHVLCHCGPHSAAIQLRHNAVLDRLKNASRLPGVLRVNQRIEGVDGELASLRPDLVVRHEASRTIVMVDVAIPFENRAEALKEARERKLAKYAPLAERLARDGYRVYVDAFLVGALGSWCPKNEAVLRLLRVSERYAAMMRRLMISDTIRWSRDIYVEHVSGVRQYGDPSSESTVGQPDAREGSTQNRIEASDDAGEATGTRPGCERAS

SEQ ID NO: 1692 - protein, 1755 aa, Cerceris rybyensis
MDKFLIEYPSVEGYSCAKCSELCADPRVLRSGGVYAGRGELVKHLKKAHGISAVAYKCGKCDFIGQGVYTLKSVKSHYAKVHGPVPVTPPRACSRINAADIGSLAPGASASSETGGRVGDLAISAGISSVSETVVTPLSAGGLPTILTVAAAQTTSTVSVTAATAIINVAERISPAFRREETLNSTARQPATTYAAVTIAPPSAAALAVQATRAAIQRASKPRLPKEAGPRSAGISATRRPSGEGRPPARKSNAKLSPPKITASTKTASTTSRPAQGNAPPRAAAAGRASGTSTITPPSSRRSSPRHVGGGRNAGSTPPRAIRPRLSGERMRRAGTAPPADRRAPRAAGGRKSNEGRVIPATTCAPRGPGGRKGTEGGERISPPGLRFRRAASVPVVVKLPSRTSTVTRPVVTGPAKGALQVKPLGKSPPRPAATVERKNAGPSSPPTSGGEKLPKLPVEAQADVRISPMRLPATTGLPFSRSPVGVAVNNTRPCTSAASVALTTATITTSCCGAPIVSAIVSAPARPIQGDRPAERALPVVREVVILRPASKKRTPADHQPSLAEEKETMDSEGGEQPWKVVAGRRARRTPPPQSPPEMSARSVVSPPIRVSPPPPPVTEVNFPLLPPPGSRVGKHKIVKTNSAPAFRALNERRGSDSRTDEGSPEAAGVTSATPTRRCPTTRVPAERRGHAPVSTGVSRSYAAGPQAPSSSPRSGRPDSGRVTTSQRGRSGRPGGNPAGSNPSRAGASKRRATREELQQRDLLLEIANSVSCIEDLECMATEVAIYFQGCGENRGSTARSEAGTSRSGRSTAGDAGAAGARRGGSGRDTGRAGRPSRPTPSQGEGRRNPVREAARLQRLYRLNRSRAIREVFGGSSPFCQVQREKIQRYFEEVYGGGNDLSGSPPARNTGAPAVGAEGLAQPFTEKEVERRLGRMSNSAPGPDGVSYADLRMADPGSRLLTAVFNACYRLESVPASWKTSNTVLVFKKGEKDDLSNWRPLALGNTASKLFAALLADRLTDWAVTNGRLSWSQKGFLRCEGCYEHNFVLGEILADARRPRKQAVVAWLDLSNAFGSIPHSTISNALEAAGVHPRLHATWKAMYTGCSTRVRAAEGYTSPIPIRSGVKQGCPLSPIVFNLAIESVVRKAIGTRAGYTLHGQRFNILAYADDLALVAETPEGMRDLLRAVEDEARRIGLRFNPAKCASLHVIGGNGGRVLPSEFVLQDVPIRALGAGEPYEHLGIPTGFRVQQTPIATLEQLIECLRAVDASKLTPWQKLESVAVFILPRLDFLLRGSKILRGPLKEVDKYIKRLAKSWMNLPQRASAEVVFLPPSRGGAGLLPLADLADALTIAHAFRLLTSPDAPVRELAWSSLREATFRKTGLSPSNVDLAAYLSGSREGRLQRDATSPGIWANARNAARRQSERLLIRWQWTSEREELSLRLRGSNGRPVILTPRSRSQVVHRVREAVAEFYLHTLLLKKDQGKVYEVSARSKVSNHFLRTGSFTRFADWRFIHRARLDVVPLNGNRRWGEGDKRCRRCGGGLETLPHVLCHCGPHSAAIQLRHNAVLDRLKNASRLPGVLRVNQRIEGVDGELASLRPDLVVRHEASRTIVMVDVAIPFENRAEAFKEARERKLAKYAPLAERLARDGYRVYVDAFLVGALGSWCPKNEAVLRLLRVSERYAAMMRRLMISDTIRWSRDIYVEHVSGVRQYGDPSLESAVGQPDAREGPTQNCIEASVDAGEATGTRPGSE

SEQ ID NO: 1693 - protein, 1753 aa, Cerceris rybyensis
MERILISFPSVGGYPCPICSTSGVDPRLLRGGVYAGRGELAKHLKRIHGAESVGYKCSECDFTGEGRYPVKAVKLHYASAHGPVPVTPPRKCSRIDASAMVPLAPGHSASSESGGRVGDSADSAGIINVETTDVTPLSAGGSPTILTVAAALITETVSVTAATTITSNAERISPAFRREKYLTSSARQPATTYAAVTSAPPSAAAMAVQATRAAIQRATKPRLQKEAASRSAGISATRRPSGEGRPPARIVTKNLSPPTTSASTKDASTTSRPAQDNAPPRVAAAGRAKGSSTITPPSSRRSIPRHVGGRSSTGPILPGAVRPRLSGERTRRAGTAPPDDRRAPRAAGGRRSSEGHSNPLTAGAPRGPGGRKGMERGERASPPVLRSRRAASVPVVIKLPSRTKTATRSVVTGTTKGAPRVKPLGTSPPRPAATVERENIVPSSPPTSGGGKSPKLPVEAQADVHHSPMRLPATTGLPFSRSPVGVAVNNTRPCTSAASVALTTVTITTSCCGAPLVSASVSVPARPIQGDRPAVRALPVVREVVILRPASKKTTPADHQPPLAEETEIVSEGEEQPWKVVAGRRARRTPPPQSPPEMPARPDFSPPVRVSPLPPPVTEVTFPLLPPPGSRVGKHIRRNIDSAPSFRALNERRGSDSRTDEGSPEAAGVTSATPTRRCPATRVPAERRVHAPVSTGVSRSYAAGPQAPSSSPRSGRPDSGRVTTSQRGRSERPGGNPAGSNPSRAGASKRRATREELQQRDLLLEIANSVSCLEDLECMAAEVAIYFQGCGENRGSTARSEAGTNRSGRTAGGDAGAAGARRGGSGRDTGRAGRHSRPTPSQREGRRNPVREAARLQRLYRLNRSRAIREVFGGSSPFCQVQREEIQRYFEEVYGGGNDLSGLTPARITGAPAAGAEGLAQPFTEKEVERRLGRMSNSAPGPDGVSYADLRMADPGSRLLTAVFNACYRLESVPTPWKTSNTVLVFKKGNKDDLSNWRPLALGNTASKLYAALLADRLTDWAVANGRLSWSQKGFLRCEGCYEHNFVLGEILADARRPRKQAVVAWLDLSNAFGSIPHSTISSALEAAGVHPRLHATWKAMYTGCSTRVRAAEGYTSPIPIRSGVKQGCPLSPIVFNLAIESVVRKAIGTRAGYTLHGQRFNILAYADDLALVAETPEGMRDLLRAVEGESRRIGLRFNPAKCASLHVIGGNGGRVLPSEFVLQDVPIRALGAGEPYEHLGIPTGFRVQQTPIATLEQLIECLRAVDASKLTPWQKLESVAVFILPRLDFLLRGAKILRGPLKEVDKFIKRLAKSWMNLPQRASAEVVFLPPSRGGAGLLPLADLADALTIAHAFRMLTSPDAPVRELAWAALREATLRKTGLSPSNVDLAAYLSGSREGRLQRDATSTGIWANARNAARRQEEKLQIRWQWTSEREELSLRLRGTNGRPVILTPRSRSQVVHRVREAVAEYYLHTLLLKKDQGKVYEVSARSKVSNHFLRTGSFTRFADWRFIHRARLDVVPLNGNRRWGEGDKRCRRCGGGLETLPHVLCHCGPHSAAIQLRHNAVLDRLKNASRLPGVLRINQRIEGVDGELASLRPDLVVRHEASRTIVMVDVAIPFENRAEAFKEARERKLAKYAPLAERLARDGYRVYVDAFLVGALGSWCPKNEAVLRLLRVSERYAAMMRRLMISDTIRWSRDIYVEHVSGVRQYRGPSSESAVGQPDAREGSMQNCSNTSGVVELAMGTRPGSE

SEQ ID NO: 1694 - protein, 1755 aa, Cerceris rybyensis
MDKFLVAYPCVDGYSCEKCSELCADPRMLRSGGVYAGRGELVKHLKKAHGISAVAYKCGKCDFIGQGVYTLKSVKSHYAKVHGPVPVTPPRACSRINAADIGSLAPGASASSETGGRVGDLAMSAGISSVSETVVTPLSAGGSPTILTVAAAQTTSTVSVTAATAITNVAERISPAFRQGKILNLTARQPATTYAAVTVAPPSAAALAVQATRDAIKRAIKPRLPKEAASRSAGISATRRPSGEGRPPARNSISKLSPPTTSASTKAASTTSRPAQRNAPTKAAAAGRAQGSSTTTPPSSRRSSPRHVGGARNAGSTPPRAVRPRLSGERTRRAGTAPPADRRAPRAAGGRKSIEERATPATTCAPRGPGGRKGTEGGERVSPPVSRSRRAASVPVVVQLPPRTKIVTRPVVTGPVKGALRVKSLGTSPPRPAATIERKNSGPSSPLTRGGEILPKLPVEAQTGVHFSSMRLPATTGLPFSRSPVGVAVNNTRPCTSAASVALTTATITTSCCGAPIVSAIVSAPARQIQGDRPAERALPVVREVVILRPASKKRTPADHQPSLAEEREKTDSEGEEQPWRVVAGRRARRTPPPQSPPEMSARSVVSPPIRVSPPPPPVTEVTFPLLPPPGSRVGKHFRKNFDSASPFRALNERRGTDSRTDEGSPEAAGVTSATPTRRCPTTRVPAERRVHAPVSTGVSRSYAAGPQAPSSSPRSGRPDSGRVTTSQRGRSERPGGNPAGSNPSRAGASKRRATREELQQRDLLLEIANSVSCIEDLECMATEVAIYFQGCGENRGSTARSEAGTSRSGRTAVGDAGAAGARRGGSGRDTGRAGRPSRPTPSQGEGRRNPVREAARLQRLYRLNRSRAIREVFGGSSPFCQVQREKIQRYFEEVYGGGNDLSGSPPARNTGAPVVGAEGLAQQFTEKEVERRLGRMSNSAPGPDGVSYADLRMADPGSRLLTAVFNACYRLESVPASWKTSNTVLVFKKGEKDDLSNWRPLALGNTASKLFAALLADRLTDWAVTNGRLSWSQKGFLRCEGCYEHNFVLGEILADARRPRKQAVVAWLDLSNAFGSIPHSTISNALEAAGVHPRLHATWKAMYTGCSTRVRAEEGYTSPIPIRSGVKQGCPLSPIVFNLAIESVVRKAIGTRAGYTLHGQRFNILAYADDLALVAETPEGMRDLLRAVEDEARRIGLRFNPAKCASLHVIGGNGGRVLPSEFVLQDVPIRALGAGEPYEHLGIPTGFRVQQTPIATLEQLIECLRAVDASKLTPWQKLESVAVFILPRLDFLLRGSKILRGPLKEVDKYIKRLAKSWMNLPQRASAEAVFLPPSRGGAGLLPLADLADALTIAHAFRLLTSPDAPVRELAWSSLREATFRKTGLSPSNVDLAAYLSGSREGRLQRDATSPGIWANARNAARRQGERLLIRWQWTSEREELSLRLRGSNGRPVILTPRSRSQVVHRVREAVAEYYLHTLLLKKDQGKVYEVSARSKVSNHFLRTGSFTRFADWRFIHRARLDVVPLNGNRRWGEGDKRCRRCGGGLETLPHVLCHCGPHSAAIQLRHNAVLDRLKNASRLPGVLRVNQRIEGVDGELASLRPDLVVRHEASRTIVMVDVAIPFENRAEAFKEARERKLAKYAPLAERLARDGYRVYVDAFLVGALGSWCPKNEAVLRLLRVSERYAAMMRRLMISDTIRWSRDIYVEHVSGVRQYGDPSSESTVGQPAAPEGPLQNSIGASVDAGEAMGTRPGYE

SEQ ID NO: 1695 - protein, 1477 aa, Cerceris rybyensis
MRQRRPRLLGERRDLPPPPPPSSRRSSPRHVGGARNAGSTPPRAVRPRLSGERTRRAGTAPPADRRAPRAAGGRKSIDERATPATTCAPRGPGGRKGTEGGERISPPGLRSRRAASVPVVVKLPSRTSTVTRPVVTGPAKGALQVKPLGKSPPRPAATVERNLSGPSSPLTRGGEILPKLPVEAQTGVHSSPMRLPATTGLPFSRSPVGVAVNNTRPCTSAASVALTTATITTSCCGAPIVSAIVSAPARPIQGHRPAERALPVVREVVILRPALKKRTPADHQPSLAEEKEKDSEGEEQPWKVVAGRRARRTPPPLSPPELSARSVVSPPTRVSPPPPPVTEVNFPLLPPPGSRVGKYKCTNFDSAPSFRALNERRGSDSRTDEGSLEAAGVTSATPTRRCPATRVPAERRVHAPVSTGVSRSYAAGPQAPSSSPRSGRPDSGRVTTSQRGRSERPGGNPAGSNPSRAGASKRRATREELQQRDLLLEIANSVSCIEDLECMATEVAIYFQGCGENRGSTARSEAGTSRSGRSTAGDAGAAGARRGGSGRDTGRAGRPSRPTPSQGEGRRNPVREAARLQRLYRLNRSRAIREVFGGSSPFCQVQREKIQRYFEEVYGGGNVLSGSPPARNTGAPAVGAEGLAQPFTEKEVERRLGRMSNSAPGPDGVSYADLRMADPGSRLLTAVFNACYRLESVPAPWKTSNTVLVFKKGDKDDLSNWRPLALGNTASKLFAALLADRLTGWAVANGRLSWSQKGFLRCEGCYEHNFVLGEILADARRPRKQAVVAWLDLSNAFGSIPHSTISSALEAAGVHPRLHATWKAMYTGCSTRVRAAEGYTSPIPIRSGVKQGCPLSPIVFNLAIESVVRKAIGTRAGYTLHGQRFNILAYADDLALVAETPEGMRDLLRAVEDEARRIGLRFNPAKCASLHVIGGNGGRVLPSEFVLQDVPIRALGAGEPYEHLGIPTGFRVQQTPIATLEQLIECLRAVDASKLTPWQKLESVAVFILPRLDFLLRGSKILRGPLKEVDKYIKRLAKSWMNLPQRASAEAVFLPPSRGGAGLLPLADLADALTIAHAFRLLTSPDAPVRELAWSSLREATFRKTGLSPSNVDLAAYLSGSREGRLQRDATSPGIWANARNAARRQGERLLIRWQWTSEREELSLRLRGSNGRPVILTPRSRSQVVHRVREAVAEYYLHTLLLKKDQGKVYEVSARSKVSNHFLRTGSFTRFADWRFIHRARLDVVPLNGNRRWGEGDKRCRRCGGGLETLPHVLCHCGPHSAAIQLRHNAVLDRLRNASRLPGVLRVNKRIEGADGELASLRPDLVVRHEASRTIVMVDVAIPFENRAEAFKEARERKLAKYAPLAERLARDGYRVYVDAFLVGALGSWCPKNEAVLRLLRVSERYAAMMRRLMISDTIRWSRDIYVEHVSGVRQYGDPSLESAVGQPAALEGPLQNLIDASVDAGEATGTRPGYE

SEQ ID NO: 1696 - protein, 1755 aa, Cerceris rybyensis
MDKFLVAYPCVDGYSCAKCSELCTDPRVLRSGGVYAGRGELVKHLKKAHGISAVAYKCGKCDFIGQGVYTLKSVKSHYAKVHGPVPVTPPRANSRINAADIGSLAPGASASSETGGRVGDLAISAGIFPISETVVTPLSAGGSPTILTVAAAQTTSTVSVTAATAITSSAERISPASRREEILNSTARQPATTYAAVTVAPPSAAALAVQATRNAIQRAMKPRLPKEAGPRSAGISVTRRPSGEGRPPARKSNVKISPPKTTASTTTAPSTSRPAQGNAPPRAAAAGRAKGPSTTTPPSSRRSSPRHVGGVRNAGSTPPRAVRPRLSGERTRRAGTAPPADRRAPRAAGGRNSTEGRVFPATTCAPRGPGGRKGMEGGEKNSPPVLRTRRAASVPVVVKLPPRTSTVTRPVVTGPVKGALRVKSLGTSPLRPAAAIERNSTGPSSPPTSGGEILPKVPVEALTGVHLSPLRLPATTGLPFSRSPVGVAVNNTRPCTSAASVALTTATITTSCCGAPIVSAIVSAPARPIQGDRPAERALPVVREVVILRPASKKRTPADHQPSLASEKEKMDSEGEEQPWRVVAGRRARRTPPPQSPPEMSARSGFTPPIRASPPPPPVTEVNFPLLPPPGGRVGKQNKENIDSALSFRALNERRGSDSRTDEGSPEAAGVTSATPTRRCPTTRVPAERRVHAPVSTGVSRSYAAGPQASSSSPRSGRPDSGRVTTSQRGRSERPGGNPAGSNPSRAGASKRRATREELQQRDLLLEIANSVSCIEDLECMATEVAIYFQGCGENRGSTARSEAGTSRSGRSTAGDAGAAGARRGGSGRDTGRAGRPSRPTPSQGEGRRNPVREAARLQRLYRLNRSRAIREVFGGSSPFCQVQREKIQRYFEEVYGGGNDLSGSPPARNTGAPVVGAEGLAQQFTEKEVERRLGRMSNSAPGPDGVSYADLRMADPGSRLLTAVFNACYRLESVPASWKTSNTVLVFKKGEKDDLSNWRPLALGNTASKLFAALLADRLTDWAVTNGRLSWSQKGFLRCEGCYEHNFVLGEILADARRPRKQAVVAWLDLSNAFGSIPHSTISNALEAAGVHPRLHATWKAMYTGCSTRVRAAEGYTSPIPIRSGVKQGCPLSPIVFNLAIESVVRKAIGTRAGYTLHGQRFNILAYADDLALVAETPEGMRDLLRAVEDEARRIGLRFNPAKCASLHVIGGNGGRVLPSEFVLQDVPIRALGAGEPYEHLGIPTGFRVQQTPIATLEQLIECLRAVDASKLTPWQKLESVAVFILPRLDFLLRGSKLLRGPLKEVDKYIKRLAKSWMNLPQRASAEVVFLPPSRGGAGLLPLADLADALTIAHAFRLLTSPDAPVRELAWSSLREATFRKTGLSPSNVDLAAYLSGSREGRLQRDATSPGIWANARNAARRQGERLLIRWQWTSEREELSLRLRGSNGRPVILTPRSRSQVVHRVREAVAEFYLHTLLSKKDQGKVYEVSARSKVSNHFLRTGSFTRFADWRFIHRARLDVVPLNGNRRWGEGDKRCRRCGGGLETLPHVLCHCGPHSAAIQLRHNAVLDRLKNASRLPGVLRVNQRIEGVDGELASLRPDLVVRHEASRTIVMVDVAIPFENRAEAFKEARERKLAKYAPLAERLARDGYRVYVDAFLVGALGSWCPKNEAVLRLLRVSERYAAMMRRLMISDTIRWSRDIYVEHVSGVRQYRDPSSESTVGQPDAREGSMQNRIEASGDAGEATGTRPGYE

SEQ ID NO: 1697 - protein, 1757 aa, Cerceris rybyensis
MDKFLIEYPSVEGYSCAKCSELCADPRVLRSGGIYAGRGELVKHLKKAHGISAVAYKCGKCDFIGQGVYTLKSVKSHHAKVHGPVPVTPPRANSRINAADIGQLAPGTSASSESGGRVGDFAFSAGIFPISETVVTPLSAGGSPTILTVAAAQITSTVSVTAATATTSYAERISPAFRREETLNSTARQPATTYAAVTVAPPSAAALAVQATRNAIQRAMKPRLPKEAGPRSAGISVTRRPSGDGRPPARKSNAKLSPPKTTASTKTASTTSRPAQGNAPPRAAAAGRASGTSTTTPPSSRRSSPRHVGGVRNAGSTPPRAVRPRLSGGRTHRAGTAPPDDRRAPRAAGGRKSNEGRVIPATTCAPRGPGGRKGTERGERVTPPVLRSRRAASVPVVGNLPPRTKIVTRPVVTGPVKGALRVKSLGTSPPPPAATIERNLTGPSSPPTSGGEILPKLPVEAQTGVHSSPLRLPATTGLPFSRSPVGVAVNNTRPCTSAASVALTTVTITTSCCGAPIVSASVSAPARPIQGDRPAERALPVVREVVILRPASKKRTPADHQPSLAEEKEKDSEGEEQPWKVVAGRRARRTPPPLSPPELSARSVVSPPIRVSPPPPPVTEVNFPLLPPPGSRTGKHFRKNLDSAYSFRALNERRGSDSRTDEGSPEAAGITSATPTRRCPATRVPAGGRGHAPVSTGVSRSYAAGPQAPSSSPRSGRPDSGRVTTSQRGRSERPGGNPAGSNPSRAGASKRRATREELQQRDLLLEIANSVSCTEDLECMATEVAIYFQGCGENRGLTARSEAGTSRSGRSTAGDAGAAGARRGGSGRDTGRAGRSSRPTPSQGEGRRNPVREAARLQRLYRLNRSRAIREVFGGSSPFCQVQREKIQRYFEEVYGGGNVLSGSPPARNTGAPAVGAEGLAQPFTEKEVERRLGRMSNSAPGPDGVSYADLRMADPGSRLLTAVFNACYRLESVPASWKTSNTVLVFKKGEKDDLSNWRPLALGNTASKLFAALLADRLTGWAVTNGRLSWSQKGFLRCEGCYEHNFVLGEILADARRPRKQAVVAWLDLSNAFGSIPHSTISNALEAAGVHPRLHATWKAMYTGCSTRVRAAEGCTSPIPIRSGVKQGCPLSPIVFNLAIESVVRKAIGTRAGYTLHGQRFNILAYADDLALVAETPEGMRDLLRAVEDEARRIGLRFNPAKCASLHVIGGNGGRVLPSEFVLQDVPIRALGAGEPYEHLGIPTGFRVQQTPIATLEQLIECLRAVDASKLTPWQKLESVAVFILPRLDFLLRGSKILRGPLKEVDKYIKRLAKSWMNLPQRASAEVVFLPPSRGGAGLLPLADLADALTIAHAFRLLTSPDAPVRELAWSSLREAAFRKTGLSPSNVDLAAYLSGSREGRLQRDATSPGIWANARNAARRQGERLLIRWQWTSEREELSLRLRGSNGRPVILTPRSRSQVVHRVREAVAEFYLHTLLLKKDQGKVYEVSARSKVSNHFLRTGSFTRFADWRFIHRARLDVVPLNGNRRWGEGDKRCRRCGGGLETLPHVLCHCGPHSAAIQLRHNAVLDRLKNASRLPGVLRVNQRIEGVDGELASLRPDLVVRHEASRTIVMVDVAIPFENRAEALKEARERKLAKYAPLAERLARDGYRVYVDAFLVGALGSWCPKNEAVLRLLRVSERYAAMMRRLMISDTIRWSRDIYVEHVSGVRQYGDPSSESTVGQPDAREGSTQNRIEASDDAGEATGTRPGCERAS

SEQ ID NO: 1698 - protein, 1477 aa, Cerceris rybyensis
MRQRRPRLLGERRDLPPPPPPSSRRSSPRHVGGARNAGSTPPRAVRPRLSGERTRRAGTAPPADRRAPRAAGGRKSIDERATPATTCAPRGPGGRKGTEGGERISPPGLRSRRAASVPVVVKLPSRTSTVTRPVVTGPAKGALQVKPLGKSPPRPAATVERNLSGPSSPLTRGGEILPKLPVEAQTGVHSSPMRLPATTGLPFSRSPVGVAVNNTRPCTSAASVALTTATITTSCCGAPIVSAIVSAPARPIQGDRPAERALPVVREVVILRPALKKRTPADHQPSLAEEKEKDSEGEEQPWKVVAGRRARRTPPPLSPPELSARSVVSPPTRVSPPPPPVTEVNFPLLPPPGSRVGKYKCTNFDSAPSFRALNERRGSDSRTDEGSLEAAGVTSATPTRRCPATRVPAERRVHAPVSTGVSRSYAAGPQAPSSSPRSGRPDSGRVTTSQRGRSERPGGNPAGSNPSRAGASKRRATREELQQRDLLLEIANSVSCIEDLECMATEVAIYFQGCGENRGSTARSEAGTSRSGRSTAGDAGAAGARRGGSGRDTGRAGRPSRPTPSQGEGRRNPVREAARLQRLYRLNRSRAIREVFGGSSPFCQVQREKIQRYFEEVYGGGNVLSGSPPARNTGAPAVGAEGLAQPFTEKEVERRLGRMSNSAPGPDGVSYADLRMADPGSRLLTAVFNACYRLESVPAPWKTSNTVLVFKKGDKDDLSNWRPLALGNTASKLFAALLADRLTGWAVANGRLSWSQKGFLRCEGCYEHNFVLGEILADARRPRKQAVVAWLDLSNAFGSIPHSTISSALEAAGVHPRLHATWKAMYTGCSTRVRAAEGYTSPIPIRSGVKQGCPLSPIVFNLAIESVVRKAIGTRAGYTLHGQRFNILAYADDLALVAETPEGMRDLLRAVEDEARRIGLRFNPAKCASLHVIGGNGGRVLPSEFVLQDVPIRALGAGEPYEHLGIPTGFRVQQTPIATLEQLIECLRAVDASKLTPWQKLESVAVFILPRLDFLLRGSKILRGPLKEVDKYIKRLAKSWMNLPQRASAEAVFLPPSRGGAGLLPLADLADALTIAHAFRLLTSPDAPVRELAWSSLREATFRKTGLSPSNVDLAAYLSGSREGRLQRDATSPGIWANARNAARRQGERLLIRWQWTSEREELSLRLRGSNGRPVILTPRSRSQVVHRVREAVAEYYLHTLLLKKDQGKVYEVSARSKVSNHFLRTGSFTRFADWRFIHRARLDVVPLNGNRRWGEGDKRCRRCGGGLETLPHVLCHCGPHSAAIQLRHNAVLDRLRNASRLPGVLRVNQRIEGADGELASLRPDLVVRHEASRTIVMVDVAIPFENRAEAFKEARERKLAKYAPLAERLARDGYRVYVDAFLVGALGSWCPKNEAVLRLLRVSERYAAMMRRLMISDTIRWSRDIYVEHVSGVRQYGDPSLESAVGQPAALEGPLQNLIDASVDAGEATGTRPGYE

SEQ ID NO: 1699 - protein, 1755 aa, Cerceris rybyensis
MDKFLIEYPSVEGYSCAKCSELCADPRVLRSGGIYAGRGELVKHLKKAHGISAVAYKCGKCDFIGQGVYTLKSVKSHHAKVHGPVPVTPPRANSRINAADIGQLAPGTSASSESGGRVGDFAFSAGISSVSETVVTPLSAGGSPTILTVAAALTTSTVSVTAATAITSYAERISPASRREEILNSTARQPATTYAAVTVAPPSAAALAVQATRDAIKRAIKPRLPKEAGPRSAGISVTRRPSGEGRPPARKSNVKISPPKTTASTTTAPSTSRPAQGNAPPRAAAAGRAKGPSTTTPPSSRRSSPRHVGGVRNAGSTPPRAVRPRLSGERTRRAGTAPPADRRAPRAAGGRKSIEERATPATTCAPRGPGGRKGTEGGERISPPGLRSRRAASVPVVVKLPSRTSTVTRPVVTGPAKGALQVKPLGKSPPRPAATVERKNAGPSSPPTSGGEKLPKLPVEAQTGVHFPSMRLPATTGLPFSRSPVGVAVNNTRPCASAASVALTTATITTSCCGAPIVSAIVSAPARPIQGDRPAERALPVVREVVILRPASEKRTPDDHQPSLAEKKEMMDSEGGEQPWKVVAGRRARRTPPPQSPPEVSARSVVSPPIRVSPPPPPVTEVDFPLLPPPGSRVGKQIRKNIDSAPSFRALNERRGTGSRTDEGSPEAAGISSATPTRRCPTTRVPAEGRGHASVSTGVNRSYAAGPQAPSSSPRSGRPDSGRVTTSQRGRSERPGGNPAGSNPSRAGASKRRATREELQQRDLLLEIANSVSCIEDLECMATEVAIYFQGCGENRGSTARSEAGTSRPGRTAVGGAGAAGARRGGSGRDIGCAGRPSRPTPSQGEGRRNPVREAARLQRLYRLNRSRAIREVFGGSSPFCQVQREKIQRYFEEVYGGGNVLSGSPPARNTGAPAVGAEGLARPFTEKEVERRLGRMSNSAPGPDGVSYADLRMADPGSRLLTAVFNACYRLESVPASWKTSNTVLVFKKGEKDDLSNWRPLALGNTASKLFAALLADRLTDWAVTNGRLSWSQKGFLRCEGCYEHNFVLGEILADARRPRKQAVVAWLDLSNAFGSIPHSTISNALEAAGVHPRLHATWKAMYTGCSTRVRAAEGYTSPIPIRSGVKQGCPLSPIVFNLAIESVVRKAIGTRAGYTLHGQRFNILAYADDLALVAETPEGMRDLLRAVEDEARRIGLRFNPAKCASLHVIGGNGGRVLPSEFVLQDVPIRALGAGEPYEHLGIPTGFRVQQTPIATLEQLIECLRAVDASKLTPWQKLESVAVFILPRLDFLLRGSKILRGPLKEVDKYIKRLAKSWMNLPQRASAEVVFLPPSRGGAGLLPLADLADALTIAHAFRLLTSPDAPVRELAWSSLREATFRKTGLSPSNVDLAAYLSGSREGRLQRDATSPGIWANARNAARRQGERLLIRWQWTSEREELSLRLRGSNGRPVILTPRSRSQVVHRVREAVAEYYLHTLLLKKDQGKVYEVSARSKVSNHFLRTGSFTRFADWRFIHRARLDVVPLNGNRRWGEGDKRCRRCGGSLETLPHVLCHCGPHSAAIQLRHNAVLDRLKNASRLPGVLRVNQRIEGVEGELASLRPDLVVRHEASRTIVMVDVAIPFENRAEAFKEARERKLAKYAPLAERLARDGYRVYVDTFLVGALGSWCPKNEAVLRLLRVSERYAAMMRRLMISDTIRWSRDIYVEHVSGVRQYGDPSAESAVGQPAALEGPSQNRIGASVDAEEAMGTRPGNE

SEQ ID NO: 1700 - protein, 1757 aa, Cerceris rybyensis
MDKFLIEYPSVEGYSCAKCSELCADPRVLRSGGIYAGRGELVKHLKKAHGISAVAYKCGKCDFIGQGVYTLKSVKSHHAKVHGPVPVTPPRANSRINAADIGQLAPGTSASSESGGRVGDFAFSAGIFPISETVVTPLSAGGSPTILTVAAAQITSTVSVTAATATTSYAERISPAFRREETLNSTARQPATTYAAVTVAPPSAAALAVQATRNAIQRAMKPRLPKEAGPRSAGISVTRRPSGDGRPPARKSNAKLSPPKTTASTKTASTTSRPAQGNAPPRAAAAGRASGTSTTTPPSSRRSSPRHVGGVRNAGSTPPRAVRPRLSGGRTHRAGTAPPDDRRAPRAAGGRKSNEGRVIPATTCAPRGPGGRKGTERGERVTPPVLRSRRAASVPVVGNLPPRTKIVTRPVVTGPVKGALRVKSLGTSPPPPAATIERNLTGPSSPPTSGGEILPKLPVEAQTGVHSSPLRLPATTGLPFSRSPVGVAVNNTRPCTSAASVALTTVTITTSCCGAPIVSASVSAPARPIQGDRPAERALPVVREVVILRPASKKRTPADHQPSLAEEKEKDSEGEEQPWKVVAGRRARRTPPPLSPPELSARSVVSPPIRVSPPPPPVTEVNFPLLPPPGSRTGKHFRKNLDSAYSFRALNERRGSDSRTDEGSPEAAGITSATPTRRCPATRVPAGGRGHAPVSTGVSRSYAAGPQAPSSSPRSGRPDSGRVTTSQRGRSERPGGNPAGSNPSRAGASKRRATREELQQRDLLLEIANSVSCTEDLECMATEVAIYFQGCGENRGLTARSEAGTSRSGRSTAGDAGAAGARRGGSGRDTGRAGRSSRPTPSQGEGRRNPVREAARLQRLYRLNRSRAIREVFGGSSPFCQVQREKIQRYFEEVYGGGNVLSGSPPARNTGAPAVGAEGLAQPFTEKEVERRLGRMSNSAPGPDGVSYADLRMADPGSRLLTAVFNACYRLESVPASWKTSNTVLVFKKGEKDDLSNWRPLALGNTASKLFAALLADRLTDWAVTNGRLSWSQKGFLRCEGCYEHNFVLGEILADARRPRKQAVVAWLDLSNAFGSIPHSTISNALEAAGVHPRLHATWKAMYTGCSTRVRAAEGCTSPIPIRSGVKQGCPLSPIVFNLAIESVVRKAIGTRAGYTLHGQRFNILAYADDLALVAETPEGMRDLLRAVEDEARRIGLRFNPAKCASLHVIGGNGGRVLPSEFVLQDVPIRALGAGEPYEHLGIPTGFRVQQTPIATLEQLIECLRAVDASKLTPWQKLESVAVFILPRLDFLLRGSKILRGPLKEVDKYIKRLAKSWMNLPQRASAEVVFLPPSRGGAGLLPLADLADALTIAHAFRLLTSPDAPVRELAWSSLREAAFRKTGLSPSNVDLAAYLSGSREGRLQRDATSPGIWANARNAARRQGERLLIRWQWTSEREELSLRLRGSNGRPVILTPRSRSQVVHRVREAVAEFYLHTLLLKKDQGKVYEVSARSKVSNHFLRTGSFTRFADWRFIHRARLDVVPLNGNRRWGEGDKRCRRCGGGLETLPHVLCHCGPHSAAIQLRHNAVLDRLKNASRLPGVLRVNQRIEGVDGELASLRPDLVVRHEASRTIVMVDVAIPFENRAEALKEARERKLAKYAPLAERLARDGYRVYVDAFLVGALGSWCPKNEAVLRLLRVSERYAAMMRRLMISDTIRWSRDIYVEHVSGVRQYGDPSSESTVGQPDAREGSTQNRIEASDDAGEATGTRPGCERAS

SEQ ID NO: 1701 - protein, 1286 aa, Cerceris rybyensis
MRLPATTGLPFSRSPVGVAVNNTRPCTSAASVALTTATITTSCCGAPIVSAIVSAPARPIQGDRPAERALPVVREVVVLRPASKKRTPADHQPSLAEEKETMDSEGGEQPWKVVAGRRARRTPPPQSPPEMSARSVLSPPIRVSPPPPPVTEVNFPLLPPPGSRVGKLKEKNGDSAPFFRALNERRGSDSRTDEGSPEAAGITSATPTRRCPTTRVPAERRVHAPVSTGVSRSYAAGPQAPSSSPRSGRPDSGRVTTSQRGRSERPGGNPAGSNPSRAGASKRRATREELQQRDLLLEIANSVSCIEDLECMATEVAIYFQGCGENRGSTARSEAGTSRSGRTAVGDAGAAGARRGGSGRDTGRAGRPSRPTPSQGEGRRNPVREAARLQRLYRLNRSRAIREVFGGSSPFCQVQREKIQRYFEEVYGGGNVLSGSPPARNTGAPVVGAEGLAQQFTEKEVERRLGRMSNSAPGPDGVSYADLRMADPGSRLLTAVFNACYRLESVPASWKTSNTVLVFKKGDKDDLSNWRPLALGNTASKLFVALLADRLTDWAVTNGRLSWSQKGFLRCEGCYEHNFVLGEILADARRPRKQAVVAWLDLSNAFGSIPHSTISNALEAAGVHPRHHATWKAMYTGCSTRVRAAEGYTSPIPIRSGVKQGCPLSPIVFNLAIESVVRRAIGTRAGYTLHGQRFNILAYADDLALVAETPEGMRDLLRAVEDEARRIGLRFNPAKCASLHVIGGNGGRVLPSEFVLQDVPIRALGAGEPYEHLGIPTGFRVQQTPIATLEQLIECLRAVDASKLTPWQKLESVAVFILPRLDFLLRGSKLLRGPLKEVDKYIKRLAKSWMNLPQRASAEVVFLPPSRGGAGLLPLADLADALTIAHAFRLLTSPDAPVRELAWSSLREATFRKTGLSPSNVDLAAYLSGSREGRLQRDATSPGIWANARNAARRQGERLLIRWQWTSEREELSLRLRGSNGRPVILTPRSRSQVVHRVREAVAEFYLHTLLLKKDQGKVYEVSARSKVSNHFLRTGSFTRFADWRFIHRARLDVVPLNGNRRWGEGDKRCRRCGGGLETLPHVLCHCGPHSAAIQLRHNAVLDRLKNASRLPGVLRVNQRIEGVDGELASLRPDLVVRHEASRTIVMVDVAIPFENRAEAFKEARERKLAKYAPLAERLARDGYRVYVDAFLVGALGSWCPKNEAVLRLLRVSERYAAMMRRLMISDTIRWSRDIYVEHVSGVRQYGDPSSESAVGQLAALEGPSQNCIGASVDAEEATGTRPGCE

SEQ ID NO: 1702 - protein, 1755 aa, Cerceris rybyensis
MDKFLVAYPCVDGYSCEKCSELCADPRMLRSGGVYAGRGELVKHLKKAHGISAVAYKCGKCDFIGQGVYTLKSVKSHYAKVHGPVPVTPPRACSRINAADIGSLAPGASASSEAGGRVGDLAISAGIFPISETVVTPLSAGGSPTILTVAAAQTTSTVSVTAATAITSSAERISPAFRRVEISNLTARQPATTYAAVTTAPPSAAALAVQATRDAIKRATKPRLPKEAGPRSAGISVTRRPSGEGRPPARISTSKLSPPKKTTSTSTAPTTSRPAQGNAPPRAAAAGRAKGPSTTTPPSSRRSSPRHVGGARNAGSTPPRAVRPRLSGERTRRAGTAPPADRRAPRAAGGRKSIEERATPATTCAPRGPGGRKGSIGGERISPPGLRSRRAASVPVVVKLPSRTSTVTRPVVTGPAKGALQVKPLGKSPPRPAATVERKNAGPSSPPTSGGEKLPKLPVEAQADVRISPMRLPATTGLPFSRSPVGVAVNNTRPCTSAASVALTTATITTSCCGAPIVSAIVSAPARPIQGDRPAERALPVVREVVILRPASKKRTPADHQPSLAEEKETMDSEGGEQPWKVVAGRRARRTPPPQSPPEMSARSVLSPPIRVSPPPPPVTEVNFPLLPPPGSRVGKLKEKNGDSAPFFRALNERRGSDSRTDEGSPEAAGKTSATPTRRCPATRVPAERRVHAPVSTGVSRSYAAGPQAPSSSPRSGRPDSGRVTTSQRGRSERPGGNPAGSNPSRAGASKRRATREELQQRDLLLEIANSVSCIEDLECMATEVAIYFQGCGENRGSTARSEAGTSRPGRSMAGDAGAAGARRGGSGRDTGRAGRPSRPTPSQGEGRRNPVREAARLQRLYRLNRSRAIREVFGGSSPFCQVQREKIQRYFEEVYGGGNVLSGSPPARNTGAPVVGAEGLAQQFTEKEVERRLGRMSNSAPGPDGVSYADLRMADPGSRLLTAVFNACYRLESVPASWKTSNTVLVFKKGDKDDLSNWRPLALGNTASKLFAALLADRLTDWAVTNGRLSWSQKGFLRCEGCYEHNFVLGEILADARRPRKQAVVAWLDLSNAFGSIPHSTISNALEAAGVHPRLHATWKAMYTGCSTRVRAAEGYTSPIPIRSGVKQGCPLSPIVFNLAIESVVRKAIGTRAGYTLHGQRFNILAYADDLALVAETPEGMRDLLRAVEDEARRIGLRFNPAKCASLHVIGGNGGRVLPSEFVLQDVPIRALGAGEPYEHLGIPTGFRVQQTPIATLEQLIECLRAVDASKLTPWQKLESVAVFILPRLDFLLRGSKILRGPLKEVDKYIKRLAKSWMNLPQRASAEAVFLPPSRGGAGLLPLADLADALTIAHAFRLLTSPDAPVRELAWSSLREATFRKTGLSPSNVDLAAYLSGSREGRLQRDATSPGIWANARNAARRQGERLLIRWQWTSEREELSLRLRGSNGRPVILTPRSRSQVVHRVREAVAEFYLHTLLLKKDQGKVYEVSARSKVSNHFLRTGSFTRFADWRFIHRARLDVVPLNGNRRWGEGDKRCRRCGGGLETLPHVLCHCGPHSAAIQLRHNAVLDRLKNASRLPGVLRVNQRIEGVDGELASLRPDLVVRHEASRTIVMVDVAIPFENRAEAFKEARERKLAKYAPLAERLARDGYRVYVDAFLVGALGSWCPKNEAVLRLLRVSERYAAMMRRLMISDTIRWSRDIYVEHVSGVRQYRDPSSESTVGQPAALEGPSQNRIGASVDAEEATGTRLENE

SEQ ID NO: 1703 - protein, 1754 aa, Cerceris rybyensis
MDKFLIEYPSVEGYSCAKCSELCADPRVLRSGGIYAGRGELVKHLKKAHGISAVAYKCGKCDFIGQGVYTLKSVKSHHAKVHGPVPVTPPRANSRINAADIGQLAPGTSASSESGGRVGDFAFSAGISSVSETVVTPLSAGGSPTILTVAAALTTSTVSVTAATAITSYAERISPAFRREEILNSTARQPATTYAAVTVAPPSAAALAVQATRDAIKRAIKPRLPKEAGPRSAGISVTRRPSGEGRPPARKSNVKISPPKTTASTTTAPSTSRPAQGNAPPRAAAAGRAKGPSTTTPPSSRRSSPRHVGGVRNAGSTPPRAVRPRLSGERTRRAGTAPPADRRAPRAAGGRKSIEERATPATTCAPRGPGGRKGTEGGERISPPGLRSRRAASVPVVVKLPSRTSTVTRPVVTGPAKGALQVKSLGKSPPRPAATVERKNAGPSSPPTSGGEKLPKLPVEAQADVRISPMRLPATTGLPFSRSPVGVAVNNTRPCTSAASVALTTATVTTSCCGAPIVSAIVSAPARPIQGDRPAERALPVVREVVILRPASKKRTPADHQPSLAEEVEMDSEGGEQPWKVVAGRRARRTPPPQSPPEMSARSVVSPPIRVSPPPPPVTEVTFPLLPPPGSRGGKHFRKNFDSAPFFRALNERRGSDSRTDEGSPEAVGITSATPTRRCPATRVPAEGRGHAPVSTGVSRSYAAGPQAPSSSPRSGRPDSGRVTTSQRGRSERPGGNPAGSNPSRAGASKRRATREELQQRDLLLEIANSVSCIEDLECMATEVAIYFQGCGENRGSTARSEAGTSRSGRTAVGDAGAAGARRGGSGRDTGRAGRPSRPTPSQGEGRRNPVREAARLQRLYRLNRSRAIREVFGGSSPFCQVQREKIQRYFEEVYGGGNVLSGSPPARNTGAPVVGAEGLAQLFTEKEVERRLGRMSNSAPGPDGVSYADLRMADPGSRLLTAVFNACYRLESVPASWKTSNTVLVFKKGEKDDLSNWRPLALGNTASKLFAALLADRLTDWAVTNGRLSWSQKGFLRCEGCYEHNFVLGEILADARRPRKQAVVAWLDLSNAFGSIPHSTISNALEAAGVHPRLHATWKAMYTGCSTRVRAAEGYTSPIPIRSGVKQGCPLSPIVFNLAIESVVRKAIGTRAGYTLHGQRFNILAYADDLALVAETPEGMRDLLRAVEDEARRIGLRFNPAKCASLHVIGGNGGRVLPSEFVLQDVPIRALGAGEPYEHLGIPTGFRVQQTPIATLEQLIECLRAVDASKLTPWQKLESVAVFILPRLDFLLRGSKILRGPLKEVDKYIKRLAKSWMNLPQRASAEVVFLPPSRGGAGLLPLADLADALTIAHAFRLLTSPDAPVRELAWSSLREATFRKTGLSPSNVDLAAYLSGSREGRLQRDATSPGIWANARNAARRQGERLLIRWQWTSEREELSLRLRGSNGRPVILTPRSRSQVVHRVREAVAEFYLHTLLLKKDQGKVYEVSARSKVSNHFLRTGSFTRFADWRFIHRARLDVVPLNGNRRWGEGDKRCRRCGGGLETLPHVLCHCGPHSAAIQLRHNAVLDRLKNASRLPGVLRVNQRIEGVDGELASLRPDLVVRHEASRTIVMVDVAIPFENRAEAFKEARERKLAKYAPLAERLARDGYRVYVDAFLVGALGSWCPKNEAVLRLLRVSERYAAMMRRLMISDTIRWSRDIYVEHVSGVRQYGGPSAESAVGQPAALEGPSQNCIGASVDAEEATGTRPGSE

SEQ ID NO: 1704 - protein, 1755 aa, Cerceris rybyensis
MDKFLVAYPCVEGYSCAKCSELCADPRVLRSGGVYAGRGELVKHLKKAHGISAVAYRCGKCDFIGQGVYTLKSVKSHYAKVHGPVPVTPPRACSRINAADIGSLAPGASASSETGGRVGDFAISAGILPISETVVTPLSAGGSPTILTVAAAQTTSTVSVTAATAIINVAERISPASRREEILNSTARQPATTYAAVTVAPPSAAALAVQATRDAIKRAIKPRLPKEAGPRSAGISVTRRPSGDGRPPARTSILKLSPPKTTASTTTAPTTSRPAQGNAPPRAAAAGRAKGPSTTTPPSSRRSSPRHVGGARNAGSTPPRAVRPRLSGERMRRAGTAPPADRRAPRAAGGRKSIEERATPATTCAPRGPGGRKGTEGGERISPPVSRSRRAASVPVVVQLPPRTKIVTRPVVTGPVKGALRVKSLGTSPPRPAAAIERKNSGPSSPLTRGGEILPKLPVEAQTGVHISPMRLPATTGLPFSRSPVGVAVNNTRPCTSAASVALTTATITTSCCGAPIVSAIVSAPARPIQGDRPAERALPVVREVVILRPASKKRTPADHQPSLAEEKKVEDSEGEEQPWKVVAGRRARRTPPPQSPPEMSARSVFSPPIRVSPPPPPVTEVNFPLLPPPGSRTGKHVKINIDSAPSFRALNERRGSDSRTDEGSPEAAGKTSATPTRRCPATRVPAERRVHAPVSTGVSRSYAAGPQAPSSSPRSGRPDSGRVTTSQRGRSDRPGGNPAGSNPSRAGASKRRATREELQQRDLLLEIANSVSCIEDLECMATEVAIYFQGCGENRGSTARSEAGTSRSGRSTAGDAGAAGARRGGSGRDTGRAGRPSRPTPSQGEGRRNPVREAARLQRLYRLNRSRAIREVFGGSSPFCQVQREKIQRYFEEVYGGGNVLSGSPPARNTGAPVVGAEGLAQLFTEKEVERRLGRMSNSAPGPDGVSYADLRMADPGSRLLTAVFNACYRLESVPASWKTSNTVLVFKKGEKDDLSNWRPLALGNTASKLFAALLADRLTDWAVTNGRLSWSQKGFLRCEGCYEHNFVLGEILADARRPRKQAVVAWLDLSNAFGSIPHSTISNALEAAGVHPRLHATWKAMYTGCSTRVRAAEGYTSPIPIRSGVKQGCPLSPIVFNLAIESVVRKAIGTRAGYTLHGQRFNILAYADDLALVAETPEGMRDLLRAVEGEARRIGLRFNPAKCASLHVIGGNGGRVLPSEFVLQDVPIRALGAGEPYEHLGIPTGFRVQQTPIATLEQLIECLRAVDASKLTPWQKLESVAVFILPRLDFLLRGSKILRGPLKEVDKYIKRLAKSWMNLPQRASAEAVFLPPSRGGAGLLPLADLADALTIAHAFRLLTSPDAPVRELAWSSLREATFRKTGLSPSNVDLAAYLSGSRERRLQRDATSPGIWANARNAARRQGERLLIRWQWTSEREELSLRLRGSNGRPVILTPRSRSQVVHRMREAVAEFYLHTLLLKKDQGKVYEVSARSKVSNHFLRTGSFTRFADWRFIHRARLDVVPLNGNRRWGEGDRRCRRCGGGLETLPHVLCHCGPHSAAIQLRHNAVLDRLKNASRLPGVLRVNQRIEGVDGELASLRPDLVVRHEASRTIVMVDVAIPFENRAEAFKEARERKLAKYAPLAERLARDGYRVYVDAFLVGALGSWCPKNEAVLRLLRVSERYAAMMRRLMISDTIRWSRDIYVEHVSGVRQYGDPPSESAVGQLAAPEGPSQNCIGASVDAEEAMGTRPGYE

SEQ ID NO: 1705 - protein, 1754 aa, Cerceris rybyensis
MDKFLIEYPSVEGYSCAKCSELCADPRVLRSGGIYAGRGELVKHLKKAHGISAVAYKCGKCDFIGQGVYTLKSVKSHHAKVHGPVPVTPPRANSRINAADIGQLALGPSASSETGGRVGDFALSAGISSVSETVVTPLSAGGSPTILTVAAAQTTLTVSVTAAAAISSAAERISPAFRREEILNSTARQPATTYAAVTIAPPSAAALAVQATRDAIKRASKPRLPKEAASRSAGISVTRRPSDEGRPPARISTSKISPPKKSSSTSTAPTTSRPAQGNAPPRAAAAGRAKGPSTTTPPSSRRSSPRHVGGARNAGSTPPRAVRPRLSGERTRRAGTAPPADRRAPRAAGGRKSIEERATPATTCAPRGPGGRKGSIGGERISPPGLRSRRAASVPVVVKLPSRTSTVTRPAVTGPAKGALQVKPLGKSPPRPAATVERKNAGPSSPPTSGGEKLPKVPVEAQTGVHFPSMRLPATTGLPFSRSPVGVAVNNTRPCTSAASVALTTATVTTSCCGAPIVSAIVSAPARPIQGDRPAERALPVVREVVILRPASKKRTPADHQPSLAEEVEMDSEGGEQPWKVVAGRRARRTPPPQSPPELSARSGFSPPIRVSPPPPPVAEVTFPLLPPPGSRVGKHIRGNIDSAPSFRALNERRGSGSRTDEGSPEAAGVTSATPTRRCPTTRVPAERRVHAPVSTGVSRSYAAGPQAPSSSPRSGRPDSGRVTTSQRGRSERPGGNPAGSNPSRAGASKRRATREELQQRDLLLEIANSVSCTEELECMATEVAIYFQGCGENRGSTARSEAGTSRSGRTAVGDAGAAGARRGGSGRDTGRAGRPSRPTPSQGEGRRNPVREAARLQRLYRLNRSRAIREVFGGSSPFCQVQREKIQRYFEEVYGGGNVLSGSPPARNTGAPAVGAEGLAQPFTEKEVERRLGRMSNSAPGPDGVSYADLRMADPGSRLLTAVFNACYRLESVPAPWKTSNTVLVFKKGDKDDLSNWRPLALGNTASKLFAALLADRLTGWAVANGRLSWSQKGFLRCEGCYEHNFVLGEILADARRPRKQAVVAWLDLSNAFGSIPHSTISNALEAAGVHPRLHATWKAMYTGCSTRVRAAEGYTSPIPIRSGVKQGCPLSPIVFNLAIESVVRKAIGTRAGYTLHGQRFNILAYADDLALVAETPEGMRDLLRAVEDEARRIGLRFNPAKCASLHVIGGNGGRVLPSEFVLQDVPIRALGAGEPYEHLGIPTGFRVQQTPIATLEQLIECLRAVDASKLTPWQKLESVAVFILPRLDFLLRGSKILRGPLKEVDKYIKRLAKSWMNLPRRASAEAVFLPPSRGGAGLLPLADLADALTIAHAFRLLTSPDAPVRELAWSSLREATFRKTGLSPSNVDLAAYLSGSREGRLQRDATSPGIWANARNAARRQGERLLIRWQWTSEREELSLRLRGSNGRPVILTPRSRSQVVHRVREAVAEYYLHTLLLKKDQGKVYEVSARSKVSNHFLRTGSFTRFADWRFIHRARLDVVPLNGNRRWGEGDKRCRRCGGGLETLPHVLCHCGPHSAAIQLRHNAVLDRLKNASRLPGVLRVNQRIEGVDGELASLRPDLVVRHEASRTIVMVDVAIPFENRAEAFKEARERKLAKYAPLAERLARDGYRVYVDAFLVGALGSWCPKNEAVLRLLRVSERYAAMMRRLMISDTIRWSRDIYVEHVSGVRQYRDPSSESTVGQPDAREGPSQNSIEASGDAEEATGTRPGCE

SEQ ID NO: 1706 - protein, 1755 aa, Cerceris rybyensis
MDKFLVAYPCVEGYSCAKCSELCADPRVLRSGGVYAGRGELVKHLKKAHGISAVAYRCGKCDFIGQGVYTLKSVKSHYAKVHGPVPVTPPRACSRINAADIGSLAPGASASSETGGRVGDFAISAGILPISETVVTPLSAGGSPTILTVAAAQTTSTVSVTAATAIINVAERISPASRRGEILNSTARQPATTYAAVTVAPPSAAALAVQATRDAIKRAIKPRLPKEAGPRSAGISVTRRPSGDGRPPARTSILKLSPPKTTASTTTAPTTSRPAQGNAPPRAAAAGRAKGPSTTTPPSSRRSSPRHVGGARNAGSTPPRAVRPRLSGERMRRAGTAPPADRRAPRAAGGRKSIEERATPATTCAPRGPGGRKGTEGGERISPPVSRSRRAASVPVVVQLPPRTKIVTRPVVTGPVKGALRVKSLGTSPPRPAAAIERKNSGPSSPLTRGGEILPKLPVEAQTGVHSSPMRLPATTGLPFSRSPVGVAVNNTRPCTSAASVALTTATITTSCCGAPIVSAIVSAPARPIQGDRPAERALPVVREVVVLRPASKKRTPADHQPSLAEEKKVEDSEGEEQPWKVVAGRRARRTPPPQSPPEMSARSVFSPPTRVSPPPPPVTEVNFPLLPPPGSRTGKHVKINIDSAPSFRALNERRGSDSRTDEGSPEAAGKTSATPTRRCPATRVPAERRVHAPVSTGVSRSYAAGPQAPSSSPRSGRPDSGRVTTSQRGRSERPGGNPAGSNPSRAGASKRRATREELQQRDLLLEIANSVSCIEDLECMATEVAIYFQGCGENRGSTARSEAGTSRSGRSTAGDAGAAGARRGGSGRDTGRAGRPSRPTPSQGEGRRNPVREAARLQRLYRLNRSRAIREVFGGSSPFCQVQREKIQRYFEEVYGGGNVLSGSPPARNTGAPVVGAEGLAQLFTEKEVERRLGRMSNSAPGPDGVSYADLRMADPGSRLLTAVFNACYRLESVPASWKTSNTVLVFKKGEKDDLSNWRPLALGNTASKLFAALLADRLTDWAVTNGRLSWSQKGFLRCEGCYEHNFVLGEILADARRPRKQAVVAWLDLSNAFGSIPHSTISNALEAAGVHPRLHATWKAMYTGCSTRVRAAEGYTSPIPIRSGVKQGCPLSPIVFNLAIESVVRKAIGTRAGYTLHGQRFNILAYADDLALVAETPEGMRDLLRAVEGEARRIGLRFNPAKCASLHVIGGNGGRVLPSEFVLQDVPIRALGAGEPYEHLGIPTGFRVQQTPIATLEQLIECLRAVDASKLTPWQKLESVAVFILPRLDFLLRGSKILRGPLKEVDKYIKRLAKSWMNLPQRASAEAVFLPPSRGGAGLLPLADLADALTIAHAFRLLTSPDAPVRELAWSSLREATFRKTGLSPSNVDLAAYLSGSRERRLQRDATSPGIWANARNAARRQGERLLIRWQWTSEREELSLRLRGSNGRPVILTPRSRSQVVHRMREAVAEFYLHTLLLKKDQGKVYEVSARSKVSNHFLRTGSFTRFADWRFIHRARLDVVPLNGNRRWGEGDKRCRRCGGGLETLPHVLCHCGPHSAAIQLRHNAVLDRLKNASRLPGVLRVNQRIEGVDGELASLRPDLVVRHEASRTIVMVDVAIPFENRAEAFKEARERKLAKYAPLAERLARDGYRVYVDAFLVGALGSWCPKNEAVLRLLRVSERYAAMMRRLMISDTIRWSRDIYVEHVSGVRQYGDPSLESAVGQPDACEGSMQSRIEASDDAGEATGTRPGCE

SEQ ID NO: 1707 - protein, 1754 aa, Cerceris rybyensis
MDKFLVAYPCVDGYSCEKCSELCADPRMLRSGGVYAGRGELVKHLKKVHGISAVAYKCGKCDFIGQGVYTLKSVKSHHAKVHGPVPVTPPRANSRINAADIGSLAPGTSASSETGGRVGDFAISAGISSVSETVVTPLSAGGSPTILTVAAAQITSTVSVTAATATTSYAERISPAFRREEILNSTARQPATTYAAVTVAPPSAAALAVQATRDAIKRASKPRLPKEAASRSAGISATRRPSGEGRPPARVLNAKISPPKKSTSITTAPTTSRPAQGNAPPRVAAAGRAKGPSTTTPPSSRRSSPRHVGGARNAGSTPPRAVRPRLSGERTRRAGTAPPADRRAPRAAGGRKSTEERATPATTCAPRGPGGRKGTEGGERISPPVSRSRRAASVPVVVQLPPRTKIVTRPVVTGPVKGALRVKSLGTSPPRPAATIERKNSGPSSPLTRGGEILPKLPVEAQTGVHSSPMRLTATTGLPFSRSPVGVAVNNTRPCTSAASVALTTATITTSCCGAPIVSAIVSAPARPIQGDRPAERALPVVREVVILRPASKKRTPADHQPSLAEEIEMDSEGGEQPWRVVAGRRARRTPPPQSPPEMSARSVFSPPTRVSPPPPPVTEVNFPLLPPPGSRTGKHVKINIDSAPSFRALNERRGTGSRTDEGSPEAAGISSATPTRRCPTTRVPAEGRVHAPVSTGVSRSYAAGPQAPSSSPRSGRPDSGRVTTSQRGRSERPGGNPAGSNPSRAGASKRRATREELQQRDLLLEIANSVSCIEDLECMATEVAIYFQGCGENRGSTARSEAGTSRSGRSTAGDAGAAGARRGGSGRDTGRAGRPSRPTPSQGEGRRNPVREAARLQRLYRLNRSRAIREVFGGSSPFCQVQREKIQRYFEEVYGGGNVLSGSPPARNTGAPVVGAEGLAQQFTEKEVERRLGRMSNSAPGPDGVSYADLRMADPGSRLLTAVFNACYRLESVPASWKTSNTVLVFKKGDKDDLSNWRPLALGNTASKLFAALLADRLTDWAVTNGRLSWSQKGFLRCEGCYEHNFVLGEILADARRPRKQAVVAWLDLSNAFGSIPHSTISSALEAAGVHPRLHATWKAMYTGCSTRVRAAEGYTSPIPIRSGVKQGCPLSPIVFNLAIESVVRKAIGTRAGYALHGQRFNILAYADDLALVAETPEGMRDLLRAVEDEARRIGLRFNPAKCASLHVIGGNGGRVLPSEFVLQDVPIRALGAGEPYEHLGIPTGFRVQQTPIATLEQLIECLRAVDASKLTPWQKLESVAVFILPRLDFLLRGSKILRGPLKEVDKYIKRLAKSWMNLPQRASAEVVFLPPSRGGAGLLPLADLADALTIAHAFRLLTSPDAPVRELAWSSLREATFRKTGLSPSNVDLAAYLSGSREGRLQRDATSPGIWANARNAARRQSERLLIRWQWTSEREELSLRLRGSNGRPVILTPRSRSQVVHRVREAVAEFYLHTLLLKKDQGKVYEASARSKVSNHFLRTGSFTRFADWRFIHRARLDVVPLNGNRRWGEGDKRCRRCGGGLETLPHVLCHCGPHSAAIQLRHNAVLDRLKNASRLPGVLRVNQRIEGVDGELASLRPDLVVRHEASRTIVMVDVAIPFENRAEAFKEARERKLAKYAPLAERLARDGYRVYVDAFLVGALGSWCPKNEAVLRLLRVSERYAAMMRRLMISDTIRWSRDIYVEHVSGVRQYGDPSVESAVGQPAAREGPMRNHIEASVDAEEATGTRPGSE

SEQ ID NO: 1708 - protein, 1755 aa, Cerceris rybyensis
MDKFLIEYPSVEGYSCAKCSELCADPRVLRSGGIYAGRGELVKHLKKAHGISAVAYKCGKCDFIGQGVYTLKSVKSHHAKVHGPVPVTPPRANSRINAADIGQLAPGTSASSESGGRVGDFAFSAGISSVSETVVTPLSAGGSPTILTVAAALTTSTVSVTAATAITSYAERISPASRREEILNSTARQPATTYAAVTVAPPSAAALAVQATRDAIKRAIKPRLPKEAGPRSAGISVTRRPSGEGRPPARKSNVKISPPKTTASTTTAPSTSRPAQGNAPPRAAAAGRAKGPSTTTPPSSRRSSPRHVGGVRNAGSTPPRAVRPRLSGERTRRAGTAPPADRRAPRAAGGRKSIEERATPATTCAPRGPGGRKGTEGGERISPPGLRSRRAASVPVVVKLPSRTSTVTRPVATGPAKGALQVKPLGKSPPRPAATVERNLSGPSSPPTRGGEILPKLPVEAQTGVHFPSMRLPATTGLPFSRSPVGVAVNNTRPCTSAASVALTTATITTSCCGAPIVSAIVSAPARPIQGDRPAERALPVVREVVILRPASKKRTPADHQPSLAEEREKTDSEGEEQPWRVVAGRRARRTPPPPSPPELSARSGFSPPIRVSPPPPPVTEVNFPLLPPPGSRTGEHVKINIDSAPSFRALNERRGSDSRTDEGSPEAAGKTSATPTRRCPATRVPAERRVHAPVSTGVSRSYAAGPQAPSSSPRSGRPDSGRVTTSQRGRSERPGGNPAGGNPSRAGASKRRATREELQQRDLLLEIANSVSCIEDLECMAAEVAIYFQGCGENRGSTARSEAGTNRSGRSAARDAGAAGARRGGPGRDTGRSGRPSRPTPSQGEGRRNPVREAARLQRLYRLNRSRAIREVFGGSSPFCQVQREKIQRYFEEVYGGGNDLSGSPPARNTGAPAVGAEGLAQPFTEKEVERRLGRMSNSAPGPDGVSYADLRMADPGSRLLTAVFNACYRLESVPASWKTSNTVLVFKKGEKDDLSNWRPLALGNTASKLFAALLADRLTDWAVTNGRLSWSQKGFLRCEGCYEHNFVLGEILADARRPRKQAVVAWLDLSNAFGSIPHSTISSALEAAGVHPRLHATWKAMYTGCSTRVRAAEGYTSPIPIRSGVKQGCPLSPIVFNLAIESVVRKAIGTRAGYTLHGQRFNILAYADDLALVAETPEGMRDLLRAVEDEARRIGLRFNPAKCASLHVIGGNGGRVLPSEFVLQDVPIRALGAGEPYEHLGIPTGFRVQQTPIATLEQLIECLRAVDASKLTPWQKLESVAVFILPRLDFLLRGSKLLRGPLKEVDKYIKRLAKSWMNLPQRASAEVVFLPPSRGGAGLLPLADLADALTIAHAFRLLTSPDAPVRELAWSSLREATFRKTGLSPSNVDLAAYLSGSREGRLQRDATSPGIWANARNAARRQGERLLIRWQWTSEREELSLRLRGSNGRPVILTPRSRSQVVHRVREAVAEFYLHTLLLKKDQGKVYEVSARSKVSNHFLRTGSFTRFADWRFIHRARLDVVPLNGNRRWGEGDKRCRRCGGGLETLPHVLCHCGPHSAAIQLRHNAVLDRLKNASRLPGVLRVNQRIEGVDGELASLRPDLVVRHEASRTIVMVDVAIPFENRAEAFKEARERKLAKYAPLAERLARDGYRVYVDAFLVGALGSWCPKNEAVLRLLRVSERYAAMMRRLMISDTIRWSRDIYVEHVSGVRQYGDPSAESAVGQPDAREGSMQSRIEASDDAGEATGTRPGCE

SEQ ID NO: 1709 - protein, 1755 aa, Cerceris rybyensis
MDKFLIEYPSVEGHSCAKCSELCADPRVLRSGGIYAGRGELVKHLKKAHGISAVAYRCGKCDFIGQGVYTLKSVKSHHAKVHGPVPVTPPRANSRINAADIGSLAPGASASSETGGRVGDFANSAGILPISETVVTPLSAGGSPTILTVAAAQTTSTVSVTAATAIINVAERISPAFRREEILNLTARQPATTYAAVTIAPPSAAALAVQATRDAIKRATKPRLPKEAGPRSAGISVTRRPSGEGRPPARTSTSKLSPPKTTASTRTAPTTSRPAQGNAPPRAAAAGRASGTSTTTPPSSRRSSPRHVGGGRNAGSTPPRAIRPRLSGERMRRAGTAPPADRRAPRAAGGRKSNEGRVIPATTCAPRGPGGRKGTEGGERISPPGLRSRRAASVPVVVKLPPRTKIVTRPVVTGPEKGALQVKPLGTSPPRPAATIERISSGPSSPPTSGGEILPKVPVEAQTGVHFSPMRLPATTGLPFSRSPVGVAVNNTRPCTSAASVALTTVTITTSCCGAPLVSASVSVPARPIQGDRPAERALPVVREVVILRPASKKITPTDQQSSLALEKEKLDSEGEEQPWKVVAGRRARRTPPPLSPPELSARSVISPPTRVSPPPPPVTEVNFPLLPPPGSRMGKPTRKNFDSAPSFRALNERRGSDSRTDEGSPEAAGVTSATPTRRCPTTRVPAERRVHAPVSTGVSRSYAAGPQAPSPSPRSGRPDSGRVTTSQRGRSERPGGNPAGSNPSRAGASKRRATREELQQRDLLLEIANSVSCIEDLECMATEVAIYFQGCGENRGSTARSEAGTSRSGRSTAGDAGAAGARRGGSGRDTGRAGRPSRPTPSQGEGRRNPVREAARLQRLYRLNRSRAIREVFGGSSPFCQVQREKIQRYFEEVYGGGNVLSGSPPARNTGAPVVGAEGLAQLFTEKEVERRLGRMSNSAPGPDGVSYADLRMADPGSRLLTAVFNACYRLESVPASWKTSNIVLVFKKGEKDDLSNWRPLALGNTASKLFAALLADRLTDWAVTNGRLSWSQKGFLRCEGCYEHNFVLGEILADARRPRKQAVVAWLDLSNAFGSIPHSTISNALEAAGVHPRLHATWKAMYTGCSTRVRAAEGYTSPIPIRSGVKQGCPLSPIVFNLAIESVVRKAIGTRAGYTLHGQRFNILAYADDLALVAETPEGMRDLLRAVEDEARRIGLRFNPAKCASLHVIGGNGGRVLPSEFVLQDVPIRALGAGEPYEHLGIPTGFRVQQTPIATLEQLIECLRAVDASKLTPWQKLESVAVFILPRLDFLLRGSKILRGPLKEVDKYIKRLAKSWMNLPQRASAEVVFLPPSRGGAGLLPLADLADALTIAHAFRLLTSPDAPVRELAWSSLREATFRKTGLSPSNVDLAAYLSGSREGRLQRDATSPGIWANARNAARRQGERLLIRWQWTSEREELSLRLRGSNGRPVILTPRSRSQVVHRVREAVAEFYLHTLLLKKDQGKVYEVSARSKVSNHFLRTGSFTRFADWRFIHRARLDVVPLNGNRRWGEGDKRCRRCGGGLETLPHVLCHCGPHSAAIQLRHNAVLDRLKNASRLPGVLRVNQRIEGVDGELASLRPDLVVRHEASRTIVMVDVAIPFENRAEAFKEARERKLAKYAPLAERLARDGYRVYVDAFLVGALGSWCPKNEAVLRLLRVSERYAAMMRRLMISDTIRWSRDIYVEHVSGVRQYGDPSLESAVGQPDACEGSMQSRIEASDDAGEATGTRPGCE

SEQ ID NO: 1710 - protein, 975 aa, Cerceris rybyensis
MATEVAIYFQGCGENRGSTARSEAGTSRSGRTAVGDAGAAGARRGGPGRDTGRSGRPSRPTPSQGEGRRNPVREAARLQRLYRLNRSRAIREVFGGSSPFCQVQREKIQRYFEEVYGGGNVLSGSPPARNTGAPVVGAEGLAQQFTEKEVERRLGRMSNSAPGPDGVSYADLRMADPGSRLLTAVFNACYRLESVPAPWKTSNTVLVFKKGDKDDLSNWRPLALGNTASKLFAALLADRLTGWAVTNGRLSWSQKGFLRCEGCYEHNFVLGEILADARRPRKQAVVAWLDLSNAFGSIPHSTISNALEAAGVHPRLHATWKAMYTGCSTRVRAGEGYTSPIPIRSGVKQGCPLSPIVFNLAIESVVRKAIGTRAGYTLHGQRFNILAYADDLALVAETPEGMRDLLRAVEDEARRIGLRFNPAKCASLHVIGGNGGRVLPSEFVLQDVPIRALGAGEPYEHLGIPTGFRVQQTPIATLEQLIECLRAVDASKLTPWQKLESVAVFILPRLDFLLRGSKLLRGPLKEVDKYIKRLAKSWMNLPQRASAEVVFLPPSRGGAGLLPLADLADALTIAHAFRLLTSPDAPVRELAWSSLREATFRKTGLSPSNVDLAAYLSGSREGRLQRDATSPGIWANARNAARRQGERLLIRWQWTSEREELSLRLRGSNGRPVILTPRSRSQVVHRVREAVAEYYLHTLLLKKDQGKVYEVSARSKVSNHFLRTGSFTRFADWRFIHRARLDVVPLNGNRRWGEGDKRCRRCGGGLETLPHVLCHCGPHSAAIQLRHNAVLDRLKNASRLPGVLRVNQRIEGVDGELASLRPDLVVRHEASRTIVMVDVAIPFENRAEAFKEARERKLAKYAPLAERLARDGYRVYVDAFLVGALGSWCPKNEAVLRLLRVSERYAAMMRRLMISDTIRWSRDIYVEHVSGVRQYRDPSSESAVGQPAALEGPSQNCIGASVDAEEATGTRPGCE

SEQ ID NO: 1711 - protein, 1755 aa, Cerceris rybyensis
MDKFLIEYPSVEGYSCAKCSELCADPRVLRSGGIYAGRGELVKHLKKAHGISAVAYKCGKCDFIGQGVYTLKSVKSHHAKVHGPVPVTPPRANSRINAADIGQLAPGTSASSESGGRVGDFAFSAGISSVSETVVTPLSAGGSPTILTVAAALTTSTVSVTAATAITSYAERISPASRREEILNSTARQPATTYAAVTVAPPSAAALAVQATRDAIKRAIKPRLPKEAGPRSAGISVTRRPSGEGRPPARKSNVKISPPKTTASTTTAPSTSRPAQGNAPPRAAAAGRAKGPSTTTPPSSRRSSPRHVGGVRNAGSTPPRAVRPRLSGERTRRAGTAPPADRRAPRAAGGRKSIEERATPATTCAPRGPGGRKGTEGGERISPPGLRSRRAASVPVVVKLPSRTSTVTRPVVTGPAKGALQVKPLGKSPPRPAATVERKNAGPSSPPTSGGEKLPKLPVEAQTGVHFPSMRLPATTGLPFSRSPVGVAVNNTRPCASAASVALTTATITTSCCGAPIVSAIVSAPARPIQGDRPAERALPVVREVVILRPASEKRTPDDHQPSLAEKKEMMDSEGGEQPWKVVAGRRARRTPPPQSPPEVSARSVVSPPIRVSPPPPPVTEVDFPLLPPPGSRVGKQIRKNIDSAPSFRALNERRGTGSRTDEGSPEAAGISSATPTRRCPTTRVPAEGRGHASVSTGVNRSYAAGPQAPSSSPRSGRPDSGRVTTSQRGRSERPGGNPAGSNPSRAGASKRRATREELQQRDLLLEIANSVSCIEDLECMATEVAIYFQGCGENRGSTARSEAGTSRPGRTAVGGAGAAGARRGGSGRDIGCAGRPSRPTPSQGEGRRNPLREAARLQRLYRLNRSRAIREVFGGSSPFCQVQREKIQRYFEEVYGGGNVLSGSPPARNTGAPAVGAEGLARPFTEKEVERRLGRMSNSAPGPDGVSYADLRMADPGSRLLTAVFNACYRLESVPASWKTSNTVLVFKKGEKDDLSNWRPLALGNTASKLFAALLADRLTDWAVTNGRLSWSQKGFLRCEGCYEHNFVLGEILADARRPRKQAVVAWLDLSNAFGSIPHSTISNALEAAGVHPRLHATWKAMYTGCSTRVRAAEGYTSPIPIRSGVKQGCPLSPIVFNLAIESVVRKAIGTRAGYTLHGQRFNILAYADDLALVAETPEGMRDLLRAVEDEARRIGLRFNPAKCASLHVIGGNGGRVLPSEFVLQDVPIRALGAGEPYEHLGIPTGFRVQQTPIATLEQLIECLRAVDASKLTPWQKLESVAVFILPRLDFLLRGSKLLRGPLKEVDKYIKRLAKSWMNLPQRASAEVVFLPPSRGGAGLLPLADLADALTIAHAFRLLTSPDAPVRELAWSSLREATFRKTGLSPSNVDLAAYLSGSREGRLQRDATSPGIWANARNAARRQSERLLIRWQWTSEREELSLRLRGSNGRPVILTPRSRSQVVHRVREAVAEFYLHTLLLKKDQGKVYEVSARSKVSNHFLRTGSFTRFADWRFIHRARLDVVPLNGNRRWGEGDKRCRRCGGGLETLPHVLCHCGPHSAAIQLRHNAVLDRLKNASRLPGVLRVNQRIEGVDGELASLRPDLVVRHEASRTIVMVDVAIPFENRAEAFKEARERKLAKYAPLAERLARDGYRVYVDAFLVGALGSWCPKNEAVLRLLRVSERYAAMMRRLMISDTIRWSRDIYVEHVSGVRQYGDPSVESAVGQPAAREGPTQNHIEASVDAEEATGTRPGSE

SEQ ID NO: 1712 - protein, 1755 aa, Cerceris rybyensis
MDKFLVAYPCVDGYSCAKCSELCADPRMLRSGGVYAGRGELVKHLKKAHGISAVAYKCGKCDFIGQGVYTLKSVKSHYAKVHGPVPVTPPRACSRINAADIGSLAPGASASSETGGRVGDFAFSAGILPISETVVTPLSAGGSPTILTVAAAQTTSTVSVTAATAITSSAERISPAFRREEILNLTARQPATTYAAVTIAPPSAAALAVQATRDAIKRATKPRLPKEAGPRSAGISVTRRPSGEGRPPARKSNVKISPPKKTASTSTAPTTSRPAQRNAPTKAAAAGRASRTSTITPPSSRRSSPRLFGGGRNAGSTPPRAIRPRMSGERTRRAGTAPPADRRAPRAAGGRKSIEGRVIPATTCAPRGPGGRKGSIGGERNSPPGLRSRRAASVPVVVKLPPRTKIVTRPVVTGPEKGALQVKPLGTSPPRPAATIERISSGPSSPPTSGGEILPKVPVEAQTGVHFSPMRLPATTGLPFSRSPVGVAVNNTRPCTSAASVALTTATITTSCCGAPLVSASVSVPARPIQGDRPAERALPVVREVVILRPASKKITPTDQQSSLALEKEKLDSEGEEQPWRVVAGRRARRTPPPLSPPELSARSVISPPTRVSPPPPPVTKVNFPLLPPPGSRMGKLIRKNFDSANVFRALNERRGSDSRTDEGSPEAAGVTSATPTRRCPTTRVPAERRVHAPVSTGVSRSYAAGPQAPSSSPRSGRPDSGRATTSQRGRSERPGGNPAGSNPSRAGAPKRRATREELQQRDLLLEIANSVSCIEDLECMATEVAIYFQGCGENRGSTARSEAGTSRSGRSTAGDAGAAGARRGGSGRDTGRAGRPSRPTPSQGEGRRNPVREAARLQRLYRLNRSRAIREVFGGSSPFCQVQREKIQRYFEEVYGGGNDLSGSPPARNTGAPAVGAEGLAQLFTEKEVERRLGRMSNSAPGPDGVSYADLRMADPGSRLLTAVFNACYRLESVPASWKTSNTVLVFKKGDKDDLSNWRPLALGNTASKLFAALLADRLTGWAVANGRLSWSQKGFLRCEGCYEHNFVLGEILADARRPRKQAVVAWLDLSNAFGSIPHSTISSALEAAGVHPRLHATWKAMYTGCSTRVRAAEGYTSPIPIRSGVKQGCPLSPIVFNLAIESVVRKAIGTRAGYTLHGQRFNILAYADDLALVAETPEGMRDLLRAVEDEARRIGLRFNPAKCASLHVIGGNGGRVLPSEFVLQDVPIRALGAGEPYEHLGIPTGFRVQQTPIATLEQLIECLRAVDASKLTPWQKLESVAVFILPRLDFLLRGSKILRGPLKEVDKYIKRLAKSWMNLPQRASAEVVFLPPSRGGAGLLPLADLADALTIAHAFRLLTSPDAPVRELAWSSLREATFRKTGLSPSNVDLAAYLSGSREGRLQRDATSPGIWANARNAARRQGERLLIRWQWTSEREELSLRLRGSNGRPVILTPRSRSQVVHRVREAVAEFYLHTLLLKKDQGKVYEVSARSKVSNHFLRTGSFTRFADWRFIHRARLDVVPLNGNRRWGEGDKRCRRCGGGLETLPHVLCHCGPHSAAIQLRHNAVLDRLKNASRLPGVLRVNQRIEGVDGELASLRPDLVVRHEASRTIVMVDVAIPFENRAEAFKEARERKLAKYAPLAERLARDGYRVYVDAFLVGALGSWCPKNEAVLRLLRVSERYAAMMRRLMISDTIRWSRDIYVEHVSGVRQYGDPSAESAVGQPAALEGPSQNRIGASVDAEEATGTRPEYE

SEQ ID NO: 1713 - protein, 1754 aa, Cerceris rybyensis
MDKFLVAYPCVDGYSCEKCSELCADPRMLRSGGVYAGRGELVKHLKKVHGISAVAYKCGKCDFIGQGVYTLKSVKSHHAKVHGPVPVTPPRANSRINAADIGSLAPGTSASSETGGRVGDFAISAGISTVTETVVTPLSAGGSPTILTVAAAQTTSTVSVTAATAIINVAERISPAFRREEISNLTARQPATTYAAVTIAPPSAAALAVQATRDAIKRATKPRLPKEAGPRSAGISVTRRPSGDGRPPARTSTSKLSPPKRTTSTTTAPTTSRPALRNAPPKAAAAGRAQGSSTTTPPSSRRSSPRHVGGARNAGSTPPRAVRPRLSGERTRRAGTAPPADRRAPRAAGGRKSIEERATPATTCAPRGPGGRKGTEGGERISPPVSRSRRAASVPVVVQLPPRTKIVTRPVVTGPVKGALRVKSLGTSPPRPAATIERKNSGPSSPLTRGGEKLPKLPVEAQTGVHFPSMRLPATTGLPFSRSPVGVAVNNTRPCTSAASVALTTATITTSCCGAPIVSAIVSAPARPIQGDRPAERALPVVRGVVILRPASKKRTPADHQPSLAEEVEMDSEGGEQPWKVVAGRRARRTPPPQSPPEMSARSVVSPPIRVSPPPPPVTEVTFPLLPPPGSRGGKHFRKNFDSAPFFRALNERRGSDSRTDEGSPEAVGITSATPTRRCPATRVPAEGRGHAPVSTGVSRSYAAGPQAPSSSPRSGRPDSGRVTTSQRGRSERPGGNPAGSNPSRAGASKRRATREELQQRDLLLEIANSVSCTEDLECMATEVAIYFQGCGENRGSTARSEAGTSRSGRTAVGGAGAAGARRGGPERDTGRAGRSSRPTPSQGEGRRNPVREAARLQRLYRLNRSRAIREVFGGSSPFCQVQREKIQRYFEEVYGGGNDLSGSPPARNTGAPVVGAEGLAQQFTEKEVERRLGRMSNSAPGPDGVSYADLRMADPGSRLLTAVFNACYRLESVPASWKTSNTVLVFKKGEKDDLSNWRPLALGNTASKLFAALLADRLTDWAVTNGRLSWSQKGFLRCEGCYEHNFVLGEILADARRPRKQAVVAWLDLSNAFGSIPHSTISNALEAAGVHPRLHATWKAMYTGCSTRVRAAEGYTSPIPIRSGVKQGCPLSPIVFNLAIESVVRKAIGTRAGYTLHGQRFNILAYADDLALVAETPEGMRDLLRAVEDEARRIGLRFNPAKCATLHIIGGNGGRVLPSEFVLQDVPIRALGAGEPYEHLGIPTGFRVQQTPIATLEQLIECLRAVDASKLTPWQKLESVAVFILPRLDFLLRGSKLLRGPLKEVDKYIKRLAKSWMNLPRRASAEVVFLPPSRGGAGLLPLADLADALTIAHAFRLLTSPDAPVRELAWSSLGEATFRKTGLSPSNVDLAAYLSGSREGRLQRDATSPGIWANARNAARRQGERLLIRWQWTSEREELSLRLRGSNGRPVILTPRSRSQVVHRVREAVAEFYLHTLLLKKDQGKVYEVSARSKVSNHFLRTGSFTRFADWRFVHRARLDVVPLNGNRRWGEGDKRCRRCGGGLETLPHVLCHCGPHSAAIQLRHNAVLDRLKNASRLPGVLRVNQRIEGVDGELASLRPDLVVRHEASRTIVMVDVAIPFENRAEAFKEARERKLAKYAPLAERLARDGYRVYVDAFLVGALGSWCPKNEAVLRLLRVSERYAAMMRRLMISDTIRWSRDIYVEHVSGVRQYGDPSSESAVGQPAALEGPSQNCIGASVDAEEATGTRPGCE

SEQ ID NO: 1714 - protein, 1754 aa, Cerceris rybyensis
MDKFLIEYPSVEGYSCAKCSELCADPRVLRSGGIYAGRGELVKHLKKAHGISAVAYRCGKCDFIGQGVYTLKSVKSHHAKVHGPVPVTPPRANSRINAADIGSLAPGASASSETGGRVGDSANSAGILPISETVVTPLSAGGSPTILTVAAAQTTSTVSVTAATAITSNAERISPAFRRETISNLIARQPATTYAAVTIAPPSAAALAVQATRDAIKRATKPRLPKEAGPRSAGISVTRRPSGEGRPPARTSTSKLSPPKSTASTRTAPTTSRPAQGNAPPRAAAAGRALGTSTTTPPSSRRSSPRHVGGGRNAGSTPPRAIRPRLSGERMRRAGTAPPADRRAPRAAGGRKSNEGRVIPATTCAPRGPGGRKGTEGGERISPPGLRSRRAASVPVVVKLPSRTSTVTRPVVTGPAKGALQVKPLGKSPPRPAATVERKDAGPSSPPTSGGEKLPKVPVEAQTGVHLSSMRLPATTGLPFSRSPVGVAVNNTRPCTSAASVALTTATVTTPCCGAPIVSAIVSAPARPIQGDRPAERALPVVREVVILRPASKKRTPADHQPSLAEEVEMDSEGGEQPWKVVAGRRARRTPPPQSPPEMSARSVVSPPIRVSPPPPPVTEVTFPLLPPPGSRGGKHFRKNFDSAPFFRALNERRGSDSRTDEGSPEAVGITSATPTRRCPATRVPAEGRGHAPVSTGVSRSYAAGPQAPSSSPRSGRPDSGRVTTSQRGRSERPGGNPAGSNPSRAGASKRRATREELQQRDLLLEIANSVSCIEDLECMATEVAIYFQGCGENRGSTARSEAGTSRSGRTAVGDAGAAGARRGGSGRDTGRAGRPSRPTPSQGEGRRNPVREAARLQRLYRLNRSRAIREVFGGSSPFCQVQREKIQRYFEEVYGGGNVLSGSPPARNTGAPVVGAEGLAQQFTEKEVERRLGRMSNSAPGPDGVSYADLRMADPGSRLLTAVFNACYRLESVPASWKTSNTVLVFKKGDKDDLSNWRPLALGNTASKLFAALLADRLTDWAVTNGRLSWSQKGFLRCEGCYEHNFVLGEILADARRPRKQAVVAWLDLSNAFGSIPHSTISSALEAAGVHPRLHATWKAMYTGCSTRVRAAEGYTSPIPIRSGVKQGCPLSPIVFNLAIESVVRKAIGTRAGYTLHGQRFNILAYADDLALVAETPEGMRDLLRAVEDEARRIGLRFNPAKCASLHVIGGNGGRVLPSEFVLQDVPIRALGAGEPYEHLGIPTGFRVQQTPIATLEQLIECLRAVDASKLTPWQKLESVAVFILPRLDFLLRGSKILRGPLKEVDKYIKRLAKSWMNLPQRASAEVVFLPPSRGGAGLLPLADLADALTIAHAFRLLTSPDAPVRELAWSSLREATFRKTGLSPSNVDLAAYLSGSREGRLQRDATSPGIWANARNAARRQGERLLIRWQWTSEREELSLRLRGSNGRPVILTPRSRSQVVHRVREAVAEYYLHTLLLKKDQGKVYEVSARSKVSNHFLRTGSFTRFADWRFIHRARLDVVPLNGNRRWGEGDKRCRRCGGGLETLPHVLCHCGPHSAAIQLRHNAVLDRLKNASRLPGVLRVNQRIEGVDGELASLRPDLVVRHEASRTIVMVDVAIPFENRAEAFKEARERKLAKYAPLAERLARDGYRVYVDAFLVGALGSWCPKNEAVLRLLRVSERYAAMMRRLMISDTIRWSRDIYVEHVSGVRQYGDPSSESTVGQPAAPEGPLQNSIGASVDAEEAMGTRPGYE

SEQ ID NO: 1715 - protein, 1756 aa, Cerceris rybyensis
MDKFLIEYPSVEGYSCAKCSELCADPRVLRSGGVYAGRGELVKHLKKAHGISVVAYRCGKCDFIGQGVYTLKSVKSHHAKVHGPVPVTPPRACSRINAADIGSLAPGLSASSETGGRVGDFANSAGISTVSETVVTPLSAGGSPTILTVAAAQITSTVSVTAATATTSYAERISPAFRREETLNSTARQPATTYAAVTVAPPSAAALAVQATRNAIQRAMKPRLPKEAGPRSAGISVTRRPSGDGRPPARKSNAKLSPPKTTASTKTASTTSRPAQGNAPPRAAAAGRASGTSTTTPPPSSRRSSPRHVGGVRNAGSTPPRAVRPRLSGGRTHRAGTAPPDDRRAPRAAGGRKSNEGRVIPATTCAPRGPGGRKGTERGERVTPPVLRSRRAASVPVVGNLPPRTKIVTRPVVTGPVKGALRVKSLGTSPPPPAATIERNLTGPSSPPTSGGEILPKVPVEALTGVHFSPMRLPATTGLPFSRSPVGVAVNNTRPCTSAASVALTTATITTSCCGAPLVSASVSVPARPIQGDRPAERALPVVREVVILRPASKKTTPADHQPSLAEEKKVENSEGGEQPWKVVAGRRARRTPPPQSPPEMSARSVVSPPIRVSPPPPPVTEVNFPLLPPPGSRGGKHIRKGIDSAPFFRALNERRGSDSRTDEGSPEAVGITSATPTRRCPATRVPAEGRGHAPVSTGVSRSYAAGPQAPSSSPRSGRPDSGRVTTSQRGRSERPGGNPAGSNPSRAGASKRRATREELQQRDLLLEIANSVSCIEDLECMATEVAIYFQGCGENRGSTARSEAGTSRSGRTAVGDAGAAGARRGGSGRDTGRAGRPSRPTPSQGEGRRNPVREAARLQRLYRLNRSRAIREVFGGSSPFCQVQREKIQRYFEEVYGGGNDLSGSPPARNTGAPVVGAEGLAQQFTEKEVERRLGRMSNSAPGPDGVSYADLRMADPGSRLLTAVFNACYRLESVPASWKTSNTVLVFKKGEKDDLSNWRPLALGNAASKLFAALLADRLTDWAVTNGRLSWSQKGFLRCEGCYEHNFVLGEILADARRPRKQAVVAWLDLSNAFGSIPHSTISNALEAAGVHPRLHATWKAMYTGCSTRVRAAEGYTSPIPIRSGVRQGCPLSPIVFNLAIESVVRKAIGTRAGYTLHGQRFNILAYADDLALVAETPEGMRDLLRAVEGEARRIGLRFNPAKCASLHVIGGNGGRVLPSEFVLQDVPIRALGAGEPYEHLGIPTGFRVQQTPIATLEQLIECLRAVDASKLTPWQKLESVAVFILPRLDFLLRGSKILRGPLKEVDKYIKRLAKSWMNLPQRASAEVVFLPPSRGGAGLLPLADLADALTIAHAFRLLTSPDAPVRELAWSSLREATFRKTGLSPSNVDLAAYLSGSREGRLQRDATSPGIWANARNAARRQGERLLIRWQWTSEREELSLRLRGSNGRPVILTPRSRSQVVHRVREAVAEFYLHTLLLKKDQGKVYEVSARSKVSNHFLRTGSFTRFADWRFIHRARLDVVPLNGNRRWGEGDKRCRRCGGGLETLPHVLCHCGPHSAAIQLRHNAVLDRLKNASRLPGVLRVNQRIEGVDGELASLRPDLVVRHEASRTIVMVDVAIPFENRAEAFKEARERKLAKYAPLAERLARDGYRVYVDAFLVGALGSWCPKNEAVLRLLRVSERYAAMMRRLMISDTIRWSRDIYVEHVSGVRQYRDPSSESTVGQPAALEGPSQNRIGASVDAEEATGTRLENE

SEQ ID NO: 1716 - protein, 1754 aa, Cerceris rybyensis
MDKFLVAYPCVDGYSCEKCSELCADPRVLRSGGVYAGRGELVKHLKKVHGISAVAYKCGKCDFIGQGVYTLKSVKSHHAKVHGPVPVTPPRANSRINAADIGSLAPGASASSETGGRVGDFAISAGISSVSETVVTPLSAGGSPTILTVAAAQITSTVSVTAATATTSYAERISPAFRRETISNLIARQPATTYAAVTIAPPSAAALAVQATRDAIKRATKPRLPKEAGPRSAGISVTRRPSGEGRPPARTSTSKLSPPKSTASTRTAPTTSRPAQGNAPPRAAAAGRALGMSTTTPPSSRRSSPRHVGGGRNAGSTPPRAIRPRLSGERMRRAGTAPPADRRAPRAAGGRKSNEGRVIPATTCAPRGPGGRKGTEGGERISPPGLRSRRAASVPVVVKLPSRTSTVTRPVVTGPAKGALQVKPLGKSPPRPAATVERKDAGPSSPPTSGGEKLPKVPVEAQTGVHLSSMRLPATTGLPFSRSPVGVAVNNTRPCTSAASVALTTATVTTSCCGAPIVSAIVSAPARPIQGDRPAERALPVVREVVILRPASKKRTPADHQPSLAEEVERDSEGGEQPWRVVAGRRARRTPPPQSPPEMSARSVVSPPIRVSPPPPPVTEVTFPLLPPPGSRGGKHFRKNFDSAPFFRALNERRGSDSRTDEGSPEAVGITSATPTRRCPATRVPAEGRGHAPVSTGVSRSYAAGPQAPSSSPRSGRPDSGRATTSQRGRGERPGGNPAGGNPSRAGASKRRATREELQQRDLLLEIANSVSCIEDLECMATEVAIYFQGCGENRGSTARSEAGTSRSGRTAVGDAGAAGARRGGSGRDTGRAGRPSRPTPSQGEGRRNPVREAARLQRLYRLNRSRAIREVFGGSSPFCQVQREKIQRYFEEVYGGGNVLSGSPPARNTGAPVVGAEGLAQQFTEKEVERRLGRMSNSAPGPDGVSYADLRMADPGSRLLTAVFNACYRLESVPAPWKTSNTVLVFKKGDKDDLSNWRPLALGNTASKLFAALLADRLTDWAVTNGRLSWSQKGFLRCEGCYEHNFVLGEILADARRPRKQAVVAWLDLSNAFGSIPHSTISNALEAAGVHPRLHATWKAMYTGCSTRVRAGEGYTSPIPIRSGVKQGCPLSPIVFNLAIESVVRKAIGTRAGYTLHGQRFNILAYADDLALVAETPEGMRDLLRAVEDEARRIGLRFNPAKCASLHVIGGNGGRVLPSEFVLQDVPIRALGAGEPYEHLGIPTGFRVQQTPIATLEQLIECLRAVDASKLTPWQKLESVAVFILPRLDFLLRGSKLLRGPLKEVDKYIKRLAKSWMNLPQRASAEVVFLPPSRGGAGLLPLADLADALTIAHAFRLLTSPDAPVRELAWSSLREATFRKTGLSPSNVDLAAYLSGSREGRLQRDATSPGIWANARNAARRQGERLLIRWQWTSEREELSLRLRGSNGRPVILTPRSRSQVVHRVREAVAEYYLHTLLLKKDQGKVYEVSARSKVSNHFLRTGSFTRFADWRFIHRARLDVVPLNGNRRWGEGDKRCRRCGGGLETLPHVLCHCGPHSAAIQLRHNAVLDRLKNASRLPGVLRVNQRIEGVDGELASLRPDLVVRHEASRTIVMVDVAIPFENRAEAFKEARERKLAKYAPLAERLARDGYRVYVDAFLVGALGSWCPKNEAVLRLLRVSERYAAMMRRLMISDTIRWSRDIYVEHVSGVRQYRDPSSESAVGQPAALEGPSQNCIGASVDAEEATGTRPGCE

SEQ ID NO: 1717 - protein, 1755 aa, Cerceris rybyensis
MDKFLVAYPCVDGYSCAKCSELCADPRMLRSGGVYAGRGELVKHLKKAHGISAVAYKCGKCDFIGQGVYTLKSVKSHHAKVHGPVPVTPPRANSRINAADIGQLAPGTSASSETGGRIGDLAISAGISSVSETVVTPLSAGGSPTILTVAAAQITSTVSVTAATATTSYAERISPAFRREETLNSTARQPATTYAAVTVAPPSAAALAVQATRNAIQRATKPRLPKEAGPRSAGISVTRRPSGDGRPPARTSTSKLSPPKKSTSTTTAPSTSRPAQGNAPPRAAAAGRAKGPSTTTPPSSRRSSPRHVGGVRNAGSTPPRAVRPRLSGERTRRAGTAPPADRRAPRAAGGRNSTEGRVFPATTCAPRGPGGRKGMEGGEKNSPPVLRTRRAASVPVVVKLPTRTTTATRSVVTGPEKGALRVKSLGTTPPRPAATIERNLTGPSSPPTSGGEILPKVPVEALTGVHFSPMRLPATTGLPFSRSPVGVAVNNTRPCTSAASVALTTATITTSCCGAPIVSAIVSAPARPTQGDRPAERALPVVREVVILRPASRKRTPADHQPSLAEEREKTDSEGEEQPWRVVAGRRARRTPPPPSPPELSARSVISPPTRVSPPPPPVTEVTFPLLPPPGSRVGKHINKKNDSAPFFRALNERRGTGSRTDEGSPEAAGISSATPTRRCPTTRVPAEGRGHAPVSTGVSRSYAAGPQAPSSSPRSGRPDSGRVTTSQRGRGERPGGNPAGGNPSRAGASKRRATREELQQRDLLLEIANSVSCIEDLECMATEVAIYFQGCGENRGSTARSEAGTSRSGRTAVGDAGAAGARRGGSGRDTGRAGRPSRPTPSQGEGRRNPVREAARLQRLYRLNRSRAIREVFGGSSPFCQVQREKIQRYFEEVYGGGNDLSGSPPARNTGAPAVGAESLAQPFTEKEVERRLGRMSNSAPGPDGVSYADLRMADPGSRLLTAVFNACYRLESVPASWKTSNTVLVFKKGDKDDLSNWRPLALGNTASKLFAALLADRLTDWAVTNGRLSWSQKGFLRCEGCYEHNFVLGEILADARRPRKQAVVAWLDLSNAFGSIPHSTISNALEAAGVHPRLHATWKAMYTGCSTRVRAAEGYTSPIPIRSGVKQGCPLSPIVFNLAIESVVRKAIGTRAGYTLHGQRFNILAYADDLALVAETPEGMRDLLRAVEDEARRIGLRFNPAKCASLHVIGGNGGRVLPSEFVLQDVPIRALGAGEPYEHLGIPTGFRVQQTPIATLEQLIECLRAVDASKLTPWQKLESVAVFILPRLDFLLRGSKLLRGPLKEVDKYIKRLAKSWMNLPQRASAEVVFLPPSRGGAGLLPLADLADALTIAHAFRLLTSPDAPVRELAWSSLREATFRKTGLSPSNVDLAAYLSGSREGRLQRDATSPGIWANARNAARRQSERLLIRWQWTSEREELSLRLRGSNGRPVILTPRSRSQVVHRVREAVAEFYLHTLLLKKDQGKVYEVSARSKVSNHFLRTGSFTRFADWRFIHRARLDVVPLNGNRRWGEGDKRCRRCGGGLETLPHVLCHCGPHSAAIQLRHNAVLDRLKNASRLPGVLRVNQRIEGVDGELASLRPDLVVRHEASRTIVMVDVAIPFENRAEAFKEARERKLAKYAPLAERLARDGYRVYVDAFLVGALGSWCPKNEAVLRLLRVSERYAAMMRRLMISDTIRWSRDIYVEHVSGVRQYGDPSSESTVGQPAALEGPSQNRIGASVDAEEATGTRLENE

SEQ ID NO: 1718 - protein, 1732 aa, Cerceris rybyensis
MEKHVVAYPSVDGYSCTICNESGVDPRMLRSGGVFAGRAELAKHLKKVHGITTVVYKCSRCGFVGVGAYTLKSVKTHYARAHGSVPVTPPRENARTNAAVTGLLAPVHTASAGAFGCPGDSASLASGQSLLNAGGTLTLTSATAMTTPLTAGGSTTILTAAATQTTATASVTAAAAKTNAAVRVAPIFAAGGSSNSNARPPATTFAAVAAAPPSTAVAAVRATRAAILRATKPRLPKEAASRSAGTSVTRRSSESSGPPAHNLNIRRPSLPKTSSTKATTTTSRPSPKTATMMKAEAAGRVRRSTTISPPSSRRSIPRHSGGGNSAGPTPPGAVRSPVSGARTRRAGTAPPDGRRAPRSQGGRKSSEGEVTPPTACAPRGAGGRKGVEEKGRKSPPMTRSRRAASVPVEINPLRTTTSSRSTATGPAKGPLRDKPLKSQRAPPAAAVERRSAGPSTPPIIGGRELPTSPVEVTAGVLTPPTRLTVTGGLPFSRSPVAVTANNTRICTSAASVALTTETVTTTCCGAPLVAASVSAPTFSGQGVRPATRGVPVVREVVIMRPASKKEQPHHQQPPIAEEEEDDVGEGVQPWQVVVGRRAQRTPPRISPPGSSARNISPLPVRVSPPPPPVTTANFPLLPPPGSRVKKLTNKNNNYYMLSHRSRGERERGATPVGAPASPPTHLDAVCVPTGQSASVRGAAGVSRRVAAGPLTASDTPRSGRPESGRASIPQQERTRGARRPSGGGSPRRSGAFNRRVTREELQQRDLLIGLAEAASTVEDLEVVATEVAAYFQSCGEKRSATARRETGNGRRGGTAGSDRRYAGGNRGGAERGGGRRDETSRSDPSQGERRWNPVREAARIQRLYRQNRSRAIREVFGGSSPFCQVQREEVFRYFKEVHGESDCLPSPPPPFGRNTGTPEVDSEGLARLFSEKEVGDRLGRASNSAPGPDGITYSDLRMADPGSRLLTAVYNLCYRLESVPSSWKTSNTVLVYKKGDKSDLSNWRPLALGNTAGKLFAALIADRLTDWAVGSGRISWAQKGFLRCEGCYEHNFVLGEVLADARKTRKQAVVAWLDLSNAFGSIPHATIRNALVSAGVHPCILNTWNSMYDGCTTRIRAAEGYTNPIPIRSGVRQGCPLSPITFTLAIESVIRKAIGSGAGYSLHGQRFSILAYADDLALIADTPEGMRDLLRAVEGEARRIGLCFNPAKCATLHVIGGRGGGVIPSVFTLQDIPMRALAEGESYDHLGIPTGFRVDQTPIASIEELIECLRAVDDSKLAPWQKLETVAVFVLPRLDFLLRGAKILRGPLKEVDKYVRRLAKSWMNLPQRASAEIVFLPPSRGGGGLLPLADLADALTIAHAFRLLSAPDAPVRDLAWSSLRVAATRGLATATSNADLAAFLSGDRTGRSQWEATVPGIWSSTRTAARKHADRWGFCWRWTPELNELALSLRGVRGRPVIVTPRSRGQVVARMRETVAEYYQSTLLLKRDQGKVFEVSGRERVSNHFLRTGSFTRFADWRFIHRARLDVVPLNGNRRWGDGDKRCRRCGESLETLPHVICHCGPHSAAIQLRHNAILERLKAATRMPGSIRINQRIEGAGEEFAALRPDLVVRHEASRTIVIVDVAVPFENRLEAFVAARERKIAKYAPLAEKLSRDGYRVLVRAFLVGALGSWWPENEAVLSLLRVSERYAAMMRRLMISDTIRWSRDIYVEHVSGVRQYREPTLVNANQNAP

SEQ ID NO: 1719 - protein, 1754 aa, Cerceris rybyensis
MDKFLVAYPCVDGYSCEKCSELCADPRVLRSGGVYAGRGELVKHLKKVHGISAVAYKCGKCDFIGQGVYTLKSVKSHHAKVHGPVPVTPPRANSRINAADIGSLAPGASASSETGGRVGDFAISAGISSVSETVVTPLSAGGSPTILTVAAAQITSTVSVTAATATTSYAERISPAFRREEILNSTARQPATTYAAVTIAPPSAAALAVQATRDAIKRATKPRLPKEAGPRSAGISVTRRPSGEGRPPARNSNVKISPPKKTASTSTAPTTSRPAQRNAPPKAAAAGRAQGSSTTTPPSSRRSSPRHVGGARNAGSTPPRAVRPRLSGERTRRAGTAPPADRRAPRAAGGRKSIEERATPATTCAPRGPGGRKGTEGGERISPPVSRSRRAASVPVVVQLPPRTKIVTRPVVTGPVKGALRVKSLGTSPPRPAATIERKNSGPSSPLTRGGEKLPKLPVEAQTGVHFPSMRLPATTGLPFSRSPVGVAVNNTRPCTSAASVALTTATITTSCCGAPIVSAIVSAPARPIQGDRPAERALPVVREVVILRPASKKRTPADHQPSLAEEVEMDSEGGEQPWKVVAGRRARRTPPPQSPPEMSARSVVSPPIRVSPPPPPVTEVTFPLLPPPGSRGGKHFRKNFDSAPFFRALNERRGSDSRTDEGSPEAVGITSATPTRRCPATRVPAEGRGHAPVSTGVSRSYAAGPQAPSSSPRSGRPDSGRVTTSQRGRSERPGGNPAGSNPSRAGASKRRATREELQQRDLLLEIANSVSCTEDLECMATEVAIYFQGCGENRGSTARSEAGTSRSGRTAVGGAGAAGARRGGPERDTGRAGRSSRPTPSQGEGRRNPVREAARLQRLYRLNRSRAIREVFGGSSPFCQVQREKIQRYFEEVYGGGNDLSGSPPARNTGAPVVGAEGLAQQFTEKEVERRLGRMSNSAPGPDGVSYADLRMADPGSRLLTAVFNACYRLESVPASWKTSNTVLVFKKGEKDDLSNWRPLALGNTASKLFAALLADRLTDWAVTNGRLSWSQKGFLRCEGCYEHNFVLGEILADARRPRKQAVVAWLDLSNAFGSIPHSTISNALEAAGVHPRLHATWKAMYTGCSTRVRAGEGYTSPIPIRSGVKQGCPLSPIVFNLAIESVVRKAIGTRAGYTLHGQRFNILAYADDLALVAETPEGMRDLLRAVEDEARRIGLRFNPAKCATLHIIGGNGGRVLPSEFVLQDVPIRALGAGEPYEHLGIPTGFRVQQTPIATLEQLIECLRAVDASKLTPWQKLESVAVFILPRLDFLLRGSKILRGPLKEVDKYIKRLAKSWMNLPQRASAEVVFLPPSRGGAGLLPLADLADALTIAHAFRLLTSPDAPVRELAWSSLREATFRKTGLSPSNVDLAAYLSGSREGRLQRDATSPGIWANARNAARRQGERLLIRWQWTSEREELSLRLRGSNGRPVILTPRSRSQVVHRVREAVAEFYLHTLLLKKDQGKVYEVSARSKVSNHFVRTGSFTRFADWRFIHRARLDVVPLNGSRRWGEGDKRCRRCGGGLETLPHVLCHCGPHSAAIQLRHNAVLDRLKNASRLPGVLRVNQRIEGVDGELASLRPDLVVRHEASRTIVMVDVAIPFENRAEAFKEARERKLAKYAPLAERLARDGYRVYVDAFLVGALGSWCPKNEAVLRLLRVSERYAAMMRRLMISDTIRWSRDIYVEHVSGVRQYGDPSAESAVGQPAALEGPSRNHIEASVDVGEATGTRPGNE

SEQ ID NO: 1720 - protein, 1755 aa, Cerceris rybyensis
MDKFLVAYPCVDGYSCAKCSELCADPRMLRSGGVYAGRGELVKHLKKAHGISAVAYRCGKCDFIGQGVYTLKSVKSHYAKVHGPVPVTPPRANSRINAADIGSLAPGPSASSETGGRVGVFANSAGISSVSETVVTPLSAGGSPTILTVAAAQTTSTVSVTAATAIINVAERISPASRREEILNSTARQPATTYAAVTVAPPSAAALAVQATRNAIQRAMKPRLPKEAGPRSAGISVTRRPSGEGRPPARISNVKISPPKTTASTTTAPSTSRPAQGNAPSRAAAAGRAKGPSTTTPPSSRRSSPRHVGGVRNAGSTPPRAVRPRLSGERTRRAGTAPPADRRAPRAAGGRNSTEGRVFPATTCAPRGPGGRKGMEGGEKNSPPVLRTRRAASVPVVVKLPSRTSTVTRPVVTGPAKGALQVKPLGKSPPRPAATVERKNAGPSSPPTSGGEKLPKLPVEAQADVRISPMRLPATTGLPFSRSPVGVAVNNTRPCTSAASVALTTATITTSCCGAPLVSASVSVPARPIQGDRPAERALPVVREVVILRPASKKTTPADHQPSLAEEKKVEDSEGGEQPWKVVAGRRARRTPPPQSPPEMSARSVLSPPTRVSPPPPPVTEVNFPLLPPPGGRTGKHFRKNFDSASSFRALNERRGTDSRTDEGSPEAAGVTSATPTRRCPTTRVPAERRVHAPVSTGVSRSYAAGPQAPSSSPRSGRPDSGRVTTSQRGRSERPGGNPAGSNPSRAGASKRRATREELQQRDLLLEIANSVSCIEDLECMATEVAIYFQGCGENRGSTARSEAGTSRSGRSTAGDAGAAGARRGGSGRDTGRAGRPSRPTPSQGEGRRNPVREAARLQRLYRLNRSRAIREVFGGSSPFCQVQREKIQRYFEEVYGGGNDLSGSPPARNTGAPVVGAEGLAQLFTEKEVERRLGRMSNSAPGPDGVSYADLRMADPGSRLLTAVFNACYRLESVPASWKTSNTVLVFKKGEKDDLSNWRPLALGNTASKLFAALLADRLTDWAVTNGRLSWSQKGFLRCEGCYEHNFVLGEILADARRPRKQAVVAWLDLSNAFGSIPHSTISNALEAAGVHPRLHATWKAMYTGCSTRVRAAEGYTSPIPIRSGVKQGCPLSPIVFNLAIESVVRKAIGTRAGYTLHGQRFNILAYADDLALVAETPEGMRDLLRAVEDEARRTGLRFNPAKCASLHVIGGNGGRVLPSEFVLQDVPIRALGAGEPYEHLGIPTGFRVQQTPIATLEQLIECLRAVDASKLTPWQKLESVAVFILPRLDFLLRGSKILRGPLKEVDKYIKRLAKSWMNLPQRASAEAVFLPPSRGGAGLLPLADLADALTIAHAFRLLTSPDAPVRELAWSSLREATFRKTGLSPSNVDLAAYLSGSREGRLQRDATSPGIWANARNAARRQGERLLIRWQWTSEREELSLRLRGSNGRPVILTPRSRSQVVHRVREAVAEFYLHTLLLKKDQGKVYEVSARSKVSNHFLRTGSFTRFADWRFIHRARLDVVPLNGNRRWGEGDKRCRRCGGGLETLPHVLCHCGPHSAAIQLRHNAVLDRLKNASRLPGVLRVNQRIEGVDGELASLRPDLVVRHEASRTIVMVDVAIPFENRAEAFKEARERKLAKYAPLAERLARDGYRVYVDAFLVGALGSWCPKNEAVLRLLRVSERYAAMMRRLMISDTIRWSRDIYVEHVSGVRQYRDPSSESTVGQPAALEGPSQNRIGASVDAEEATGTRLENE

SEQ ID NO: 1721 - protein, 1588 aa, Cerceris rybyensis
MTTPLTAGGSTTILTAAATQTTATASVTAAAAKTNAAVRVAPIFAAGGSSNSNARPPATTFAAVAAAPPSTAVAAVRATRAAILRATKPRLPKEAASRSAGTSVTRRSSESSGPPAHNLNIRRPSLPKTSSTKATTTTSRPSPKTATMMKAEAAGRVRRSTTISPPSSRRSIPRHSGGGNSAGPTPPGAVRSPVSGARTRRAGTAPPDGRRAPRSQGGRKSSEGEVTPPTACAPRGAGGRKGVEEKGRKSPPMTRSRRAASVPVEINPLRTTTSSRSTATGPAKGPLRDKPLKSQRAPPAAAVERRSAGPSTPPIIGGRELPTSPVEVTAGVLTPPTRLTVTGGLPFSRSPVAVTANNTRICTSAASVALTTETVTTTCCGAPLVAASVSAPTFSGQGVRPATRGVPVVREVVILRPASKKEQPHHQQPPIAEEEEDDVGEGVQPWQVVVGRRAQRTPPRISPPGSSARNISPLPVRVSPPPPPVTTANFPLLPPPGSRVKKLTNKNNNYYMLSHRSRGERERGATPVGAPASPPTHLDAVCVPTGRSASVRGAAGVSRRVAAGPLTASDTPRSGRPESGRASIPQQERTRGARRPSGGGSPRRSGAFNRRVTREELQQRDLLIGLAEAASTVEDLEVVATEVAAYFQSCGEKRSATARSETGNGRRGGTAGSDRRYAGGNRGGAERGGGRRDETSRSDPSQGERRWNPVREAARIQRLYRQNRSRAIREVFGGSSPFCQVQREEVFRYFKEVHGESDCLPSPPPPFGRNTGTPEVDSEGLARLFSEKEVGDRLGRASNSAPGPDGITYSDLRMADPGSRLLTAVYNLCYRLESVPSSWKTSNTVLVYKKGDKSDLSNWRPLALGNTAGKLFAALIADRLTDWAVGSGRISWAQKGFLRCEGCYEHNFVLGEVLADARKTRKQAVVAWLDLSNAFGSIPHATIRNALVSAGVHPCILNTWNSMYDGCTTRIRAAEGYTNPIPIRSGVRQGCPLSPITFNLAIESVIRKAIGSGAGYSLHGQRFSILAYADDLALIADTPEGMRDLLRAVEGEARRIGLCFNPAKCATLHVIGGRGGGVIPSVFTLQDIPMRALAEGESYDHLGIPTGFRVDQTPIASIEELIECLRAVDDSKLAPWQKLETVAVFVLPRLDFLLRGAKILRGPLKEVDKYVRRLAKSWMNLPQRASAEIVFLPPSRGGGGLLPLADLADALTIAHAFRLLSAPDAPVRDLAWSSLRVAATRGLATATSNADLAAFLSGDRTGRSQWEATVPGIWSSTRTAARKHADRWGFCWRWTPELNELALSLRGARGRPVIVTPRSRGQVVARMRETVAEYYQSTLLLKRDQGKVFEVSGRERVSNHFLRTGSFTRFADWRFIHRARLDVVPLNGNRRWGDGDKRCRRCGESLETLPHVICHCGPHSAAIQLRHNAILERLKAATRMPGSIRINQRIEGAGGEFAALRPDLVVRHEASRTIVIVDVAVPFENRLEAFVAARERKIAKYAPLAEKLSGDGYRVLVRAFLVGALGSWWPENEAVLSLLRVSERYAAMMRRLMISDTIRWSRDIYVEHVSGVRQYREPTLVNANQNAP

SEQ ID NO: 1722 - protein, 1754 aa, Cerceris rybyensis
MDKSLVAYPCVDGYSCEKCSELCADPRVLRSGGVYAGRGELVKHLKKVHGISAVAYKCGKCDFIGQGVYTLKSVKSHHAKVHGPVPVTPPRANSRINAADIGSLAPGASASSETGGRVGDFAISAGISSVSETVVTPLSAGGSPTILTVAAAQITSTVSVTAATATTSYAERISPAFRRETITNLIARQPATTYAAVTIAPPSAAALAVQATRDAIKRATKPRLPKEAGPRSAGISVTRRPSGEGRPPARTSTSKLSPPKSTASTRTAPTTSRPAQGNAPPRAAAAGRALGMSTTTPPSSRRSSPRHVGGGRNAGSTPPRAIRPRLSGERMRRAGTAPPADRRAPRAAGGRKSNEGRVIPATTCAPRGPGGRKGTEGGERISPPGLRSRRAASVPVVVKLPSRTSTVTRPVVTGPAKGALQVKPLGKSPPRPAATVERKDAGPSSPPTSGGEKLPKVPVEAQTGVHLSSMRLPATTGLPFSRSPVGVAVNNTRPCTSAASVALTTATVTTSCCGAPIVSAIVSAPARPIQGDRPAERALPVVREVVILRPASKKRTPADHQPSLAEEVERDSEGGEQPWRVVAGRRARRTPPPQSPPEMSARSVVSPPIRVSPPPPPVTEVTFPLLPPPGSRGGKHFRKNFDSAPFFRALNERRGSDSRTDEGSPEAVGITSATPTRRCPATRVPAEGRGHAPVSTGVSRSYAAGPQAPSSSPRSGRPDSGRATTSQRGRGERPGGNPAGGNPSRAGASKRRATREELQQRDLLLEIANSVSCIEDLECMATEVAIYFQGCGENRGSTARSEAGTSRSGRSTAGDAGAAGARRGGSGRDTGRAGRPSRPTPSQGEGRRNPVREAARLQRLYRLNRSRAIREVFGGSSPFCQVQREKIQRYFEEVYGGGNDLSGSPPARNTGAPAVGAEGLAQPFTEKEVERRLGRMSNSAPGPDGVSYADLRMADPGSRLLTAVFNACYRLESVPAPWKTSNTVLVYKKGDKDDLSNWRPLALGNTASKLFAALLADRLTGWAVANGRLSWSQKGFLRCEGCYEHNFVLGEILADARRPRKQAVVAWLDLSNAFGSIPHSTISNALEAAGVHPRLHATWKAMYTGCSTRVRAAEGYTSPIPIRSGVKQGCPLSPIVFNLAIESVVRKAIGTRAGYTLHGQRFNILAYADDLALVAETPEGMRDLLRAVEDEARRIGLRFNPAKCASLHVIGGNGGRVLPSEFVLQDVPIRALGAGEPYEHLGIPTGFRVQQTPIATLEQLIECLRAVDASKLTPWQKLESVAVFILPRLDFLLRGSKILRGPLKEVDKYIKRLAKSWMNLPQRASAEVVFLPPSRGGAGLLPLADLADALTIAHAFRLLTSPDAPVRELAWSSLREATFRKTGLSPSNVDLAAYLSGSREGRLQRDATSPGIWANARNAARRQGERLLIRWQWTSEREELSLRLRGSNGRPVILTPRSRSQVVHRVREAVAEYYLHTLLLKKDQGKVYEVSARSKVSNHFLRTGSFTRFADWRFIHRARLDVVPLNGNRRWGEGDKRCRRCGGGLETLPHVLCHCGPHSAAIQLRHNAVLDRLKNASRLPGVLRVNQRIEGVEGELASLRPDLVVRHEASRTIVMVDVAIPFENRAEAFKEARERKLAKYAPLAERLARGGYRVYVDAFLVGALGSWCPKNEAVLRLLRVSERYAAMMRRLMISDTIRWSRDIYVEHVSGVRQYGDPSAESAVGQPAALEGPSQNCIGASVDAEEATGTRPGSE

SEQ ID NO: 1723 - protein, 1755 aa, Cerceris rybyensis
MDKFLVAYPCVDGYSCAKCSELCADPRMLRSGGVYAGRGELVKHLKKAHGISAVAYRCGKCDFIGQGVYTLKSVKSHYAKVHGPVPVTPPRANSRINAADIGSLAPGPSASSETGGRVGVFANSAGISSVSETVVTPLSAGGSPTILTVAAAQTTSTVSVTAATAIINVAERISPAFRREETLNSTARQPATTYAAVTVAPPSAAALAVQATRNAIQRAMKPRLPKEAGPRSAGISVTRRPSGEGRPPARISNVKISPPKTTASTTTAPSTSRPAQGNAPSRAAAAGRAKGPSTTTPPSSRRSSPRHVGGVRNAGSTPPRAVRPRLSGERTRRAGTAPPADRRAPRAAGGRNSTEGRVFPATTCAPRGPGGRKGMEGGEKNSPPVLRTRRAASVPVVVKLPSRTSTVTRPVVTGPAKGALQVKPLGKSPPRPAATVERKNAGPSSPPTSGGEKLPKLPVEAQADVRISPMRLPATTGLPFSRSPVGVAVNNTRPCTSAASVALTTATITTSCCGAPLVSASVSVPARPIQGDRPAERALPVVREVVILRPASKKTTPADHQPSLAEEKKVEDSEGGEQPWKVVAGRRARRTPPPQSPPEMSARSVLSPPTRVSPPPPPVTEVNFPLLPPPGGRTGKHFRKNFDSASSFRALNERRGTDSRTDEGSPEAAGVTSATPTRRCPTTRVPAERRVHAPVSTGVSRSYAAGPQAPSSSPRSGRPDSGRVTTSQRGRSERPGGNPAGSNPSRAGASKRRATREELQQRDLLLEIANSVSCIEDLECMATEVAIYFQGCGENRGSTARSEAGTSRSGRSTAGDAGAAGARRGGSGRDTGRAGRPSRPTPSQGEGRRNPVREAARLQRLYRLNRSRAIREVFGGSSPFCQVQREKIQRYFEEVYGGGNDLSGSPPARNTGAPVVGAEGLAQLFTEKEVERRLGRMSNSAPGPDGVSYADLRMADPGSRLLTAVFNACYRLESVPASWKTSNTVLVFKKGEKDDLSNWRPLALGNTASKLFAALLADRLTDWAVTNGRLSWSQKGFLRCEGCYEHNFVLGEILADARRPRKQAVVAWLDLSNAFGSIPHSTISNALEAAGVHPRLHATWKAMYTGCSTRVRAAEGYTSPIPIRSGVKQGCPLSPIVFNLAIESVVRKAIGTRAGYTLHGQRFNILAYADDLALVAETPEGMRDLLRAVEDEARRTGLRFNPAKCASLHVIGGNGGRVLPSEFVLQDVPIRALGAGEPYEHLGIPTGFRVQQTPIATLEQLIECLRAVDASKLTPWQKLESVAVFILPRLDFLLRGSKILRGPLKEVDKYIKRLAKSWMNLPQRASAEAVFLPPSRGGAGLLPLADLADALTIAHAFRLLTSPDAPVRELAWSSLREATFRKTGLSPSNVDLAAYLSGSREGRLQRDATSPGIWANARNAARRQGERLLIRWQWTSEREELSLRLRGSNGRPVILTPRSRSQVVHRVREAVAEFYLHTLLLKKDQGKVYEVSARSKVSNHFLRTGSFTRFADWRFIHRARLDVVPLNGNRRWGEGDKRCRRCGGGLETLPHVLCHCGPHSAAIQLRHNAVLDRLKNASRLPGVLRVNQRIEGVDGELASLRPDLVVRHEASRTIVMVDVAIPFENRAEAFKEARERKLAKYAPLAERLARDGYRVYVDAFLVGALGSWCPKNEAVLRLLRVSERYAAMMRRLMISDTIRWSRDIYVEHVSGVRQYRDPSSESTVGQPAALEGPSQNRIGASVDAEEATGTRLENE

SEQ ID NO: 1724 - protein, 1755 aa, Cerceris rybyensis
MDKFLVAYPCVEGYSCAKCSELCADPRVLRSGGVYAGRGELVKHLKKAHGISAVAYRCGKCDFIGQGVYTLKSVKSHYAKVHGPVPVTPPRACSRINAADIGSLAPGASASSETGGRVGDFANSAGILPISETVVTPLSAGGSPTILTVAAAQTTSTVSVTAATAIINVAERISPASRREEILNSTARQPATTYAAVTVAPPSAAALAVQATRNAIQRAMKPRLPKEAGPRSAGISVTRRPSGEGRPPARKSNVKISPPKTTASTTTAPSTSRPAQGNAPPRAAAAGRAKGPSTTTPPSSRRSSPRHVGGVRNAGSTPPRAVRPRLSGERTRRAGTAPPADRRAPRAAGGRKSTEGRVFPATTCAPRGPGGRKGMEGGEKNSPPVLRTRRAASVPVVVKLPTRTTTATRSVVTGPEKGALRVKSLGTSPPRPAATVERNLAGPSSPLTRGGEILPKLPVEAQTGVHSSPMRLPATTGLPFSRSPVGVAVNNTRPCTSAASVALTTATITTSCCGAPIVSAIVSAPARPIQGDRPAERALPVVREVVILRPASKKRTPADHQPSLAEEKETMDSEGGEQPWKVVAGRRARRTPPPQSPPEMSARSVLSPPIRVSPPPPPVTEVNFPLLPPPGSRVGKLKEKNGDSAPFFRALNERRGSDSRTDEGSPEAAGITSATPTRRCPATRVPAERRVHAPVSTGVSRSYAAGPQAPSSSPRSGRPDSGRVTTSQRGRSERPGGNPAGSNPSRAGASKRRATREELQQRDLLLEIANSVSCIEDQECMATEVAIYFQGCGENRGSTARSEAGTSRSGRTAVGDAGAAGARRGGSGRDTGRAGRPSRPTPSQGEGRRNPVREAARLQRLYRLNRSRAIREVFGGSSPFCQVQREKIQRYFEEVYGGGNVLSGSPPARNTGAPVVGAEGLAQQFTEKEVERRLGRMSNSAPGPDGVSYADLRMADPGSRLLTAVFNACYRLESVPASWKTSNTVLVFKKGEKDDLSNWRPLALGNTASKLFAALLADRLTDWAVTNGRLSWSQKGFLRCEGCYEHNFVLGEILADARRPRKQAVVAWLDLSNAFGSIPHSTISSALEAAGVHPRLHATWKAMYTGCSTRVRAAEGYTSPIPIRSGVKQGCPLSPIVFNLAIESVVRKAIGTRAGYTLHGQRFNILAYADDLALVAETPEGMRDLLRAVEDEARRIGLRFNPAKCASLHVIGGNGGRVLPSEFVLQDVPIRALGAGEPYEHLGIPTGFRVQQTPIATLEQLIECLRAVDASKLTPWQKLESVAVFILPRLDFLLRGSKILRGPLKEVDKYIKRLAKSWMNLPQRASAEAVFLPPSRGGAGLLPLADLADALTIAHAFRLLTSPDAPVRELAWSSLREATFRKTGLSPSNVDLAAYLSGSREGRLQRDATSPGIWANARNAARRQGERLLIRWQWTSEREELSLRLRGSNGRPVILTPRSRSQVVHRVREAVAEFYLHTLLLKKDQGKVYEVSARSKVSNHFLRTGSFTRFADWRFIHRARLDVVPLNGNRRWGEGDKRCRRCGGGLETLPHVLCHCGPHSAAIQLRHNAVLDRLKNASRLPGVLRVNQRIEGVDGELASLRPDLVVRHEASRTIVMVDVAIPFENRAEAFKEARERKLAKYAPLAERLARDGYRVYVDAFLVGALGSWCPKNEAVLRLLRVSERYAAMMRRLMISDTIRWSRDIYVEHVSGVRQYGDPSAESAVGQPAALEGPSQNCIGASVDAEEATGTRPGSE

SEQ ID NO: 1725 - protein, 1755 aa, Cerceris rybyensis
MDKFLVAYPCVEGYSCAKCSELCADPRMLRSGGVYAGRGELVKHLKKAHGISAVAYKCGKCDFIGQGVYTLKSVKSHYAKVHGPVPVTPPRACSRINAADIGSLAPGASASSEAGGRVGDSAISAGISTVTETVVTPLSAGGSPTILTVAAAQTTSTVSVTAATAITNVAERISPAFRREEILNSTARQPATTYAAVTIAPPSAAALAVQATRAAIQRASKPRLPKEAGPRSAGISVTRRPSGEGRPPARNSNGKISPPKKTTSYTTASTTSRPAQGNAPPRAAAAGRAKGPSTTTPPSSRRSSPRHVGGVRNAGSTPPRAVRPRLSGERTRRAGTAPPADRRAPRAAGGRNSTEGRVFPATTCAPRGPGGRKGMEGGEKNSPPVLRTRRAASVPVVVKLPSRTSTVTRPVVTGPAKGALQVKPLGKSPPRPAATVERKNAGPSSPPTSGGEKLPKLPVEAQADVRISPMRLPATTGLPFSRSPVGVAVNNTRPCTSAASVALTTATITTSCCGAPIVSAIVSAPARPIQGDRPAERALPVVRGVVILRPASKKRTPADHQPSLAEEREKTDSEGEEQPWRVVAGRRARRTPPPPSPPELSARSGLSPPIRVSPPPPPVTEVDFPLLPPPGSRVGKQIRKNIDSAPSFRALNERRGSDSRTDEGSPEAAGITSATPTRRCPTTRVPAERRVHAPVSTGVSRSYAAGPQAPSSSPRSGRPDSGRVTTSQRGRSERPGGNPAGSNPSRAGASKRRATREELQQRDLLLEIANSVSCIEDLECMATEVAIYFQGCGENRGSTARSEAGTSRSGRTAVGDAGAAGARRGGSGRDTGRAGRPSRPTPSQGEGRRNPVREAARLQRLYRLNRSRAIREVFGGSSPFCQVQREKIQRYFEEVYGGGNDLSGSPPARNTGAPAVGAEGLAQLFTEKEVERRLGRMSNSAPGPDGVSYADLRMADPGSRLLTAVFNACYRLESVPASWKTSNTVLVFKKGEKDDLSNWRPLALGNTASKLFAALLADRLTDWAVTNGRLSWSQKGFLRCEGCYEHNFVLGEILADARRPRKQAVVAWLDLSNAFGSIPHSTISNALEAAGVHPRLHATWKAMYTGCSTRVRAGEGYTSPIPIRSGVKQGCPLSPIVFNLAIESVVRKAIGTRAGYTLHGQRFNILAYADDLALVAETPEGMRDLLRAVEDEARRIGLRFNPAKCASLHVIGGNGGRVLPSEFVLQDVPIRALGAGEPYEHLGIPTGFRVQQTPIATLEQLIECLRAVDASKLTPWQKLESVAVFILPRLDFLLRGSKLLRGPLKEVDKYIKRLAKSWMNLPQRASAEVVFLPPSRGGAGLLPLADLADALTIAHAFRLLTSPDAPVRELAWSSLREATFRKTGLSPSNVDLAAYLSGSREGRLQRDATSPGIWANARNAARRQGERLLIRWQWTSEREELSLRLRGSNGRPVILTPRSRSQVVHRVREAVAEFYLHTLLLKKDQGKVYEVSARSKVSNHFLRTGSFTRFADWRFIHRARLDVVPLNGNRRWGEGDKRCRRCGGGLETLPHVLCHCGPHSAAIQLRHNAVLDRLKNASRLPGVLRVNQRIEGVDGELASLRPDLVVRHEASRTIVMVDVAVPFENRAEAFKEARERKLAKYAPLAERLARDGYRVYVDAFLVGALGSWCPKNEAVLRLLRVSERYAAMMRRLMISDTIRWSRDIYVEHVSGVRQYRDPSSESAVGQPAALEGPLQNLIEASVDVGEATGTRPGNE

SEQ ID NO: 1726 - protein, 1758 aa, Cerceris rybyensis
MDKFLIEYPSVEGYSCAKCSELCADPRVLRSGGIYAGRGELVKHLKKAHGISAVAYRCGKCDFIGQGVYTLKSVKSHHAKVHGPVPVTPPRANSRINAADIGSLAPGASASSETGGRIGDFAFSAGISTVSETVVTPLSAGGSPTILTVAAAQITSTVSVTAATATTSYAERISPAFRREEISNSTARQPATTYAAVTVAPPSAAALAVQATRNAIQRAMKPRLPKEAGPRSAGISVTRRPSGEGRPPARKSNVKISPPKTTASTMTAPSTSRPAQGNAPPRAAAAGRAKGPSTTTPPSSRRSSPRHVGGARNAGSTPPRAVRPRLSGGRTHRAGTAPPDDRRAPRAAGGRKSIDERATPATTCAPRGPGGRKGTEGGERISPPGLRSRRAASVPVVVKLPSRTSTVTRPVVTGPAKGALQVKPRGKSPPRPAATVERKNAGPSSPPTSGGEKLPKVPVEAQTGVHFSSMRLPATTGLPFSRSPVGVAVNNTRPCTSAASVALTTATVTTSCCGAPIVSAIVSAPARPIQGDRPAERALPVVREVVILRPASKKRTPADHQPSLAEEREKSDSEGEEQPWRVVAGRRARRTPPPQSPPEMSARSVVSPPIRVSPPPPPVTEVTFPLLPPPGSRVGKPIRKNSDSAPFFRALNERRGSDSRTDEGSPEAAGVTSATPTRRCPTTRVPAERRVHAPVSTGVSRSYAAGPQAPSSSPRSGRPDSGRVTTSQRGRSERPGGNPAGSIPSRAGASKRRATREELQQRDLLLEIANSVSCIEDLECMATEVAIYFQGCGENRGSTARSEAGTSRSGRTAVGDAGAAGARRGGSGRDTGRAGRPSRPTPSQGEGRRNPVREAARLQRLYRLNRSRAIREVFGGSSPFCQVQREKIQRYFEEVYGGGNDLSGSPPARNTGAPVVGAEGLAQQFTEKEVERRLGRMSNSAPGPDGVSYADLRMADPGSRLLTAVFNACYRLESVPTSWKTSNTVLVFKKGDKDDLSNWRPLALGNTASKLFAALLADRLTDWAVTNGRLSWSQKGFLRCEGCYEHNFVLGEILADARRPRKQAVVAWLDLSNAFGSIPHSTISSALEAAGVHPRLHATWKAMYTGCSTRVRAAEGYTSPIPIRSGVKQGCPLSPIVFNLAIESVVRKAIGTRAGYTLHGQRFNILAYADDLALVAETPEGMRDLLRAVEDEARRIGLRFNPAKCASLHVIGGNGGRVLPSEFVLQDVPIRALGAGEPYEHLGIPTGFRVQQTPIATLEQLIECLRAVDASKLTPWQKLESVAVFILPRLDFLLRGSKILRGPLKEVDKYIKRLAKSWMNLPQRASAEVVFLPPSRGGAGLLPLADLADALTIAHAFRLLTSPDAPVRELAWSSLREATFRKTGLSPSNVDLAAYLSGSREGRLQRDATSPGIWANARNAARRQGERLLIRWQWTSEREELSLRLRGSNGRPVILTPRSRSQVVHRVREAVAEFYLHTLLLKKDQGKVYEVSARSKVSNHFLRTGSFTRFADWRFIHRARLDVVPLNGNRRWGEGDKRCRRCGGGLETLPHVLCHCGPHSAAIQLRHNAVLDRLKNASRLPGVLRVNQRIEGVDGELASLRPDLVVRHEASRTIVMVDVAIPFENRAEAFKEARERKLAKYAPLAERLARDGYRVYVDAFLVGALGSWCPRNEAVLRLLRVSERYAAMMRRLMISDTIRWSRDIYVEHVSGVRQYGDPSAESAVGQPAAQEGPSQNRIGASVDAEEATGTRPGCESLN

SEQ ID NO: 1727 - protein, 1755 aa, Cerceris rybyensis
MDKFLVAYPCVDGYSCEKCSELCADPRMLRSGGVYAGRGELVKHLKKAHGISAVAYKCGKCDFIGQGVYTLKSVKSHYAKVHGPVPVTPPRACSRINAADIGSLAPGASASSEAGGRVGDSAISAGISTVMETVVTPLSAGGSPTILTVAAAQTTSTVSVTAAAAITSYAERISPAFRREEILNSTARQPATTYAAVTIAPPSAAALAVQATRDAIKRASKPRLPKEAASRSAGISVTRRPSGEGRPPARISTSKISPPKKSSSTSTAPTTSRPAQGNAPPRAAAAGRAKGPSTTTPPSSRRSSPRHVGGVRNAGSTPPRAVRPRLSGERTRRAGTAPPADRRAPRAAGGRKSIEERATPATTCAPRGPGGRKGTEGGERISPPVSRSRRAASVPVVVQLPPRTKIVTRPVVTGPVKGALRVKSLGTSPPRPAATIERKNSGPSSPLTRGGEILPKLPVEAQTGVHSSPMRLPATTGLPFSRSPVGVAVNNTRPCTSAASVALTTATITTSCCGAPIVSAIVSAPARPIQGDRPAERALPVVREVVILRPASKKRTPADHQPSLAEEKETMDSEGGEQPWKVVAGRRARRTPPPLSPPELSARSVISPPTRVSPPPPPVTEVNFPLLPPPGSRMGKLLRKNFDSANVFRALNERRVSDSRTDEGSPEAAGITSATPTRRCPTTRVPAERRVHAPVSTGVSRSYAAGPQAPSSSPRSGRPDSGRVTTSQRGRSERPGGNPAGSNPSRAGASKRRATREELQQRDLLLEIANSVSCIEDLECMATEVAIYFQGCGENRGSTARSEAGTSRSGRSTAGDAGAAGARRGGSGRDTGRAGRPSRPTPSQGEGRRNPVREAARLQRLYRLNRSRAIREVFGGSSPFCQVQREKIQRYFEEVYGGGNVLSGSPPARNTGAPVVGAEGLAQLFTEKEVERRLGRMSNSAPGPDGVSYADLRMADPGSRLLTAVFNACYRLESVPASWKTSNTVLVFKKGEKDDLSNWRPLALGNTASKLFAALLADRLTDWAVTNGRLSWSQKGFLRCEGCYEHNFVLGEILADARRPRKQAVVAWLDLSNAFGSIPHSTISNALEAAGVHPRLHATWKAMYTGCSTRVRAAEGYTSPIPIRSGVKQGCPLSPIVFNLAIESVVRKAIGTRAGYTLHGQRFNILAYADDLALVAETPEGMRDLLRAVEDEARRIGLRFNPAKCASLHVIGGNGGRVLPSEFVLQDVPIRALGAGEPYEHLGIPTGFRVQQTPIATLEQLIECLRAVDASKLTPWQKLESVAVFILPRLDFLLRGSKLLRGPLKEVDKYIKRLAKSWMNLPQRASAEVVFLPPSRGGAGLLPLADLADALTIAHAFRLLTSPDAPVRELAWSSLREATFRKTGLSPSNVDLAAYLSGSREGRLQRDATSPGIWANARNAARRQGERLLIRWQWTSEREELSLRLRGSNGRPVILTPRSRSQVVHRVREAVAEFYLHTLLLKKDQGKVYEVSARSKVSNHFLRTGSFTRFADWRFIHRARLDVVPLNGNRRWGEGDKRCRRCGGGLETLPHVLCHCGPHSAAIQLRHNAVLDRLKNASRLPGVLRVNQRIEGVDGELASLRPDLVVRHEASRTIVMVDVAIPFENRAEAFKEARERKLAKYAPLAERLARDGYRVYVDAFLVGALGSWCPKNEAVLRLLRVSERYAAMMRRLMISDTIRWSRDIYVEHVSGVRQYGDPSAESAVGQPAALEGPSQNRIGASVDAEEATGTHPGYE

SEQ ID NO: 1728 - protein, 1755 aa, Cerceris rybyensis
MDKFLIEYPSVEGYSCAKCSELCADPRVLRSGGIYAGRGELVKHLKKAHGISAVAYKCGKCDFIGQGVYTLKSVKSHHAKVHGPVPVTPPRANSRINAADIGQLAPGTSASSESGGRVGDFAFSAGISSVSETVVTPLSAGGSPTILTVAAALTTSTVSVTAATAITSYAERISPASRREEILNSTARQPATTYAAVTVAPPSAAALAVQATRNAIQRAMKPRLPKEAGPRSAGISVTRRPSGDGRPPARISTSKLSPPKKTASTSTAPTTSRPAQGNAPPRAAAAGRAKGPSTTTPPSSRRSSPRHVGGARNAGSTPPRAVRPRLSGERTRRAGTAPPADRRAPRAAGGRKSIEERATPATTCAPRGPGGRKGTERGERVTPPVLRSRRAASVPVVGNLPPRTKIVTRPVVTGPEKGALRVKSLGMSPPRPAATVERNLAGPSSPPTSGGEILPKVPVEAQTGVHISPMRLPATTGLPFSRSPVGVAVNNTRPCTSAASVALTTATITTSCCGAPLVSASVSVPARPIQGDRPAERALPVVREVVILRPASKKTTPADHQPSLAEEKKVEDSEGEEQPWKVVAGRRARRTPPPQSPPEMSARSVLSPPTRVSPPPPPVTEVNFPLLPPPGSRMGKPTRKNFDSAPSFRALNERRGSDSRTDEGSPEAAGVTSATPTRRCPTTRVPAERRVHAPVSTGVSRSYAAGPQAPSSSPRSGRPDSGRVTTSQRGRSERPGGNPAGSNPSRAGASKRRATREELQQRDLLLEIANSVSCIEDLECMATEVAIYFQGCGENRGSTARSEAGTSRSGRTAVGDAGAAGARRGGSGRDTGRSGRPSRPTPSQGEGRRNPVREAARLQRLYRLNRSRAIREVFGGSSPFCQVQREKIQRYFEEVYGGGNDLSGSPPARNTGAPAVGAESLAQPFTEKEVERRLGRMSNSAPGPDGVSYADLRMADPGSRLLTAVFNACYRLESVPASWKTSNTVLVFKKGEKDDLSNWRPLALGNTASKLFAALLADRLTDWAVTNGRLSWSQKGFLRCEGCYEHNFVLGEILADARRPRKQAVVAWLDLSNAFGSIPHSTISNALEAAGVHPRLHATWKAMYTGCSTRVRAAEGYTSPIPIRSGVKQGCPLSPIVFNLAIESVVRKAIGTRAGYTLHGQRFNILAYADDLALVAETPEGMRDLLRAVEDEARRIGLRFNPAKCASLHVIGGNGGRVLPSEFVLQDVPIRALGAGEPYEHLGIPTGFRVQQTPIATLEQLIECLRAVDASKLTPWQKLESVAVFILPRLDFLLRGSKLLRGPLKEVDKYIKRLAKSWMNLPQRASAEVVFLPPSRGGAGLLPLADLADALTIAHAFRLLTSPDAPVRELAWSSLREATFRKTGLSPSNVDLAAYLSGSREGRLQRDATSPGIWANARNAARRQGERLLIRWQWTSEREELSLRLRGSNGRPVILTPRSRSQVVHRVREAVAEFYLHTLLLKKDQGKVYEVSARSKVSNHFLRTGSFTRFADWRFIHRARLDVVPLNGNRRWGEGDKRCRRCGGGLETLPHVLCHCGPHSAAIQLRHNAVLDRLKNASRLPGVLRVNQRIEGVDGELASLRPDLVVRHEASRTIVMVDVAIPFENRAEAFKEARERKLAKYAPLAERLARDGYRVYVDAFLVGALGSWCPKNEAVLRLLRVSERYAAMMRRLMISDTIRWSRDIYVEHVSGVRQYGDPSAESAVGQPAALEGPLQNLIEAPVDAGEATGTRPGYE

SEQ ID NO: 1729 - protein, 1758 aa, Cerceris rybyensis
MDKFLVAYPCVDGYSCAKCSELCADPRMLRSGGVYAGRGELVKHLKKAHGISAVAYKCGKCDFIGQGVYTLKSVKSHHAKVHGPVPVTPPRANSRINAADIGSLAPGASASSETGGRIGDFAFSAGISTVSETVVTPLSAGGSPTILTVAAAQITSTVSVTAATATTSYAERISPAFRREEILNSTARQPATTYAAVTIAPPSAAALAVQATRNAIQRAMKPRLPKEAGPRSAGISATRRPSGEGRPPARISTSKLSPPKKTTSTSTAPTTSRPAQGNAPPRAAAAGRAKGPSTTTPPSSRRSSPRHVGGVRNAGSTPPRAVRPRLSGGRTHRAGTAPPDDRRAPRAAGGRKSNEGRVIPATTCAPRGPGGRKGTERGERVTPPVLRSRRAASVPVVGNLPPRTKIVTRPVVTGPVKGALRVKSLGTSPPPPAATIERNRTGPSSPPTSGGEILPKLPVEAQTGVHSSPLRLPATTGLPFSRSPVGVAVNNTRPCTSAASVALTTVTITTSCCGAPIVSASVSAPARPIQGDRPAERALPVVREVVILRPASKKRTPADHQPSLAEEREKTDSEGEEQPWRVVAGRRARRTPPPQSPPEMSARSVFSPPIRVSPPPPPVTEVNFPLLPPPGSRVGKQNKKNIDSAPSFRALNERRGTGSRTDEGSPEAAGISPATPTRRCPTTRVPAEGRGHAPVSTGVSRSYAAGPQAPSSSPRSGRPDSGRVTTSQRGRSERPGGNPAGSNPSRAGASKRRATREELQQRDLLLEIANSVSCIEDLECMATEVAIYFQGCGENRGSTARSEAGTSRSGRSTAGDAGAAGARRGGSGRDTGRAGRPSRPTPSQGEGRRNPVREAARLQRLYRLNRSRAIREVFGGSSPFCQVQREKIQRYFEEVYGGGNVLSGSPPARNTGAPVVGAEGLAQLFTEKEVERRLGRMSNSAPGPDGVSYADLRMADPGSRLLTAVFNACYRLESVPASWKTSNTVLVFKKGEKDDLSNWRPLALGNTASKLFAALLADRLTDWAVTNGRLSWSQKGFLRCEGCYEHNFVLGEILADARRPRKQAVVAWLDLSNAFGSIPHSTISNALEAAGVHPRLHATWKAMYTGCSTRVRAAEGYTSPIPIRSGVKQGCPLSPIVFNLAIESVVRKAIGTRAGYTLHGQRFNILAYADDLALVAETPEGMRDLLRAVEDEARRIGLRFNPAKCASLHVIGGNGGRVLPSEFVLQDVPIRALGAGEPYEHLGIPTGFRVQQTPIATLEQLIECLRAVDASKLTPWQKLESVAVFILPRLDFLLRGSKLLRGPLKEVDKYIKRLAKSWMNLPQRASAEVVFLPPSRGGAGLLPLADLADALTIAHAFRLLTSPDAPVRELAWSSLREATFRKTGLSPSNVDLAAYLSGSREGRLQRDATSPGIWANARNAARRQGERLLIRWQWTSEREELSLRLRGSNGRPVILTPRSRSQVVHRVREAVAEYYLHTLLLKKDQGKVYEVSARSKVSNHFLRTGSFTRFADWRFIHRARLDVVPLNGNRRWGEGDKRCRRCGGGLETLPHVLCHCGPHSAAIQLRHNAVLDRLKNASRLPGVLRVNQRIEGVDGELASLRPDLVVRHEASRTIVMVDVAIPFENRAEAFKEARERKLAKYAPLAERLARDGYRVYVDAFLVGALGSWCPKNEAVLRLLRVSERYAAMMRRLMISDTIRWSRDIYVEHVSGVRQYGDPSSESAVGQPDAREGSMQNSIEASDDAQEATGTRPGCESVN

SEQ ID NO: 1730 - protein, 1744 aa, Cerceris rybyensis
MEFTLEYPSAEGLPCEICRESCSNPRLLKSGGMYAGRGELVKHLKRSHGAKTVNYRCKECGFIGSGVYSLKSVKLHYAKNHGPNPVTPPRGCTRVRAAIMGPSIPGPSSPVSEEIGGNPPISVNVTPLTAGGSPTILTVAATTTTVTVSSPAATSRSNIAVTVAPIFLRGGNSNSSARQPATTFASVTAAPPSAAALTTMATRAAIREANKARQKITEAAASRSAGPSTSRRKSSEGAPPAQNSSPVVKRGRGRPPKASLTSSTATTTTRPAPRKAPTKAAAAGSARVSSIFTPPSSRRSDPRQSGGVSGTGITPPVVARPRVSGVRTTRAGTSSPPERRAPRATGGRRSSVGATNPSTACAPRGTGGRRGSEGKGRSTPPILRPRRAASVPVEIKPPTKSFATRSAVTGSGISGLRVRSRASQSPRLAAAIERDSPGSSASPVSGVAIMSEVPAEVKAGVQSPSKRLPAVIGLPFSRSPETTAGNNTRICTSASSAALTTATVTTSCCGAPRTSPCVSAPERPTQGVRPAERALPVVREVVILRAASKKTPPPPGLLPAEEVVEETSEGGLPWQVVAGRRARKTTPPLTPTGISGRPCRISPPDRASPPPPPVTTANFPLLPPPGGRVRSSKNKNINSASPFYRSRGEREGGASPAGVPIPPPTHLDEFRVSTGRSASVRGAAGESRRVAAGPSTARDTPRSGRPESGRVTTPQQERPRGARQPSEGGNPRRSGASKRRATREELQQRDLLIGLAEAASTVEDLEVVATEIAAYFQSCGEKRSTTARSETGNGRRGGTAGSDRRYAGGNRGGAERGSGRREETSRSDPSQGERRWNPVREAARIQRLYRQNRSRAIREVFGGSSPFCQVQREEVFRYFKEVHGESDCLPSPPPPFGRTTGTPEVDSEGLARLFSEKEVGDRLGRASNSAPGPDGITYSDLRMADPGSRLLTAVFNLCYRLESVPSSWKTSNTVLVYKKGDKSDLSNWRPLALGNTAGKLFAALIADRLTDWAVGSGRISWAQKGFLRCEGCYEHNFVLGEVLADARKTGKQAVVAWLDLSNAFGSIPHATIRNALVSAGVHPRILNTWNSMYNGCTTRIRAAEGYTNPIPIRSGVRQGCPLSPITFNLAIESVIRKAIGSGAGYSLHGQRFSILAYADDLALIADTPEGMRDLLRAVEGEARRIGLCFNPAKCATLHVIGGRGGGVIPSVFTLQDIPMRALAEGESYDHLGIPTGFRVDQTPIASIEELIECLRAVDDSKLAPWQKLEAVAVFVLPRLDFLLRGAKILRGPLKEVDKYVRRLAKSWMNLPQRASAEIVFLPPSRGGGGLLPLADLADALTIAHAFRLLSAPDAPVRDLAWSSLRVAATRGLATATSNADLAAFLSGDRTGRSQWEATVPGIWSSTRTAARKHADRWGFCWRWSSELNELALSLRGARGRPVIVTPRSRGQVVARMRETVAEYYQSTLLLKRDQGKVFEVSGRERVSNHFLRTGSFTRFADWRFIHRARLDVVPLNGNRRWGDGDKRCRRCGESLETLPHVICHCGPHSAAIQLRHNAILERLKAATRMPGSIRINQRIEGAGEEFATLRPDLVVRHEASRTIVVVDVAVPFENRLEAFVAARERKIAKYAPLAEKLSGDGYRVLVRAFLVGALGSWWPENEAVLSLLRVSERYAAMMRRLMISDTIRWSRDIYVEHVSGVRQYREPPPARPARNVPRGPEPNEADVEASGGVDRTTGTRPENE

SEQ ID NO: 1731 - protein, 1755 aa, Cerceris rybyensis
MDKFLIEYPSVEGYSCAKCSELCADPRVLRSGGIYAGRGELVKHLKKAHGISAVAYKCGKCDFIGQGVYTLKSVKSHHAKVHGPVPVTPPRANSRINAADIGQLAPGTSASSESGGRVGDFAFSAGISSVSETVVTPLSAGGSPTILTVAAALTTSTVSVTAATAITSYAERISPASRREEILNSTARQPATTYAAVTVAPPSAAALAVQATRNAIQRAMKPRLPKEAGPRSAGISVTRRPSGDGRPPARISTSKLSPPKKTASTSTAPTTSRPAQGNAPPRAAAAGRAKGPSTTTPPSSRRSSPRHVGGARNAGSTPPRAVRPRLSGERTRRAGTAPPADRRAPRAAGGRKSIEERATPATTCAPRGPGGRKGTERGERVTPPVLRSRRAASVPVVGNLPPRTKIVTRPVVTGPEKGALRVKSLGMSPPRPAATVERNLAGPSSPPTSGGEILPKVPVEAQTGVHISPMRLPATTGLPFSRSPVGVAVNNTRPCTSAASVALTTATITTSCCGAPLVSASVSVPARPIQGDRPAERALPVVREVVILRPASKKTTPADHQPSLAEEKKVEDSEGEEQPWKVVAGRRARRTPPPQSPPEMSARSVLSPPTRVSPPPPPVTEVNFPLLPPPGSRMGKPTRKNFDSAHVFRALNERRGSDSRTDEGSPEAAGVTSATPTRRCPTTRVPAERRVHAPVSTGVSRSYAAGPQAPSSSPRSGRPDSGRVTTSQRGRSERPGGNPAGSNPSRAGASKRRATREELQQRDLLLEIANSVSCIEDLECMATEVAIYFQGCGENRGSTARSEAGTSRSGRTAVGDAGAAGARRGGSGRDTGRSGRPSRPTPSQGEGRRNPVREAARLQRLYRLNRSRAIREVFGGSSPFCQVQREKIQRYFEEVYGGGNDLSGSPPARNTGAPAVGAESLAQPFTEKEVERRLGRMSNSAPGPDGVSYADLRMADPGSRLLTAVFNACYRLESVPASWKTSNTVLVFKKGEKDDLSNWRPLALGNTASKLFAALLADRLTGWAVTNGRLSWSQKGFLRCEGCYEHNFVLGEILADARRPRKQAVVAWLDLSNAFGSIPHSTISNALEAAGVHPRLHATWKAMYTGCSTRVRAAEGYTSPIPIRSGVKQGCPLSPIVFNLAIESVVRKAIGTRAGYTLHGQRFNILAYADDLALVAETPEGMRDLLRAVEDEARRIGLRFNPAKCASLHVIGGNGGRVLPSEFVLQDVPIRALGAGEPYEHLGIPTGFRVQQTPIATLEQLIECLRAVDASKLTPWQKLESVAVFILPRLDFLLRGSKLLRGPLKEVDKYIKRLAKSWMNLPQRASAEVVFLPPSRGGAGLLPLADLADALTIAHAFRLLTSPDAPVRELAWSSLREATFRKTGLSPSNVDLAAYLSGSREGRLQRDATSPGIWANARNAARRQGERLLIRWQWTSEREELSLRLRGSNGRPVILTPRSRSQVVHRVREAVAEFYLHTLLLKKDQGKVYEVSARSKVSNHFLRTGSFTRFADWRFIHRARLDVVPLNGNRRWGEGDKRCRRCGGGLETLPHVLCHCGPHSAAIQLRHNAVLDRLKNASRLPGVLRVNQRIEGVDGELASLRPDLVVRHEASRTIVMVDVAIPFENRAEAFKEARERKLAKYAPLAERLARDGYRVYVDAFLVGALGSWCPKNEAVLRLLRVSERYAAMMRRLMISDTIRWSRDIYVEHVSGVRQYGDPSAESAVGQPAALEGPLQNLIEAPVDAGEATGTRPGYE

SEQ ID NO: 1732 - protein, 1755 aa, Cerceris rybyensis
MDKFLVAYPCVDGYSCAKCSELCADPRVLRSGGVYAGRGELVKHLKKAHGISAVAYKCGKCDFIGQGVYTLKSVKSHHAKVHGPVPVTPPRANSRINAADIGSLAPGASASSETGGRVGDLAISAGIFPISETVVTPLSAGGSPTILTVAAAQTTSTVSVTAATAITSSAERISPAFRREEISNSTARQPATTYAAVTVAPPSAAALAVQATRDAIKRATKPRLPKEAGPRSAGISVTRRPSGDGRPPARISITKLSPPKTTASTKTASTTSRPAQGNAPPRAAAAGRAPGTSTITPPSSRRSSPRHVGGGRNAGSTPPRAIRPRVSGERTRRAGTAPPADRRAPRAAGGRKSIEGRVIPATTCAPRGPGGRKGTEGGERISPPGLRSRRAASVPVVVKLPPRTKIVTRPVVTGPEKGALQVKPLGTSPPRPAATIERISSGPSSPPTSGGEILPKVPVEAQTGVHFSPMRLPATTGLPFSRSPVGVAVNNTRPCTSAASVALTTATITTSCCGAPLVSASVSVPARPIQGDRPAERALPVVREVVILRPASKKITPTDQQSSLALEKEKLDSEGEEQPWKVVAGRRARRTPPPLSPPELSARSVISPPTRVSPPPPPVTEVNFPLLPPPGSRMGKLIRKNFDSANVFRALNERRGSDSRTDEGSPEAAGITSATPTRRCPTTRVPAGGRGHAPVSTGVSRSYAAGPQAPSSSPRSGRPDSDRVTTSQRGRSERPGGNPAGSNPSRAGASKRRATREELQQRDLLLEIANSVSCIEDLECMATEVAIYFQGCGENRGPTARSEAGTSRPGRTAVGDAGAAGARRGGSGRDTGRAGRPSRPTPSQGEGRRNPVREAARLQRLYRLNRSRAIREVFGGSSPFCQVQREKIQRYFEEVYGGGNVLSGSPPARNTGAPAVGAEGLAQPFTEKEVERRLGRMSNSAPGPDGVSYADLRMADPGSRLLTAVFNACYRLESVPASWKTSNTVLVFKKGEKDDLSNWRPLALGNTASKLFAALLADRLTGWAVANGRLSWSQKGFLRCEGCYEHNFVLGEILADARRPRKQAVVAWLDLSNAFGSIPHSTISSALEAAGVHPRLHATWKAMYTGCSTRVRAAEGYTSPIPIRSGVKQGCPLSPIVFNLAIESVVRRAIGTRAGYTLHGQRFDILAYADDLALVAETPEGMRDLLRAVEDEARRIGLRFNPAKCASLHVIGGNGGRVLPSEFVLQDVPIRALGAGEPYEHLGIPTGFRVQQTPIATLEQLIECLRAVDASKLTPWQKLESVAVFILPRLDFLLRGSKILRGPLKEVDKYIKRLAKTWMNLPQRASAEVVFLPPSRGGAGLLPLADLADALTIAHAFRLLTSPDAPVRELAWSSLREATFRKTGLSPSNVDLAAYLSGSREGRLQRDATSPGIWANARNAARRQGERLLIRWQWTSEREELSLRLRGSNGRPVILTPRSRSQVVRRVREAVAEYYLHTLLLKKDQGKVYEVSARSKVSNHFLRTGSFTRFADWRFIHRARLDVVPLNGNRRWGEGDKRCRRCGGGLETLPHVLCHCGPHSAAIQLRHNAVLDRLKNASRLPGVLRVNQRIEGVDGELASLRPDLVVRHEASRTIVMVDVAIPFENRAEAFKEARERKLAKYAPLAERLARDGYRVYVDAFLVGALGSWCPKNEAVLRLLRVSERYAAMMRRLMISDTIRWSRDIYVEHVSGVRQYGDPSAESAVGQPAAPEGPSQNSIEASVDAEEATGTRPGCE

SEQ ID NO: 1733 - protein, 1755 aa, Cerceris rybyensis
MDKFLVAYPCVEGYSCAKCSELCADPRVLRSGGVYAGRGELVKHLKKAHGISAVAYRCGKCDFIGQGVYTLKSVKSHYAKVHGPVPVTPPRACSRINAADIGSLAPGASASSETGGRVGDLAISAGILPISETVVTPLSAGGSPTILTVAAAQTTSTVSVTAATAIINVAERISPAFRREEILNSTARQPATTYAAVTVAPPSAAALAVQATRNAIQRAMKPRLPKEAGPRSAGISVTRRPSGEGRPPARKSNVKISPPKTTASTTTAPSTSRPAQGNAPPRAAAAGRAKGPSTTTPPSSRRSSPRHVGGVRNAGSTPPRAVRPRLSGERTRRAGTAPPADRRAPRAAGGRKSTEGRVFPATTCAPRGPGGRKGMEGGEKNSPPVLRTRRAASVPVVVKLPTRTTTATRSVVTGPEKGALRVKSLGTSPPRPAATVERNLAGPSSPLTRGGEILPKVPVEAQTGVHFSSMRLPATTGLPFSRSPVGVAVNNTRPCTSAASVALTTATVTTSCCGAPIVSAIVSAPARPIQGDRPAERALPVVREVVILRPASKKRTPADHQPSLAEEREKSDSEGEEQPWKVVAGRRARRTPPPQSPPEMSARSVVSPPIRVSPPPPPVTEVDFPLLPPPGSRVGKQIRKNIDSAPSFRALNERRGTGSRTDEGSPEAAGISSATPTRRCPTTRVPAEGRGHASVSTGVNRSYAAGPQAPSSSPRSGRPDSGRVTTSQRGRSERPGGNPAGSNPSRAGASKRRATREELQQRDLLLEIANSVSCIEDLECMATEVAIYFQGCGENRGSTARSEAGTSRPGRTAVGGAGAAGARRGGSGRDIGRAGRPSRPTPSQGEGRRNPVREAARLQRLYRLNRSRAIREVFGGSSPFCQVQREKIQRYFEEVYGGGNDLSGSPPARNTGAPAVGAEGLAQLFTEKEVERRLGRMSNSAPGPDGVSYADLRMADPGSRLLTAVFNACYRLESVPASWKTSNTVLVFKKGDKDDLSNWRPLALGNTASKLFAALLADRLTDWAVTNGRLSWSQKGFLRCEGCYEHNFVLGEILADARRPRKQAVVAWLDLSNAFGSIPHSTISNALEAAGVHPRLHATWKAMYTGCSTRVRAAEGYTSPIPIRSGVKQGCPLSPIVFNLAIESVVRKAIGTRAGYTLHGQRFNILAYADDLALVAETPEGMRDLLRAVEDEARRIGLRFNPAKCASLHVIGGNGGRVLPSEFVLQDVPIRALGAGEPYEHLGIPTGFRVQQTPIATLEQLIECLRAVDASKLTPWQKLESVAVFILPRLDFLLRGSKLLRGPLKEVDKYIKRLAKSWMNLPQRASAEVVFLPPSRGGAGLLPLADLADALTIAHAFRLLTSPDAPVRELAWSSLREATFRKTGLSPSNVDLAAYLSGSREGRLQRDATSPGIWANARNAARRQGERLLIRWQWTSEREELSLRLRGSNGRPVILTPRSRSQVVHRVREAVAEFYLHTLLLKKDQGKVYEVSARSKVSNHFLRTGSFTRFADWRFIHRARLDVVPLNGNRRWGEGDKRCRRCGGGLETLPHVLCHCGPHSAAIQLRHNAVLDRLKNASRLPGVLRVNQRIEGVDGELASLRPDLVVRHEASRTIVMVDVAIPFENRAEAFKEARERKLAKYAPLAERLARDGYRVYVDAFLVGALGSWCPKNEAVLRLLRVSERYAAMMRRLMISDTIRWSRDIYVEHVSGVRQYGDPSAESAVGQPAALDGPLQNLIEAPVDAGEATGTRPGYE

SEQ ID NO: 1734 - protein, 1755 aa, Cerceris rybyensis
MDKFLIEYPSVEGYSCAKCSELCADPRVLRSGGIYAGRGELVKHLKKAHGISAVAYRCGKCDFIGQGVYTLKSVKSHYAKVHGPVPVTPPRANSRINAADIGSLAPGASASSETGGRVGDFANSAGILPISETVVTPLSAGGSPTILTVAAALTTSTVSVTAATAITNVAERISPAFRREVNLNLTARQPATTYAAVTIAPPSAAALAVQATRAAIQRATKPRLPKEAGPRSAGISVTRRPSGDGRPPARISTSKLSPPKKTASTSTAPTTSRPAQGNAPPRAAAAGRAKGPSTTTPPSSRRSSPRHVGGARNAGSTPPRAVRPRLSGERTRRAGTAPPADRRAPRAAGGRKSIEERATPATTCAPRGPGGRKGTERGERVTPPVLRSRRAASVPVVGNLPPRTKIVTRPVVTGPEKGALRVKSLGMSPPRPAATVERNLAGPSSPPTSGGEILPKVPVEAQTGVHLSPLRLPATTGLPFSRSPVGVAVNNTRPCTSAASVALTTATITTSCCGAPLVSASVSVPARPIQGDRPAERALPVVREVVILRPASKKTTPADHQPSLAEEKKVEDSEGEEQPWKVVAGRRARRTPPPQSPPEMSARSVLSPPTRVSPPPPPVTEVNFPLLPPPGSRMGKLNRKNSDSAHVFRALNERRGSDSRTDEGSPEAAGVTSATPTRRCPTTRVPAERRVHAPVSTGVSRSYAAGPQAPSSSPRSGRPDSGRVTTSQRGRSERPGGNPAGSNPSRAGASKRRATREELQQRDLLLEIANSVSCIEELECMATEVAIYFQGCGENRGSTARSEAGTSRPGRSTAGDAGAAGARRGGSGRDTGRAGRPSRPTPSQGEGRRNPVREAARLQRLYRLNRSRAIREVFGGSSPFCQVQREKIQRYFEEVYGGGNVLSGSPPARNTGAPVVGAEGLARLFTEKEVERRLGRMSNSAPGPDGVSYADLRMADPGSRLLTAVYNACYRLESVPASWKTSNTILVFKKGEKDDLSNWRPLALGNTASKLFAALLADRLTDWAVTNGRLSWSQKGFLRCEGCYEHNFVLGEILADARRPRKQAVVAWLDLSNAFGSIPHSTISSALEAAGVHPRLHATWKAMYTGCSTRVRAAEGYTSPIPICSGVKQGCPLSPIVFNLAIESVVRKAIGTRAGYTLHGQRFNILAYADDLALVAETPEGMRDLLRAVEDEARRIGLRFNPAKCASLHVIGGNGGRVLPSEFVLQDVPIRALGAGEPYEHLGIPTGFRVQQTPIATLEQLIECLRAVDASKLTPWQKLESVAVFILPRLDFLLRGSKILRGPLKEVDKYIKRLAKSWMNLPQRASAEVVFLPPSRGGAGLLPLADLADALTIAHAFRLLTSPDAPVRELAWSSLREATFRKTGLSPSNVDLAAYLSGSREGRLQRDATSPGIWANARNAARRQGERLLIRWQWTSEREELSLRLRGSNGRPVILTPRSRSQVVHRVREAVAEFYLHTLLLKKDQGKVYEVSARSKVSNHFLRTGSFTRFADWRFIHRARLDVVPLNGNRRWGEGDKRCRRCGGGLETLPHVLCHCGPHSAAIQLRHNAVLDRLKNASRLPGVLRVNQRIEGVDGELASLRPDLVVRHEASRTIVMVDVAIPFENRAEAFKEARERKLAKYAPLAERLARDGYRVYVDAFLVGALGSWCPKNEAVLRLLRVSERYAAMMRRLMISDTIRWSRDIYVEHVSGVRQYGDPSAESAVGQPAALEGPSQNRIGASVDAEEATGTRPGYE

SEQ ID NO: 1735 - protein, 1754 aa, Cerceris rybyensis
MDKFLIEYPSVEGYSCAKCSELCADPRVLRSGDIYAGRGELVKHLKKAHGISAVAYKCGKCDFIGQGVYTLKSVKSHHAKVHGPVPVTPPRANSRINAADIGSLAPGASASSETGGRVGDFANSAGILPISETVVTPLSAGGSPTILTVAAAQTTSTVSVTAATAITSSAERISPAFRREEISNSTARQPATTYAAVTVAPPSAAALAVQATRDAIKRATKPRLPKEAGPRSAGISVTRRPSGEGRPPARNSNGKISPPKKTTSYTTASTTSRPAQGNAPPRAAAAGRAKGPSTTTPPSSRRSSPRHVGGVRNAGSTPPRAVRPRLSGERTRRAGTAPPADRRAPRAAGGRKSTEGRVIPATTCAPRGPGGRKGMEGGEKNSPPVLRTRRAASVPVVVNLPSRTTTATRPVVTGPEKGALRVKPHGTSPPRPAATIERKSSGPSSPLTRGGEILPKLPVEAQTGVHSSPMRLPATTGLPFSRSPVGVAVNNTRPCTSAASVALTTATITTSCCGAPIVSAIVSAPARPIQGDRPAERALPVVREVVILRPASKKRTPADHQPSLAEEIEMDSEGGEQPWRVVAGRRARRTPPPKSPPEMSARSVLSPPIRVSPPPPPVTEVNFPLLPPPGSRVGNKNRKNFDSASSFRALNERRGTGSRTDEGSPEAAGISSATPTRRCPTTRVPAEGRGHAPVSTGVNRSYAAGPQAPSSSPRSGRPDSGRVTTSQRGRSERPGGNPAGSNPSRAGASKRRATREELQQRDLLLEIANSVSCIEDLECMAAEVAIYFQGCGENRGSTARSEAGTSRSGRTAVGGAGAAGARRGGSGRDIGRAGRPSRPTPSQGEGRRNPVREAARLQRLYRLNRSRAIREVFGGSSPFCQVQREKIQRYFEEVYGGGNVLSGSPPARNTGAPAVGAESLAQPFTEKEVERRLGRMSNSAPGPDGVSYADLRMADPGSRLLTAVFNACYRLESVPASWKTSNTVLVFKKGEKDDLSNWRPLALGNTASKLFAALLADRLTDWAVTNGRLSWSQKGFLRCEGCYEHNFVLGEILADARRPRKQAVVAWLDLSNAFGSIPHSTISNALEAAGVHPRLHATWKAMYTGCSTRVRAAEGYTSPIPIRSGVKQGCPLSPIVFNLAIESVVRKAIGTRAGYTLHGQRFNILAYADDLALVAETPEGMRDLLRAVEDEARRIGLRFNPAKCASLHVIGGNGGRVLPSEFVLQDVPIRALGAGEPYEHLGIPTGFRVQQTPIATLEQLIECLRAVDASKLTPWQKLESVAVFILPRLDFLLRGSKILRGPLKEVDKYIKRLAKSWMTLPQRASAEAVFLPPSRGGAGLLPLADLADALTIAHAFRLLTSPDAPVRELAWSSLREATFRKTGLSPSNVDLAAYLSGSREGRLQRDATSPGIWANARNAARRQGERLLIRWQWTSEREELSLRLRGSNGRPVILTPRSRSQVVHRVREAVAEFYLHTLLLKKDQGKVYEVSARSKVSNHFLRTGSFTRFADWRFIHRARLDVVPLNGNRRWGEGDKRCRRCGGGLETLPHVLCHCGPHSAAIQLRHNAVLDRLKNASRLPGALRVNQRIEGVDGELASLRPDLVVRHEASRTIVMVDVAIPFENRAEAFKEARERKLAKYAPLAERLARDGYRVYVDAFLVGALGSWCPKNEAVLRLLRVSERYAAMMRRLMISDTIRWSRDIYVEHVSGVRQYGDPSAESAVGQPAALEGPSQNRIGASVDAEEATGTRPGYE

SEQ ID NO: 1736 - protein, 1755 aa, Cerceris rybyensis
MDKFLVAYPCVEGYSCAKCSELCADPRVLRSGGVYAGRGELVKHLKKAHGISAVAYRCGKCDFIGQGVYTLKSVKSHYAKVHGPVPVTPPRACSRINAADIGSLAPGASASSETGGRVGDFANSAGILPISETVVTPLSAGGSPTILTVAAAQTTSTVSVTAATAIINVAERISPASRREEILNSTARQPATTYAAVTVAPPSAAALAVQATRNAIQRAMKPRLPKEAGPRSAGISVTRRPSGEGRPPARKSNVKISPPKTTASTTTAPSTSRPAQGNAPPRAAAAGRAKGPSTTTPPSSRRSSPRHVGGVRNAGSTPPRAVRPRLSGERTRRAGTAPPADRRAPRAAGGRKSTEGRVFPATTCAPRGPGGRKGMEGGEKNSPPVLRTRRAASVPVVVKLPTRTTTATRSVVTGPEKGALRVKSLGTSPPRPAATVERNLAGPSSTLTRGGEILPKLPVEAQTGVHFPSMRLPATTGLPFSRSPVGVAVNNTRPCTSAASVALTTATITTSCCGAPIVSAIVSAPARPIQGDRPAERALPVVREVVILRPASEKRTPDDHQPSLAEKKEMMDSEGGEQPWKVVAGRRARRTPPPLSPPELSARSAFSPPIRVSPPPPPVTEVNFPLLPPPGGRVGKHISVKINSALSFRALNERRGSDSRTDEGSPEAAGVTSATPTRRCPATRVPAERRVHAPVSTGVSRSYAAGPQAPSSSPRSGRPDSGRVTTSQRGRSERPGGNPAGSNPSRAGASKRRATREELQQRDLLLEIANSASCIEDLECMATEVAIYFQGCGENRGSTARSEAGTSRSGRSTAGDVGAAGARRGGSGRDTGRAGRPSRPTPSQGEGRRNPVREAARLQRLYRLNRSRAIREVFGGSSPFCQVQREKIQRYFEEVYGGGNDLSGSPPARNTGAPAVGAEGLAQPFTEKEVERRLGRMSNSAPGPDGVSYADLRMADPGSRLLTAVFNACYRLESVPASWKTSNTVLVFKKGEKDDLSNWRPLALGNTASKLFAALLADRLTGWAVTNGRLSWSQKGFLRCEGCYEHNFVLGEILADARRPRKQAVVAWLDLSNAFGSIPHSTISSALEAAGVHPRLHATWKAMYTGCSTRVRAAEGYTSPIPIRSGVKQGCPLSPIVFNLAIESVVRKAIGTRAGYTLHGQRFNILAYADDLALVAETPEGMRDLLRAVEDEARRIGLRFNPAKCASLHVIGGNGGRVLPSEFVLQDVPIRALGAGEPYEHLGIPTGFRVQQTPIATLEQLIECLRAVDASKLTPWQKLESVAVFILPRLDFLLRGSKILRGPLKEVDKYIKRLAKSWMNLPQRASAEVVFLPPSRGGAGLLPLADLADALTIAHAFRLLTSPDAPVRELAWSSLREATFRKTGLSPSNVDLAAYLSGSREGRLQRDATSPGIWANARNAARRQGERLLIRWQWTSEREELSLRLRGSNGRPVILTPRSRSQVVHRVREAVAEFYLHTLLLKKDQGKVYEVSARSKVSNHFLRTGSFTRFADWRFIHRARLDVVPLNGNRRWGEGDKRCRRCGGGLETLPHVLCHCGPHSAAIQLRHNAVLDRLKNASRLPGVLRVNQRIEGVDGELASLRPDLVVRHEASRTIVMVDVAIPFENRAEAFKEARERKLAKYAPLAERLARDGYRVYVDAFLVGALGSWCPKNEAVLRLLRVSERYAAMMRRLMISDTIRWSRDIYVEHVSGVRQYGDPSLESAVGQPDAREGPTQNSIEASVDAGEATGTRPGNE

SEQ ID NO: 1737 - protein, 1753 aa, Cerceris rybyensis
MERILISFPSVGGYPCPICSTSGVDPRLLRGGVYAGRGELAKHLKRIHGAESVGYKCSECDFTGEGRYPVKAVKLHYASAHGPVPVTPPRKCSRIDASAMVPLAPGHSASSESGGRVGDSADSAGIINVETTDVTPLSAGGSPTILTVAAALITETVSVTAATTITSNAERISPAFRREKYLTSSARQPATTYAAVTSAPPSAAAMAVQATRAAIQRATKPRLQKEAASRSAGISATRRPSGEGRPPARIVTKNLSPPTTSASTKDASTTSRPAQDNAPPRVAAAGRAKGSSTITPPSSRRSIPRHVGGRSSTGPILPGAVRPRLSGERTRRAGTAPPDDRRAPRAAGGRRSSEGHSNPLTAGAPRGPGGRKGMERGERASPPVLRSRRAASVPVVIKLPSRTKTATRSVVTGTTKGAPRVKPLGTSPPRPAATVERENIVPSSPPTSGGGKSPKLPVEAQADVHHSPMRLPATTGLPFSRSPVGVAVNNTRPCTSAASVALTTVTITTSCCGAPLVSASVSVPARPIQGDRPAVRALPVVREVVILRPASKKTTPADHQPPLAEETEIVSEGEEQPWKVVAGRRARRTPPPQSPPEMPARPDFSPPVRVSPLPPPVTEVTFPLLPPPGSRVGKHIRRNIDSAPSFRALNERRGSDSRTDEGSPEAAGVTSATPTRRCPATRVPAERRVHAPVSTGVSRSYAAGPQAPSSSPRSGRPDSGRVTTSQRGRSERPGGNPAGSNPSRAGASKRRATREELQQRDLLLEIANSVSCLEDLECMAAEVAIYFQGCGENRGSTARSEAGTNRSGRTAGGDAGAAGARRGGSGRDTGRAGRHSRPTPSQREGRRNPVREAARLQGLYRLNRSRAIREVFGGSSPFCQVQREEIQRYFEEVYGGGNDLSGLTPARITGAPAAGAEGLAQPFTEKEVERRLGRMSNSAPGPDGVSYADLRMADPGSRLLTAVFNACYRLESVPTPWKTSNTVLVFKKGNKDDLSNWRPLALGNTASKLYAALLADRLTDWAVASGRLSWSQKGFLRCEGCYEHNFVLGEILADARRPRKQAVVAWLDLSNAFGSIPHSTISSALEAAGVHPRLHATWKAMYTGCSTRVRAAEGYTSPIPIRSGVKQGCPLSPIVFNLAIESVVRKAIGTRAGYTLHGQRFNILAYADDLALVAETPEGMRDLLRAVEGESRRIGLRFNPAKCASLHVIGGNGGRVLSSEFVLQDVPIRALGAGEPYEHLGIPTGFRVQQTPIATLEQLIECLRAVDASKLTPWQKLESVAVFILPRLDFLLRGAKILRGPLKEVDKFIKRLAKSWMNLPQRASAEVVFLPPSRGGAGLLPLADLADALTIAHAFRMLTSPDAPVRELAWASLREATLRKTGLSPSNVDLAAYLSGSREGRLQRDATSPGIWANARNAARRQEEKLQIRWQWTSEREELSLRLRGTNGRPVILTPRSRSQVVHRVREAVAEYYLHTLLLKKDQGKVYEVSARSKVSNHFLRTGSFTRFADWRFIHRARLDVVPLNGNRRWGEGDKRCRRCGGGLETLPHVLCHCGPHSAAIQLRHNAVLDRLKNASRLPGVLRINQRIEGVDGELASLRPDLVVRHEASRTIVMVDVAIPFENRAEAFKEARERKLAKYAPLAERLARDGYRVYVDAFLVGALGSWCPKNEAVLRLLRVSERYAAMMRRLMISDTIRWSRDIYVEHVSGVRQYRGPSSESAVGQPDAREGSMQNCSNTSGVVELAMGTRPGSE

SEQ ID NO: 1738 - protein, 1754 aa, Cerceris rybyensis
MDKFLVAYPCVDGYSCAKCSELCADPRMLRSGGVYAGRGELVKHLKKAHGISAVAYRCGKCDFIGQGVYTLKSVKSHYAKVHGPVPVTPPRANSRINAADIGSLAPGASASSETGGRVGDFANSAGILPISETVVTPLSAGGSPTILTVAAAQTTSTVSVTAATAITSSAERISPASRREEILNSTARQPATTYAAVTVAPPSAAALAVQATRNAIQRAMKPRLPKEAGPRSAGISVTRRPSGEGRPPARISTSKLSPPKKSTSTTTAPSTSRPAQGNAPPRAAAAGRAKGPSTTTPPSSRRSSPRHVGGARNAGSTPPRAVRPRLSGERTRRAGTAPPADRRAPRAAGGRKSIDERATPATTCAPRGPGGRKGTEGGERNSPPVIRTRRAASVPVVVKLPPRTKIVTRPVVTGPAKGALRAKSLGTSPPRPAAAIERKNSGPSSPLTRGGEILPKLPVEAQTGVHSSPMRLTATTGLPFSRSPVGVAVNNTRPCTSAASVALTTATITTSCCGAPIVSAIVSAPARPIQGDRPAERALPVVREVVILRPASKKRTPADHQPSLAEEIEMDSEGGEQPWRVVAGRRARRTPPPQSPPEMSARSVLSPPIRVSPPPPPVTEVNFPLLPPPGSRVGNKNRKNFDSASSFRALNERRGTGSRTDEGSPEAAGISSATPTRRCPTTRVPAEGRGHAPVSTGGSRSYAAGPQAPSSSPRSGRPDSGRVTTSQRGRGERPGGNPAGGNPSRAGASKRRATREELQQRDLLLEIANSVSCIEDLECMATEVAIYFQGCGENRGSTARSEAGTSRSGRTAVGDAGAAGARRGGSGRDTGRAGRPSRPTPSQGEGRRNPVREAARLQRLYRLNRSRAIREVFGGSSPFCQVQREKIQRYFEEVYGGGNVLSGSPPARNTGAPVVGAEGLAQLFTEKEVERRLGRMSNSAPGPDGVSYADLRMADPGSRLLTAVFNACYRLESVPASWKTSNTVLVFKKGEKDDLSNWRPLALGNTASKLFAALLADRLTDWAVTNGRLSWSQKGFLRCEGCYEHNFVLGEILADARRPRKQAVVAWLDLSNAFGSIPHSTISSALEAAGVHPRLHATWKAMYTGCSTRVRAAEGYTSPIPIRSGVKQGCPLSPIVFNLAIESVVRKAIGTRAGYTLHGQRFNILAYADDLALVAETPEGMRDLLRAVEDEARRIGLRFNPAKCASLHVIGGNGGRVLPSEFVLQDVPIRALGAGEPYEHLGIPTGFRVQQTPIATLEQLIECLRAVDASKLTPWQKLGSVAVFILPRLDFLLRGSKLLRGPLKEVDKYIKRLAKSWMNLPQRASAEVVFLPPSRGGAGLLPLADLADALTIAHAFRLLTSPDAPVRELAWSSLREATFRKTGLSPSNVDLAAYLSGSREGRLQRDATSPGIWANARNAARRQGERLLIRWQWTSEREELSLRLRGSNGRPVILTPRSRSQVVHRVREAVAEFYLHTLLLKKDQGKVYEVSARSKVSNHFLRTGSFTRFADWRFIHRARLDVVPLNGNRRWGEGDKRCRRCGGGLETLPHVLCHCGPHSAAIQLRHNAVLDRLKNASRLPGVLRVNQRIEGVDGELASLRPDLVVRHEASRTIVMVDVAIPFENRAEAFKEARERKLAKYAPLAERLARDGYRVYVDAFLVGALGSWCPKNEAVLRLLRVSERYAAMMRRLMISDTIRWSRDIYVEHVSGVRQYRDPSSESAVGQPAALEGPSQNCIGASVDAEEATGTRPGCE

SEQ ID NO: 1739 - protein, 1755 aa, Cerceris rybyensis
MDKFLIEYPSVEGYSCAKCSELCADPRVLRSGGIYAGRGELVKHLKKAHGISAVAYRCGKCDFIGQGVYTLKSVKSHYAKVHGPVPVTPPRANSRINAADIGQLAPGTSASSESGGRVGDFAFSAGIFPISETVVTPLSAGGSPTILTVAAAQTTSTVSVTAATAITNVAERISPAFRRETISNLIARQPATTYAAVTIAPPSAAALAVQATRDAIKRATKPRLPKEAGPRSAGISVTRRPSGEGRPPARTSITKLSPPKTTASTKAASTTSRPAQTNAPTKAAAAGRAQGSSTTTPPSSRRSSPRHVGGGRNAGSTPPRAIRPRLSGERTRRAGTAPPADRRAPRAAGGRKSIEGRVIPATTCAPRGPGGRKGSIGGERISPPALRSRRAASVPVVGKLPPRTKIVTRPVVTGPVKGALRVKSLGTTPPRPAATIERNLTGPSSPPTSGGEILPKMPVEALTGVHFSPMRLPATTGLPFSRSPVGVAVNNTRPCTSAASVALTTATITTSCCGAPLVSASVSVPARPIQGDRPAERALPVVREVVILRPASKKTTPADHQPSLAEEKKVEDSEGGEQPWKVVAGRRARRTPPPQSPPEMSARSVVSPPIRVSPPPPPVTEVTFPLLPPPGSRVGKHFRKNFDSAPSFRALNERRGTDSRTDEGSPEAAGVTSATPTRRCPTTRVPAERRVHAPVSTGVNRSYAAGPQAPSSSPRSGRPDSGRVTTSQRGRSERPGGNPAGGNPSRAGASKRRATREELQQRDLLLEIANSVSCTEDLECMAAEVAIYFQGCGENRGSTARSEAGTSRSGRTAVGGAGAAGARRGGSGRDIGRAGRPSRPTPSQGEGRRNPVREAARLQRLYRLNRSRAIREVFGGSSPFCQVQREKIQRYFEEVYGGGNVLSGSPPARNTGAPVVGAEGLAQLFTEKEVERRLGRMSNSAPGPDGVSYADLRMADPGSRLLTAVFNACYRLESVPASWKTSNTVLVFKKGEKDDLSNWRPLALGNTASKLFAALLADRLTDWAVTNGRLSWSQKGFLRCEGCYEHNFVLGEILADARRPRKQAVVAWLDLSNAFGSIPHSTISNALEAAGVHPRLHATWKAMYTGCSTRVRAGEGYTSPIPIRSGVKQGCPLSPIVFNLAIESVVRKAIGTRAGYTLHGQRFNILAYADDLALVAETPEGMRDLLRAVEDEARRIGLRFNPAKCATLHIIGGNGGRVLPSEFVLQDVPIRALGAGEPYEHLGIPTGFRVQQTPIATLEQLIECLRAVDASKLTPWQKLESVAVFILPRLDFLLRGSKLLRGPLKEVDKYIKRLAKSWMNLPQRASAEVVFLPPSRGGAGLLPLADLADALTIAHAFRLLTSPDAPVRELAWSSLREATFRKTGLSPSNVDLAAYLSGSREGRLQRDATSPGIWANARNAARRQGERLLIRWQWTSEREELSLRLRGSNGRPVILTPRSRSQVVHRVREAVAEYYLHTLLLKKDQGKVYEVSARSKVSNHFLRTGSFTRFADWRFIHRARLDVVPLNGNRRWGEGDKRCRRCGGGLETLPHVLCHCGPHSAAIQLRHNAVLDRLKNASRLPGVLRVNQRIEGVDGELASLRPDLVVRHEASRTIVMVDVAIPFENRAEAFKEARERKLAKYAPLAERLARDGYRVYVDAFLVGALGSWCPKNEAVLRLLRVSERYAAMMRRLMISDTIRWSRDIYVEHVSGVRQYGDPSAESAVGQPAAPEGPSQNCIGASVDAEEAMGTRPGYE

SEQ ID NO: 1740 - protein, 1477 aa, Cerceris rybyensis
MRHRGPRLLGERRDLPPPPPPSSRRSSPRHVGGVRNAGSTPPRAVRPRLSGERTRRAGTAPPADRRAPRAAGGRKSTEGRVFPATTCAPRGPGGRKGMEGGEKNSPPVLRTRRAASVPVVVKLPTRTTTATRSVVTGPEKGALRVKSLGTSPPRPAATVERNLAGPSSPLTRGGEILPKVPVEAQTGVHLSPLRLPATTGLPFSRSPVGVAVNNTRPCTSAASVALTTATITTSCCGAPIVSASVSAPARPIQGDRPAERALPVVREVVILRPASKKRTPADHQPSLAEEKEKDSEGEEQPWKVVAGRRARRTPPPLSPPELSARSVFSPPTRVSPPPPPVTEVNFPLLPPPGSRVGKHNRRNFDSAHSFRALNERRGSDSRTDEGSPEAAGITSATPTRRCPATRVPAGGRGHAPVSTGVSRSYAAGPQAPSSSPRSGRPDSGRVTTSQRGRSERPGGNPAGSNPSRAGASKRRATREELQQRDLLLEIANSVSCTEDLECMATEVAIYFQGCGENRGLTARSEAGTSRSGRSTAGDAGAAGARRGGSGRDTGRAGRSSRPTPSQGEGRRNPVREAARLQRLYRLNRSRAIREVFGGSSPFCQVQREKIQRYFEEVYGGGNVLSGSPPARNTGAPAVGAEGLAQPFTEKEVERRLGRMSNSAPGPDGVSYADLRMADPGSRLLTAVFNACYRLESVPASWKTSNTVLVFKKGEKDDLSNWRPLALGNTASKLFAALLADRLTDWAVTNGRLSWSQKGFLRCEGCYEHNFVLGEILADARRPRKQAVVAWLDLSNAFGSIPHSTISNALEAAGVHPRLHATWKAMYTGCSTRVRAAEGYTSPIPIRSGVKQGCPLSPIVFNLAIESVVRKAIGTRAGYTLHGQRFNILAYADDLALVAETPEGMRDLLRAVEDEARRIGLRFNPAKCASLHVIGGNGGRVLPSEFVLQDVPIRALGAGEPYEHLGIPTGFRVQQTPIATLEQLIECLRAVDASKLTPWQKLESVAVFILPRLDFLLRGSKLLRGPLKEVDKYIKRLAKSWMNLPQRASAEVVFLPPSRGGAGLLPLADLADALTIAHAFRLLTSPDAPVRELAWSSLREATFRKTGLSPSNVDLAAYLSGSREGRLQRDATSPGIWANARNAARRQGERLLIRWQWTSEREELSLRLRGSNGRPVILTPRSRSQVVHRVREAVAEFYLHTLLLKKDQGKVYEVSARSKVSNHFLRTGSFTRFADWRFIHRARLDVVPLNGNRRWGEGDKRCRRCGGGLETLPHVLCHCGPHSAAIQLRHNAVLDRLKNASRLPGVLRVNQRIEGVDGELASLRPDLVVRHEASRTIVMVDVAIPFENRAEAFKEARERKLAKYAPLAERLARDGYRVYVDAFLVGALGSWCPKNEAVLRLLRVSERYAAMMRRLMISDTIRWSRDIYVEHVSGVRQYGDPSVESAVGQPAAREGPSQNSIEASGDAEEATGTRPGCE

SEQ ID NO: 1741 - protein, 1381 aa, Cerceris rybyensis
MEGGEKNSPPVLRTRRAASVPVVVKLPSRTSTVTRPVVTGPAKGALQVKPLGKSPPRPAATVERKNAGPSSPPTSGGEKLPKLPVEAQADVRISPMRLPATTGLPFSRSPVGVAVNNTRPCTSAASVALTTATITTSCCGAPIVSAIVSAPARPIQGDRPAERALPVVREVVILRPASKKRTPADHQPSLAEEKETMDSEGGEQPWKVVAGRRARRTPPPQSPPEMSARSVLSPPIRVSPPPPPVTEVNFPLLPPPGSRVGKLKEKNGDSAPFFRALNERRGSDSRTDEGSPEAAGITSATPTRRCPTTRVPAERRVHAPVSTGVSRSYAAGPQAPSSSPRSGRPDSGRVTTSQRGRSEQPGGNPAGSNPSRAGASKRRATREELQQRDLLLEIANSVSCTEELECMATEVAIYFQGCGENRGSTARSEAGTSRSGRTAVGGAGAAEARRGGSGRDTGRAGRPSRPTPSQGEGRRNPVREAARLQRLYRLNRSRAIREVFGGSSPFCQVQREKIQRYFEEVYGGGNVLSGSPPARNTGAPVVGAEGLAQLFTEKEVERRLGRMSNSAPGPDGVSYADLRMADPGSRLLTAVFNACYRLESVPASWKTSNTVLVFKKGEKDDLSNWRPLALGNAASKLFAALLADRLTDWAVTNGRLSWSQKGFLRCEGCYEHNFVLGEILADARRPRKQAVVAWLDLSNAFGSIPHSTISNALEAAGVHPRLHATWKAMYTGCSTRVRAAEGYTSPIPIRSGVKQGCPLSPIVFNLAIESVVRKAIGTRAGYTLHGQRFNILAYADDLALVAETPEGMRDLLRAVEDEARRIGLRFNPAKCASLHVIGGNGGRVLPSEFVLQDVPIRALGAGEPYEHLGIPTGFRVQQTPIATLEQLIECLRAVDASKLTPWQKLESVAVFILPRLDFLLRGSKLLRGPLKEVDKYIKRLAKSWMNLPQRASAEVVFLPPSRGGAGLLPLADLADALTIAHAFRLLTSPDAPVRELAWSSLREATFRKTGLSPSNVDLAAYLSGSREGRLQRDATSPGIWANARNAARRQGERLLIRWQWTSEREELSLRLRGSNGRPVILTPRSRSQVVHRVREAVAEFYLHTLLLKKDQGKVYEVSARSKVSNHFLRTGSFTRFADWRFIHRARLDVVPLNGNRRWGEGDKRCRRCGGGLETLPHVLCHCGPHSAAIQLRHNAVLDRLKNASRLPGVLRVNQRIEGVDGELASLRPDLVVRHEASRTIVMVDVAIPFENRAEAFKEARERKLAKYAPLAERLARDGYRVYVDAFLVGALGSWCPKNEAVLRLLRVSERYAAMMRRLMISDTIRWSRDIYVEHVSGVRQYGDPSAESAVGQPAALEGPSRNHIEASVDVGEATGTRPGNE

SEQ ID NO: 1742 - protein, 1745 aa, Cerceris rybyensis
MEFTLEYPSAEGLPCEICRESCSNPRLLKSGGMYAGRGELVKHLKRSHGAKTVNYRCKECGFIGSGVYSLKSVKLHYAKNHGPNPVTPPRGCTRVRAAIMGPSIPGPSSPVSEEIGGNPPISVNVTPLTAGGSPTILTVAAATTTVTVSSPAATSRSNIAVTVAPIFLRGGNSNSSARQPATTFASVTAAPPSAAALTTMATRAAIREANKARQKITEAAASRSAGPSTSRRKSSEGAPPAQNSSPVVKRGRGRPPKASLTSSTATTTTRPAPRKAPTKAAAAGSARVSSIFTPPSSRRSDPRQSGGVSGTGITPPVVARPRVSGVRTTRAGTSSPPERRAPRATGGRRSSVGATNPSTACAPRGTGGRRGSEGKGRSTPPILRPRRAASVPVEIKPPTKSFATRSAVTGSGISGLRVRSRASQSPRLAAAIERDSPGSSASPVSGVAIMSEVPAEVKAGVQSPSKRLPAVIGLPFSRSPETTAGNNTRICTSASSAALTTATVTTSCCGAPRTSPCVSAPERPTQGVRPAERALPVVREVVILRAASKKTPPPPGLLPAEEVVEETSEGGLPWQVVAGRRARKTTPPLTPTGISGRPCRISPPDRASPPPPPVTTANFPLLPPPGGRVRSSKNKNINSASPFYRSRGEREGGASPAGVPIPPPTHLDEFRVSTGRSASVRGAAGVSRRVAAGPSTARDTPRSGRPESGRVTTPQQERPRGARQPSEGGNPRRSGASKRRATREELQQRDLLIGLAEAASTVEDLEVVATEIAAYFQSCGEKRSTTARSETGNGRRGGTAGSDRRYAGGNRGGAERGSGRREETSRSDPSQGERRWNPVREAARIQRLYRQNRSRAIREVFGGSSPFCQVQREEVFRYFKEVHGESDCLPSPPPPFGRNTGTPEVDSEGLARLFSEKEVGDRLGRASNSAPGPDGITYSDLRMADPGSRLLTAVYNLCYRLESVPSSWKTSNTVLVYKKGNKSDLSNWRPLALGNTAGKLFAALIADRLTDWAVGSGRISWAQKGFLRCEGCYEHNFVLGEVLADARNTRKQAVVAWLDLSNAFGSIPHATIRNALVSAGVHPCILNTWNSMYDGCTTRIRAAEGYTNPIPIRSGVRQGCPLSPITFNLAIESVIRKAIGSGAGYSLHGQRFSILAYADDLALIADTPEGMRDLLRAVEGEARRIGLRFNPAKCATLHVIGGRGGGVIPSVFTLQDIPMRALAEGESYDHLGIPTGFRVDQTPIASIEELIECLRAVDDSKLAPWQKLETVAVFVLPRLDFLLRGAKILRGPLKEVDKYVRRLAKLWMNLPQRASAEIVFLPPSRGGGGLLPLADLADALTIAHAFRLLSAPDAPVRDLAWSSLRVAATRGLATATSNADLAAFLSGDRTGRSQWEATVPGIWSSTRTAARKHADRWGFCWRWTPELNELALSLRGARGRPVIVTPRSRGQVVARMRETVAEYYQSTLLLKRDQGKVFEVSGRERVSNHFLRTGSFTRFADWRFIHRARLDVVPLNGNRRWGDDDKRCRRCGESLETLPHVICHCGPHSAAIQLRHNAILERLKAATRMPGSIRINQRIEGAGEEFAALRPDLVVRHEASRTIVIVDVAVPFENRLEAFVAARQRKIAKYAPLAEKLSRDGYRVLVRAFLVGALGSWWPENEAVLSLLRVSERYAAMMRRLMISDTIRWSRDIYVEHVSGVRQYREPPLTRSARNVSRGPGQSESYAEASGGGGETAGTRPEGMN

SEQ ID NO: 1743 - protein, 1642 aa, Cerceris rybyensis
MDKFLIEYPSVEGYSCAKCSELCADPRVLRSGGIYAGRGELVKHLKKAHGISAVAYRCGKCDFIGQGVYTLKSVKSHYAKVHGPVPVTPPRACSRINAADIGSLAPGASASSETGGRVGDFAFSAGILPISETVVTPLSAGGSPTILTVAAAQTTSTVSVTAATAITSSAERISPAFRRVEISNLIARQPATTYAAVTIAPPSAAALAVQATRAAIQRASKPRLPKEAGPRSAGTSVTRRPSGEGRPPARISTSKLSPPKKTASTSTAPTTSRPAQRNAPTKAAAAGRAQGSSTTTPPSSRRSSPRHVGGVRNAGSTPPRAVRPRLSGERTRRAGTAPPADRRAPRAAGGRKSIEERATPATTCAPRGPGGRKGSIGGERISPPGLRSRRAASVPVVVKLPSRTSTVTRPAVTGPAKGALQVKPLGKSPPRPAATVERKNAGPSSPPTSGGEKLPKVPVEALTGVHFSSMRLPATTGLPFSRSPVGVAVNNTRPCTSAASVALTTATVTTSCCGAPIVSAIVSAPARPIQGDRPAERALPVVREVVILRPASKKRTPADHQPSLAEEIEMDSEGGEQPWRVVAGRRARRTPPPQSPPEMSARSVVSPPIRVSPPPPPVTEVTFPLLPPPGSRVGKPIRKNSDSAPFFRALNERRGSDSRTDEGSPEAAGVTSATPTRRCPTTRVPAERRVHAPVSTGVSRSYAAGPQAPSSSPRSGRPDSGRVTTSQRGRSERPGGNPAGSNPSRAGASKRRATREELQQRDLLLEIANSVSCTEELECMATEVAIYFQGCGENRGSTARSEAGTSRPGRTAVGDAGAAGARRGGSGRDTGRAGRPSRPTPSQGEGRRNPVREAARLQRLYRLNRSRAIREVFGGSSPFCQVQREKIQRYFEEVYGGGNVLSGSPPARNTGAPVVGAEGLAQLFTEKEVERRLGRMSNSAPGPDGVSYADLRMADPGSRLLTAVFNACYRLESVPASWKTSNTVLVFKKGEKDDLSNWRPLALGNTASKLFAALLADRLTDWAVTNGRLSWSQKGFLRCEGCYEHNFVLGEILADARRPRKQAVVAWLDLSNAFGSIPHSTISNALEAAGVHPRLHATWKAMYTGCSTRVRAAEGYTSPIPIRSGVKQGCPLSPIVFNLAIESVVRKAIGTRAGYTLHGQRFNILAYADDLALVAETPEGMRDLLRAVEDEARRIGLRFNPAKCASLHVIGGNGGRVLPSEFVLQDVPIRALGAGEPYEHLGIPTGFRVQQTPIATLEQLIECLRAVDASKLTPWQKLESVAVFILPRLDFLLRGSKLLRGPLKEVDKYIKRLAKSWMNLPQRASAEVVFLPPSRGGAGLLPLADLADALTIAHAFRLLTSPDAPVRELAWSSLREATFRKTGLSPSNVDLAAYLSGSREGRLQRDATSPGIWANARNAARRQGERLLIRWQWTSEREELSLRLRGSNGRPVILTPRSRSQVVHRVREAVAEFYLHTLLLKKDQGKVYEVSARSKVSNHFLRTGSFTRFADWRFIHRARLDVVPLNGNRRWGEGDKRCRRCGGGLETLPHVLCHCGPHSAAIQLRHNAVLDRLKNASRLPGVLRVNQRIEGVDGELASLRPDLVVRHEASRTIVMVDVAIRSKTERKPSRKRGSVNSLNTLP

SEQ ID NO: 1744 - protein, 1755 aa, Cerceris rybyensis
MDKFLVAYPCVDGYSCEKCSELCTDPRVLRSGGVYAGRGELVKHLKKAHGISAVAYKCGKCDFIGQGVYTLKSVKSHYAKVHGPVPVTPPRACSRINAADIGQLAPGPSASSESGGRVGDFANSAGIFPILETVVTPLSAGGSPTILTVAAAQTTSTVSVTAATVTTNVAERISPAFRREETSNLTARQPATTYAAVTVAPPSAAALAVQATRDAIKRATKPRLPKEAGPRSAGISVTRRPSGEGRPPARTSITKLSPPKTTASTKAASTTSRPAQRNAPTKAAAAGRASGTSTITPPSSRRSSPRHVGGVRNAGSTPPRAVRPRLSGERTRRAGTAPPADRRAPRAAGGRKSIEERATPATTCAPRGPGGRKGTEGGERNSPPAVRTRRAASVPVVVKLPPRTSTVTRPVVTGPAKGALQVKPLGKSPPRPAATVERKNAGPSSPPTSGGEKLPKVPVEAQTGVHFSSMRLPATTGLPFSRSPVGVAVNNTRPCTSAASVALTTATITTSCCGAPIVSAIVSAPARPIQGDRPAERALPVVREVVILRPASKKRTPADHQPSLAEEREKTDSEGEEQPWRVVAGRRARRTPPPPSPPELSARSGFSPPIRVSPPPPPVTEVDFPLLPPPGSRVGKHKIIKINSAPSFRALNERRGPDSRTDEGSPEAAGITSATPTRRCPTTRVPAERRVHAPVSTGVNRSYAAGPQAPSSSPRSGRPDSGRVTTSQRGRSERPGGNPNGGNPSRAGASKRRATREELQQRDLLLEIANSVSCTEDLECMAAEVAIYFQGCGENRGSTARSEAGTSRSGRTAVGGAGAAGARRGGSGRDTGRAGRSSRPTPSQGEGRRNPVREAARLQRLYRLNRSRAIREVFGGSSPFCQVQREKIQRYFEEVYGGGNDLSGSPPARNTGAPAVGAEGLAQLFTEKEVERRLGRMSNSAPGPDGVSYADLRMADPGSRLLTAVFNACYRLESVPASWKTSNTVLVFKKGDKDDLSNWRPLALGNTASKLFAALLADRLTDWAVTNGRLSWSQKGFLRCEGCYEHNFVLGEILADARRPRKQAVVAWLDLSNAFGSIPHSTISNALEAAGVHPRLHATWKAMYTGCSTRVRAAEGYTSPIPIRSGVKQGCPLSPIVFNLAIESVVRKAIGTRAGYTLHGQRFNILAYADDLALVAETPEGMRDLLRAVEDEARRIGLRFNPAKCASLHVIGGNGGRVLPSEFVLQDVPIRALGAGEPYEHLGIPTGFRVQQTPIATLEQLIECLRAVDASKLTPWQKLESVAVFILPRLDFLLRGSKLLRGPLKEVDKYIKRLAKSWMNLPQRASAEVVFLPPSRGGAGLLPLADLADALTIAHAFRLLTSPDAPVRELAWSSLREATFRKTGLSPSNVDLAAYLSGSREGRLQRDATSPGIWANARNAARRQGERLLIRWQWTSEREELSLRLRGSNGRPVILTPRSRSQVVHRVREAVAEFYLHTLLLKKDQGKVYEVSARSKVSNHFLRTGSFTRFADWRFIHRARLDVVPLNGNRRWGEGDKRCRRCGGGLETLPHVLCHCGPHSAAIQLRHNAVLDRLKNASRLPGVLRVNQRIEGVDGELASLRPDLVVRHEASRTIVMVDVAIPFENRAEAFKEARERKLAKYAPLAERLARDGYRVYVDAFLVGALGSWCPKNEAVLRLLRVSERYAAMMRRLMISDTIRWSRDIYVEHVSGVRQYGGPSLESAVGQPDAREGPTQNSIEASVDAEVATGTRPVCE

SEQ ID NO: 1745 - protein, 975 aa, Cerceris rybyensis
MAAEVAIYLQGCGENRGSTARSEAGSNRPGRTAVGDAGAAGARRGGSGRDTGRAGRPSRPTPSQGEGRRNPVREAARLQRLYRLNRSRAIREVFGGSSPFCQVQREEIQRYFEEVYGGGNDLSGLTPARNTGAPAVGAEGLAQPYTEKEVERRLGRMSNSAPGPDGVSYADLRMADPGSRLLTAVFNACYRLESVPTYWKTSNTVLVFKKGDKDDLSHWRPLALGNTASKLFAALLTDRLTDWAVTNGRLSWSQKGFLRCEGCYEHNFVLGEILADARRPRKQAAVAWLDLSNAFGSIPHSTISSALEVASVHPRLHATWKAMYTGCSTRVRAGEGYTSPIPIRSGVKQGCPLSPIVFNLAIESVVRKAIGTRAGYTLHGQRFNILAYADNLALVAETPEGMRDLLRAVEDEARRTGLRFNPAKCASLHVIGGNGGRVLPSEFVLQDVPIRALGAGEPYEHVGIPTGFRVQQTPIATLEQLIECLRAVDASKLTPWQKLESVAVFILPRLDFLLRGSKILRGPLKEVDKYIKRLAKSWMNLPQRASAEVVFLPPSRGGAGLLPLADLADALTIAHAFRLLTSPDAPVRELAWSSLREATLRKTGLSPSNVDLAAYLSGSREGRLQRDATSPGIWANARNAARRLGERLLIRWQWTSEREELSLKLRGSNGRPVILTPRSRSQVVHRVREAVAEYYLHTLLFKKDQGKVYEVSARSKVSNHFLRTGSFTRFADWRFIHRARLDVVPLNGNRRWDEGDKRCRRCGGGLETLPHVLCHCGPHSAAIQLRHNAVLDRLKNASRLPGVLRVNQRIEGVDGELASLRPDLVVRHEASRTIVMVDVAIPFENRAEAVKEARERKLAKYAPLAERLARDGYRVYVDAFLVGALGSWCPKNEAVLRLLRVSERYAAMMRRLMISDTIRWSRDIYVEHVSGVRQYGDPSVESAVGEPAAREGPSQNSIEASGDAEEATGTRPGNE

SEQ ID NO: 1746 - protein, 1755 aa, Cerceris rybyensis
MDKFLVAYPCVDGYSCEKCSELCTDPRVLRSGGVYAGRGELVKHLKKAHGISAVAYKCGKCDFIGQGVYTLKSVKSHYAKVHGPVPVTPPRACSRINAADIGQLAPGPSASSESGGRVGDFANSAGIFPILETVVTPLSAGGSPTILTLAAAQTTSTVSVTAATVTTNVAERISPAFRREETSNLTARQPATTYAAVTVAPPSAAALAVQATRDAIKRATKPRLPKEAGPRSAGISVTRRPSGEGRPPARTSITKLSPPKTTASTKAASTTSRPAQRNAPTKAAAAGRASGTSTITPPSSRRSSPRHVGGVRNAGSTPPRAVRPRLSGERTRRAGTAPPADRRAPRAAGGRKSNEGRFIPATTCAPRGPGGRKGTEGGERVSPPVSRSRRAASVPVVVQLPRRTKIVTRPVVTGPEKGALQVKPPGTSPPRPAATIERISSGPSSPPTRGGEILPKLPVEAQTGVHFPSMRLPATTGLPFSRSPVGVAVNNTRPCTSAASVALTTATITTSCCGAPIVSAIVSAPARPIQGDRPAERALPVVREVVILRPASKKRTPADHQPSLAEEREKTDSEGEEQPWRVVAGRRARRTPPPPSPPELSARSGFSPPIRVSPPPPPVTEVNFPLLPPPGGRVGKHISVKINSALSFRALNERRGSVSRTDEGSPEAAGVTSATPTRRCPTTRVPAERRVHAPVSTGVSRSYAAGLQAPSSSPRSGRPDSGRVTTSQQGRSERPGGNPAGSNLSRAGASKRRATREELQQRDLLLEIANSASCIEDLECMATEVAIYFQGCGENRGSTARSEAGTSRPGRSTAGDAGAAGARRGGSGRDTGRAGRPSRPTPSQGEGRRNPVREAARLQRLYRLNRSRAIREVFGGSSPFCQVQREKIQRYFEEVYGGGNDLSGSPPARNTGAPVVGAEGLAQQFTEKEVERRLGRMSNSAPGPDGVSYADLRMADPGSRLLTAVFNACYRLESVPTSWKTSNTVLVFKKGDKDDLSNWRPLALGNTASKLFAALLADRLTDWAVTNGRLSWSQKGFLRCEGCYEHNFVLGEILADARRPRKQAVVAWLDLSNAFGSIPHSTISNALEAAGVHPRLHATWKAMYTGCSTRVRAGEGYTSPIPIRSGVKQGCPLSPIVFNLAIESVVRKAIGTRAGYTLHGQRFNILAYADDLALVAETPEGMRDLLRAVEDEARRIGLRFNPAKCATLHIIGGNGGRVLPSEFVLQDVPIRALGAGEPYEHLGIPTGFRVQQTPIATLEQLIECLRAVDASKLTPWQKLESVAVFILPRLDFLLRGSKLLRGPLKEVDKYIKRLAKSWMNLPQRASAEVVFLPPSRGGAGLLPLADLADALTIAHAFRLLTSPDAPVRELAWSSLREATFRKTGLSPSNVDLAAYLSGSREGRLQRDATSPGIWANARNAARRQSERLLIRWQWTSEREELSLRLRGSNGRPVILTPRSRSQVVHRVREAVAEYYLHTLLLKKDQGKVHEVSARSKVSNHFLRTGSFTRFADWRFIHRARLDVVPLNGNRRWGEGDKRCRRCGGGLETLPHVLCHCGPHSAAIQLRHNAVLDRLKNASRLPGVLRVNQRIEGVDGELASLRPDLVVRHEASRTIVMVDVAIPFENRAEAFKEARERKLAKYAPLAERLARDGYRVYVDAFLVGALGSWCPKNEAVLRLLRVSERYAAMMRRLMISDTIRWSRDIYVEHVSGVRQYGDPSLESAVGQPDAREGPTQNCIEASVDAGEATGTRPGNE

SEQ ID NO: 1747 - protein, 1755 aa, Cerceris rybyensis
MDKFLVAYPCVDGYSCEKCSELCTDPRVLRSGGVYAGRGELVKHLKKAHGISAVAYKCGKCDFIGQGVYTLKSVKSHYAKVHGPVPVTPPRACSRINAADIGQLAPGPSASSESGGRVGDFANSAGIFPILETVVTPLSAGGSPTILTVAAAQTTSTVSVTAATVTTNVAERISPAFRREETSNLTARQPATTYAAVTVAPPSAAALAVQATRDAIKRATKPRLPKEAGPRSAGISVTRRPSGEGRPPARTSITKLSPPKTTASTKAASTTSRPAQRNAPTKAAAAGRASGTSTITPPSSRRSSPRHVGGVRNAGSTPPRAVRPRLSGERTRRAGTAPPADRRAPRAAGGRKSNEGRFIPATTCAPRGPGGRKGTEGGERVSPPVSRSRRAASVPVVVQLPRRTKIVTRPVVTGPEKGALQVKPPGTSPPRPAATIERISSGPSSPPTRGGEILPKLPVEAQTGVHFPSMRLPATTGLPFSRSPVGVAVNNTRPCTSAASVALTTATITTSCCGAPIVSAIVSAPARPIQGDRPAERALPVVREVVILRPASKKRTPADHQPSLAEEREKTDSEGEEQPWRVVAGRRARRTPPPPSPPELSARSGFSPPIRVSPPPPPVTEVNFPLLPPPGGRVGKHISVKINSALSFRALNERRGSDSRTDEGSPEAAGVTSATPTRRCPTTRVPAERRVHAPVSTGVSRSYAAGLQAPSSSPRSGRPDSGRVTTSQQGRSERPGGNPAGSNLSRAGASKRRATREELQQRDLLLEIANSASCIEDLECMATEVAIYFQGCGENRGSTARSEAGTSRPGRSTAGDAGAAGARRGGSGRDTGRAGRPSRPTPSQGEGRRNPVREAARLQRLYRLNRSRAIREVFGGSSPFCQVQREKIQRYFEEVYGGGNDLSGSPPARNTGAPVVGAEGLAQQFTEKEVERRLGRMSNSAPGPDGVSYADLRMADPGSRLLTAVFNACYRLESVPTSWKTSNTVLVFKKGDKDDLSNWRPLALGNTASKLFAALLADRLTDWAVTNGRLSWSQKGFLRCEGCYEHNFVLGEILADARRPRKQAVVAWLDLSNAFGSIPHSTISNALEAAGVHPRLHATWKAMYTGCSTRVRAGEGYTSPIPIRSGVKQGCPLSPIVFNLAIESVVRKAIGTRAGYTLHGQRFNILAYADDLALVAETPEGMRDLLRAVEDEARRIGLRFNPAKCATLHIIGGNGGRVLPSEFVLQDVPIRALGAGEPYEHLGIPTGFRVQQTPIATLEQLIECLRAVDASKLTPWQKLESVAVFILPRLDFLLRGSKLLRGPLKEVDKYIKRLAKSWMNLPQRASAEVVFLPPSRGGAGLLPLADLADALTIAHAFRLLTSPDAPVRELAWSSLREATFRKTGLSPSNVDLAAYLSGSREGRLQRDATSPGIWANARNAARRQSERLLIRWQWTSEREELSLRLRGSNGRPVILTPRSRSQVVHRVREAVAEYYLHTLLLKKDQGKVHEVSARSKVSNHFLRTGSFTRFADWRFIHRARLDVVPLNGNRRWGEGDKRCRRCGGGLETLPHVLCHCGPHSAAIQLRHNAVLDRLKNASRLPGVLRVNQRIEGVDGELASLRPDLVVRHEASRTIVMVDVAIPFENRAEAFKEARERKLAKYAPLAERLARDGYRVYVDAFLVGALGSWCPKNEAVLRLLRVSERYAAMMRRLMISDTIRWSRDIYVEHVSGVRQYGDPSLESAVGQPDAREGPTQNSIEASVDAGEATGTRPGNE

SEQ ID NO: 1748 - protein, 1480 aa, Cerceris rybyensis
MRHRGPRLLGERRDLPPPPPPSSRRSSPRHVGGARNAGSTPPRAVRPRLSGERTRRAGTAPPADRRAPRAAGGRKSIDERATPATTCAPRGPGGRKGTEGGERNSPPVVRTRRAASVPVVVKLPPRTKIVTRPVVTGPAKGALRAKSLGTSPPRPAATIERNLSGPSSPPTRGGEILPKLPVEAQTGVHFPSMRLPATTGLPFSRSPVGVAVNNTRPCTSAASVALTTATITTSCCGAPIVSAIVSAPERPIQGDRPAERALPVVREVVILRPASKKTTPADHQPSLAEEKKVEDSEGEEQPWRVVAGRRARRTPPPQSPPEMSARSVLSPPIRVSPPPPPVTEVNFPLLPPPGSRVGKLKEKNGDSAPFFRALNERRGSDSRTDEGSPEAAGITSATPTRRCPTTRVPAGGRGHAPVSTGVSRSYAAGPQAPGSSPRSGRPDSGRVTTSQRGRSERPGGNPAGSNPSRAGASKRRATREELQQRDLLLEIANSVSCIEDLECMATEVAIYFQGCEENRGSTARSEAGTSRSGRTAVGDAGAAGARRGGSGRDTGRAGRPSRPTPSQGEGRRNPVREAARLQRLYRLNRSRAIREVFGGSSPFCQVQREKIQRYFEEVYGGGNDLSGSPPARNTGAPAVGAEGLAQLFTEKEVERRLGRMSNSVPGPDGVSYADLRMADPGSRLLTAVFNACYRLESVPASWKTSNTVLVFKKGDKDDLSNWRPLALGNTASKLFAALLADRLTDWAVTNGRLSWSQNGFLRCEGCYEHNFVLGEILADARRPRKQAVVAWLDLSNAFGPIPHSTISNALEAAGVHPRLHATWKAMYTGCSTRVRAAEGYTSPIPIRSGVKQGCPLSPIVFNLAIESVVRKAIGTRAGYTLHGQRFNILAYADDLALVAETPEGMRDLLRAVEDEARRIGLRFNPAKCASLHVIGGNGGRVLPSEFVLQDVPIRALGAGEPYEHLGIPTGFRVQQTPIATLEQLIECLRAVDASKLTPWQKLESVAVFILPRLDFLLRGSKLLRGPLKEVDKYIKRLAKSWMNLPQRASAEVVFLPPSRGVGGAGLLPLADLADALTIAHAFRLLTSPDAPVRELAWSSLREATFRKTGLSPSNVDLAAYLSGSREGRLQRDATSPGIWANARNAARRQCERLLIRWQWTSEREELSLRLRGSNGRPVILTPRSRSQVVHRVREAVAEYYLHTLLLKKDQGKVYEVSARSKVSNHFLRTGSFTRFADWRFIHRARLDVVPLNGNWRWGEGDKRCRRCGGGLETLPHVLCHCGPHSAAIQLRHNAVLDRLKYASRLPGVLRVNQRIEGVDGELASLRPDLVVRHEASRTIVMVDVAIPFENRAEAFKEARERKLAKYAPLAERLARDGYRVYVDAFLVGALGSWCPKNEAVLRLLRVSERYAAMMRRLMISDTIRWSRDIYVEHVSGVRQYGDPPSESAVGQLAAPEGPSQNCIGASVDAEEATGTRPGFE

SEQ ID NO: 1749 - protein, 796 aa, Cerceris rybyensis
MADPGSRLLTAVFNLCYRLESVPSSWKTSNTVLVYKKGDKSDLSNWRPLALGNTAGKLFAALIADRLTDWAVGSGRISWAQKGFLRCEGCYEHNFVLGEVLADARKTRKQAVVAWLDLSNAFGSIPHATIRNALVSAGVHPRILNTWNSMYDGCTTRIRAAEGYTNPIPIRSGVRQGCPLSPITFNLAIESVIRKAIGSGAGYSLHGQRFSILAYADDLALIADTPEGMRDLLRAVEGEARRIGLCFNPAKCATLHVIGGRGGGVIPSVFTLQDIPMRALAEGESYDHLGIPTGFRVDQTPIASIEELIECLRAVDDSKLAPWQKLEAVAVFVLPRLDFLLRGAKILRGPLKEVDKYVRRLAKAWMNLPQRASAEIVFLPPSRGGGGLLPLADLADALTIAHAFRLLSAPDAPVRDLAWSSLRVAATRGLATATSNADLADFLSGDRTGRSQWEATVPGIWSSTRTAARKHADRWGFSWRWSSELNELALSLRGARGRPVIVTPRVARMRETVAEYYQSTLLLKRDQGKVFEVSGRERVSNHFLRTGSFTRFADWRFIHRARLDVVPLNGNRRWGDGDKRCRRCGESLETLPHVMCHCGPHSAAIQLRHNAILERLKAATRMPGSIRINQRIEGAGEEFAALRPDLVVRHEASRTIVIVDVAVPFENRLEAFVAARERKIAKYAPLAEKLSRDGYRVLVRAFLVGALGSWWPENEAVLSLLRVSERYAAMMRRLMISDTIRWSRDIYVEHVSGVRQYRLPTLSNITQNAPRGPEPNYHAEALDGVEETLGTRPGNE

SEQ ID NO: 1750 - protein, 943 aa, Cydia splendana
MSCPTKVACPHCPGSSKLYAGSRGLNVHIGKVHKESAGPSSFDPSTVPAQGVPTIDAGLHSLPALKKNVRVLKHIPKGARNLAAGKLAKLVDACLRTNEVNDWFAFLSFPFTALRVPEGGTARSLTSKVKENIDSSSLYFPDTAGHKPPSLYRSIEGKVHDGDLRGAVRLLLSDSSLAPSSADTLEALRAKHPAPSRPLDFPPEPDLTSPFLTISVSDVTNAIGSFYNGSAAGIDGLRPQHLKELTSLNVGDNGYKLLESLTKLCNFLLRGMLNPQVCPYLYGASLCALEKKDGGVRPIAIGTTLRRLVAKLGCRSVKDEMAAYFQPRQIGFGTPLGCEAAIHATRHFAESRENSDTVILKLDVKNAFNSVERDIILEQVKTRVPTLYPFLFQCYSSPSNLFFGDSTISSQVGAQQGDPLGPLVFCLAIQNCITTLQSPLNVWYLDDGTIGGSPNVVLDDVSRLLPYLQSIGLEVNSTKCELYPCGTSALDSVPNFQSVFPGLRLLNKTSFSLLGAPIFPEGVSSAVRAKTQALESAFVHFKHLSAHVSLILLRNCFAMPRVTYILRTAPIWRFDQDVQVFDRVLRQGLEGVLNVSFDEPQWRQASLPVRYGGLGVRCMRDVGLVAFLASSHAASGLATRILSLNGGNICITFLTEALSEWSCRFAGVERPENPSSQRLWDDILCREWHKGLLESAVGKDVARLKAVREPESGAWLHALPSPHLGTLLDNDTLRMAVALRIGGKVCEPHQCKCGAMVEADGHHGLSCLRCVGRIPRHCAINELIRRALVSANVPCIMEPQGLSRLDGKRPDGLTLVPWAKGRSLLWDATCVSTFAPTHLTRTVNKAGAAAETAARLKHSKYANLEQVYDFVPVAVETAGPWCAEAKAFIKDIGRRLRDRGCDPRSGSFLIQQISLAIQRGNAASIFGTFDPGDNQSGGQYFIC

SEQ ID NO: 1751 - protein, 959 aa, Pammene fasciana
MYIQSWLYPCIFILDEGRCYFILTIMSSPVKVPCPHCPGQSKLYVAPRGLNVHISRRHKDVPAGSTVGIGADTDSGGAGLDSLSALKRNVKVLKHIPKGARNMAAGKLSSLIEACLRSNEVNDWFALLSFAFTALRVPGGGAGKSLTSQVKENVGSLNMYFPDGVDQRPRSVCRTIEAKVHDGDLRGAVRILLSDSTLAPSNADTLRALMDNHPSPSRPLVLPPEPDLTTPFLTVSVLDVTNAIGSFYSGSASGLDGLRPQHLKELTSHCAGDNGPRLLESLTKLSNFLLRGMLNPQVSPYLYGASLCALAKKDGGIRPIAIGTTIRRLVAKLGCRAVKDEMAAFLQPCQVGFGTALGCEAAIHATRHFAMAHEHDDTVIVKLDIKNAFNTVERDVILKEVKNHTPSLYPFLFQCYSSPSNLFYDGSEIASQVGAQQGDPLGPLVFCLAMQSAITALESPLNVWYLDDGTIGGGSGVVLDDIARLLPALRSIGLEVNSSKCELFPCGSSAQNFLSDFETALPGITILTKSTFCLLGAPIFLDGVSSVLQKKTSALDSSLQRLSQLSAHVALVLLRNCFAMPRITYALRTAPTWSFGQEVSSFDAVLRRGLESILNVGFNDAQWQQASLPVRYGGLGVRAMRDVGIVAFLASAHASSVLVAKILCLDGDSICVPFVREALVEWSVRSTDGLQPENPASQRLWDDILCKRVHACLLNGALGVDAARLKAVAEPESGAWLHALPSPHLGTLLDNDTVRVSVALRLGSDVCEPHRCPCGTMVGANGHHGLSCVRCVGRIPRHQAINELVRRAMVSANIPCILEPPGLSRTDGKRPDGLTLVPWAKGRSLLWDATCVCTFAPTHVGHTSKKAGAAAEAAAKFKHGKYANLGPVYDFVPIAVETAGPWCAEAKRLVREIGRRLRDRGCDPRAGSYLVQQISLAIQRGNAAGVFGTFGPGRDQYGS

SEQ ID NO: 1752 - protein, 943 aa, Cydia splendana
MSCPTKVACPHCPGSSKLYAGSRGLNVHIGKVHKESAGPSSSDPSTVPAQGVPTIDAGLHSLPALKRNVRVLKHIPKGARNLAAGKLAKLVDACLRTNEVNDWFAFLSFPFTALRVPEGGTARYLTSKVKENIDSSSLYFPDTAGHKPPSLYRAIEGKVHDGDLRGAVRLLLSDSSLAPSSADTLEALRAKHPAPSRPLDFPPEPDLTSPFLTISVSDVTNAIGSFYNGSAAGIDGLRPQHLKELTSLNVGDNGYKLLESLTKLCNFLLRGMLNPQVCPYLYGASLCALEKKDGGVRPIAIGTTLRRLVAKLGCRSVKDEMAAYFQPRQIGFGTPLGCEAAIHATRHFAESRENSDTVILKLDVKNAFNSVERDIILEQVKTRVPTLYPFLFQCYSSPSNLFFGDSTISSQVGAQQGDPLGPLVFCLAIQNCITTLQSPLNVWYLDDGTIGGSPNVVLDDVSRLLPYLQSIGLEVNSTKCELYPCGTSALDSVPNFQSVFPGLRLLNKTSFSLLGAPIFPEGVSSAVRAKTQALESAFVHFKHLSAHVSLILLRNCFAMPRVTYILRTAPIWRFDQDVQVFDRVLRQGLEGVLNVSFDEPQWRQASLPVRYGGLGVRCMRDVGLVAFLASSHAASGLATRILSLNGGNICITFLTEALSEWSCRFAGVERPENPSSQRLWDDILCREWHKGLLESAVGKDVARLKAVREPESGAWVHALPSPHLGTLLDNDTLRMAVALRIGGKVCEPHQCKCGAMVEADGHHGLSCLRCVGRIPRHCAINELIRRALVSANVPCIMEPQGLSRLDGKRPDGLTLVPWAKGRSLLWDATCVSTFAPTHLTRTVNKAGAAAETAARLKHSKYANLEQVYDFVPVAVETAGPWCAEAKAFIKDIGRRLRDRGCDPRSGSFLIQQISLAIQRGNAASIFGTFDPGDNQSGGQYFIC

SEQ ID NO: 1753 - protein, 943 aa, Cydia splendana
MSCPTKVACPHCPGSSKLYAGSRGLNVHIGKVHKESAGPSSSDPSTVPAQGVPTIDAGLHSLPALKKNVRVLKHIPKGARNLAAGKLAKLVDACLRTNEVNDWFAFLSFPFTALRVPEGGTARSLTSKVKENIDSSSLYFPDTAGHKPPSLYRSIEGKVHDGDLRGAVRLLLSDSSLAPSSADTLEALRAKHPAPSRPLDFPPEPDLTSPFLTISVSDVTNAIGSFYNGSAAGIDGLRPQHLKELTSLNVGDNGYKLLESLTKLCNFLLRGMLNPQVCPYLYGASLCALEKKDGGVRPIAIGTTLRRLVAKLGCRSVKDEMAAYFQPRQIGFGTPLGCEAAIHATRHFAESRENSDTVILKLDVKNAFNSVERDIILEQVKTRVPTLYPFLFQCYSSPSNLFFGDSTISSQVGAQQGDPLGPLVFCLAIQNCITTLQSPLNVWYLDDGTIGGSPNVVLDDVSKLLPYLQSIGLEVNSTKCELYPCGTSALDSVPNFQSVFPGLRLLNKTSFSLLGAPIFPEGVSSAVRAKTQALESAFVHFKHLSAHVSLILLRNCFAMPRVTYILRTAPIWRFDQDVQVFDRVLRQGLEGVLNVSFDEPQWRQASLPVRYGGLGVRCMRDVGLVAFLASSHAASGLATRILSLNGGNICITFLTEALSEWSCRFAGVERPENPSSQRLWDDILCREWHKGLLESAVGKDVARLKAVREPESGAWLHALPSPHLGTLLDNDTLRMAVALRIGGKVCEPHQCKCGAMVEADGHHGLSCLRCVGRIPRHCAINELIRRALVSANVPCIMEPQGLSRLDGKRPDGLTLVPWAKGRSLLWDATCVSTFAPTHLTRTVNKAGAAAETAARLKHSKYANLEQVYDFVPVAVETAGPWCAEAKAFIKDIGRRLRDRGCDPRSGSFLIQQISLAIQRGNAASIFGTFDPGDNQSGGQYFIC

SEQ ID NO: 1754 - protein, 943 aa, Cydia splendana
MSCPTKVACPHCPGSSKLYAGSRGLNVHIGKVHKESAGPSSSDPSTVPAQGVPTIDAGLHSLPALKKNVRVLKHIPKGARNLAAGKLAKLVDACLRTNEVNDWFAFLSFPFTALRVPEGGTARSLTSKVKENIDSSSLYFPDTAGHKPPSLYRSIEGKVHDGDLRGAVRLLLSDSSLAPSSADTLEALRAKHPAPSRPLDFPPEPDLTSPFLTISVSDVTNAIGSFYNGSAAGIDGLRPQHLKELTSLNVGDNGYKLLESLTKLCNFLLRGMLNPQVCPYLYGASLCALEKKDGGVRPIAIGTTLRRLVAKLGCRSVKDEMAAYFQPRQIGFGTPLGCEAAIHATRHFAESRENSDTVILKLDVKNAFNSVERDIILEQVKTRVPTLYPFLFQCYSSPSNLFFGDSTISSQVGAQQGDPLGPLVFCLAIQNCITTLQSPLNVWYLDDGTIGGSPNVVLDDVSRLLPYLQSIGLEVNSTKCELYPCGTSALDSVPNFQSVFPGLRLLNKTSFSLLGAPIFPEGVSSAVRAKTQALESAFVHFKHLSAHVSLILLRNCFAMPRVTYILRTAPIWRFDQDVQVFDRVLRQGLEGVLNVSFDEPQWRQASLPVRYGGLGVRCMRDVGLVAFLASSHAASGLATRILSLNGGNICITFLTEALSEWSCRFAGVERPENPSSQRLWDDILCREWHKGLLESAVGKDVARLKAVREPESGAWLHALPSPHLGTLLDNDTLRMAVALRIGGKVCEPHQCKCGAMVEADGHHGLSCLRCVGRIPRHCAINELIRRALVSANVPCIMEPQGLSRLDGKRPDGLTLVPWAKGRSLLWDATCVSTFAPTHLTRTVNKAGAAAETAARLKHSKYANLEQVYDFVPVAVETAGPWCAEAKAFIKDIGRRLRDRGCDPRSGSFLIQQISLAIQRGNAASIFGTFDPGDNQSGGQYFIC

SEQ ID NO: 1755 - protein, 943 aa, Cydia splendana
MSCPTKVACPHCPGSSKLYAGSRGLNVHIGKVHKESAGPSSSDPSTVPAQGVPTIDAGLHSLPALKRNVRVLKHIPKGARNLAAGKLAKLVDACLRTNEVNDWFAFLSFPFTALRVPEGGTARSLTSKVKENIDSSSLYFPDTAGHKPPSLYRAIEGKVHDGDLRGAVRLLLSDSSLAPSSADTLEALRAKHPAPSRPHDFPPEPDLTSPFLTISVSDVTNAIGSFYNGSAAGIDGLRPQHLKELTSLNVGDNGYKLLESLTKLCNFLLRGMLNPQVCPYLYGASLCALEKKDGGVRPIAIGTTLRRLVAKLGCRSVKDEMAAYFQPRQIGFGTPLGCEAAIHATRHFAESRENSDTVILKLDVKNAFNSVERDIILEQVKTRVPTLYPFLFQCYSSPSNLFFGDSTISSQVGAQQGDPLGPLVFCLAIQNCITTLQSPLNVWYLDDGTIGGSPNVVLDDVSRLLPYLQSIGLEVNSTKCELYPCGTSALDSVPNFQSVFPGLRLLNKTSFSLLGAPIFPEGVSSAVRAKTQALESAFVHFKHLSAHVSLILLRNCFAMPRVTYILRTAPIWRFDQDVQVFDRVLRQGLEGVLNVSFDEPQWRQASLPVRYGGLGVRCMRDVGLVAFLASSHAASGLATRILSLNGGNICITFLTEALSEWSCRFAGVERPENPSSQRLWDDILCREWHKGLLESAVGKDVPRLKAVREPESGAWLHALPSPHLGTLLDNDTLRMAVALRIGGKVCEPHQCKCGAMVEADGHHGLSCLRCVGRIPRHCAINELIRRALVSANVPCIMEPQGLSRLDGKRPDGLTLVPWAKGRSLLWDATCVSTFAPTHLTRTVNKAGAAAETAARLKHTKYANLEQVYDFVPVAVETAGPWCAEAKAFIKDIGRRLRDRGCDPRSGSFLIQQISLAIQRGNAASIFGTFDPGDNQSGGQYFIC

SEQ ID NO: 1756 - protein, 938 aa, Pammene fasciana
MSSPTKVACPYCPGLPRLFVASRGLNVHISRVHKENAGAQVSHSSVGSGPGVSANDVGLHRLSALKKNVRVLKHIPKGARNLAAGKLATLVDACLRTNDVDDWFALLSFAFTGLRVPEFGSAKSLTTRVKENVGSLNLYFPDEVARRPSSLYRTIEGKVHDGDLRGAVRLLLSDSSLAPADAGTLGALRAKHPEPSRPLAFPPESDLSTPYLTVSVSDVANAIGSFYNGSAAGLDGLRPQHLKELTSPSVGDNGPRLLESLTRLCNFLLRGMLHPQVCPFLYGATLCALGKKDGGIRPIAIGSTLRRLVAKLGCRSVKDEMAAYFQPRQMGFGTPLGCEAAIHAARHFAVSRDNSDTIILKLDIKNAFNSVERDIILKEVRSRTPALYPFLFQCYSSPSNLFFGDSTISSQVGAQQGDPLGPLVFCLAMQSCITSLQSPLNVWYLDDGTIGGSSDVVLDDLNRLLPALHSIGMEVNPSKCEIYACGSLALDSIPDIESVLPGVTLLDRASFSLLGAPIFPEGVSSAVQAKTRALESAFLHFEHLSAHVSLTLLRNCFAMPRVTYILRTAPIWRFEQAVSGFDSVLRRGLENVLNVSFDETQWRQATLPVRYGGLGVRCMRDVGLVAFLASSHAVSGLVTRILAFDGGNICITYLQEAHSEWSTRFAQVEEPDNPSSQRLWDDILCRDLHQGLVRNAVGRDVARLKAVGEPESGAWLHALPSPHLGTLLDNDTLRVAVVLRIGSKVCEPHRCVCGALVEADGHHGLSCLRCAGRIPRHCAVNDIVRRALVSANVPCILEPQGLSRTDGKRPDGLTLVPWARGRSLLWDATCVSTFAPTHLAHTVTKAGAAAESAAKFKHSKYANLEQVYDFVPVAIETAGPWCAEAKKFVKDIGRRLKERGCDPRSGSFLVQRISLAIQRGNAASIFGTFGPGEYRGGV

SEQ ID NO: 1757 - protein, 938 aa, Pammene fasciana
MSSPTKVACPYCPGLPRLFVASRGLNVHISRVHKENAGAQVSHSSVGSGPGVSANGVGLHRLSALKKNVRVLKHIPKGARNLAAGKLATLVDACLRTNDVDDWFALLSFAFTGLRVPEFGSAKSLTTRVKENVGSLNLYFPDEVARRPSSLYRTIEGKVHDGDLRGAVRLLLSDSSLAPADAGTLGALRAKHPEPSRPLAFPPEPDLSTPYLTVSVSDVANAIGSFYNGSAAGLDGLRPQHLKELTSPSVGDNGPRLLESLTRLCNFLLRGMLHPQVCPFLYGATLCALGKKDGGIRPIAIGSTLRRLVAKLGCRSVKDEMAAYFQPRQMGFGTPLGCEAAIHAARHFAVSRDNSDTIILKLDIKNAFNSVERDIILKEVRSRTPALYPFLFQCYSSPSNLFFGDSTISSQVGAQQGDPLGPLVFCLAMQSCITSLQSPLNVWYLDDGTIGGSSDVVLDDLNRLLPALHSIGMEVNPSKCEIYACGSLALDSIPDFESVLPGVTLLDRASFSLLGAPIFPEGVSSAVQAKTRALESAFLHFEHLSAHVSLTLLRNCFAMPRVTYILRTAPIWRFEQAVSGFDSVLRRGLENVLNVSFDETQWRQATLPVRYGGLGVRCMRDVGLVAFLASSHAVSGLVTRILAFDGGNICITYLQEAHSEWSTRFAQVEEPDNPSSQRLWDDILCRDLHQGLVRNAVGRDVARLKAVGEPESGAWLHALPSPHLGTLLDNDTLRVAVALRIGSKVCEPHRCVCGALVEADGHHGLSCLRCAGRIPRHCAVNDIVRRALASANVPCILEPQGLSRTDGKRPDGLTLVPWARGRSLLWDATCVSTFAPTHLAHTVTKAGAAAESAAKFKHSKYASLEQVYDFVPVAIETAGPWCAEAKKFVKDIGRRLKERGCDPRSGSFLVQRISLAIQRGNAASIFGTFGLGEYRGGV

SEQ ID NO: 1758 - protein, 984 aa, Pammene fasciana
MPVLHNSSNAAPKVTPTPTVCPYCPHCPQARQFKGQHGLNIHIRKVHSNQTAASTTQARHGQVIDLPQTPQATTSSVTATFSNSSNNPNSLGLQSLPWLKKNVRVLKHIPKGARNVAAGKLSSLIEACLRSNEVDDWFTLLSFSFNALRVPETRVGQSLTSKVKENVGTDDLNIYFPPALPEKPRSLCRTIEAKVHDGDLRGAVRILMSDSSLAPSNAETLKALTEKHPSPSRPLTYPPEPNLSSQFLTVSVSDVATAIDTFYNGSASGLDGLRPQHLKELVSPNAGDNGSKLLESLTKLCNFLLRGMLNPQVCPYLYGASLCALEKKDGGVRPIAIGTTLRRLVAKLGCRFVRDEMAAFLQPFQMGFGTPLGCEAAIHATRHFLMTHVNSDSVIIKLDIKNAFNSVERDIILKQVLDHTPVLYPFLFQCYSSPSNLFYGESTISSQVGAQQGDPLGPLVFCLAIQNLISTLESPLNVWYLDDGTVGGDPDAVLRDVTRLLPALKSIGLEINTSKCELYVCNPAAINSVSNFEPLLPGIKVLNKSSLCLLGAPIFPEGVSSVLQAKTLALKSSFERLKHLSAHVSLVILRNCFTMPRITYTLRTAPTWMFKQDLRDYDTVLRQGLEIVLNIQFNEAQWTQATLPIRYGGLGIRSIHDVGIVAFLASSHASTDLVTKILSLNGDRIRLPFVEEALIEWTTRCPGTSRPDNPDLQRPWDNTLCERTYSTLLNNAIKAEDVARLKAVKQPESGAWLHALPSPQLGTLLDNDTLRIAVALRLGCKVCEPHHCICGTMVEANGHHGLSCMRCAGRIPRHHAINELIRRAMVSANVPCVLEPQGLSRTDGKRPDGLTLIPWSKGRSLIWDATCVCTFAPSHITHTTKTSGAAAENAAKLKRNKYCNLMPAYDFAPVAIETAGPWCAEAKTLVRALGRRLRDRGCDPRSGSYLVQQISLAVQRGNAASIFGTFGPGVRFLNLTGDIKVTGD

SEQ ID NO: 1759 - protein, 980 aa, Pammene fasciana
MPILPSSSIAAPKITPSPIPTTCPYCPQTRQYKGQRGLNIHIGKVHGSQATASTTQACPGPLAQSLISHKAPQATTRSVTATTSNSNRLGLQRLPWLKKNVRVLKHIPKGARNLAAGKLSALIEVCLRSNEVDDWFALLSFSFSALRVPESRAGQSLTSKVKENVGNDDLNIYFPAELPQKPRSLCRTIEGKVHDGDLRGAVRILLSDSSLAPSNAETLKSLMEKHPSPSRQLTYPPEPDLSNQFLTVSASDVRIAIDSFYSGSASGIDGLRPQHLKELVSPNSGDNGTKLLDSLTKLCNFLLRGMLNPQVCPYLYGASLCALAKKDGGIRPIAIGTTLRRLVAKLGCRSVRDEMAAFLQPRQMGFGTPLGCEAAIHATRHFSIARNNSDSVIIKLDIKNAFNSVERDIILKEVKDHTPTLYPFLFQCYSSPSNLFYSESTISSQVGAQQGDPLGPLVFCLAIQSLIATLESPLNVWYLDDGTIGGDSDVVLNDVGRLLPTLKSIGLEINTSKCEIYACSPIAMNSVPNFEHLLPGIKVLNNSSFNLLGAPIFPEGVSSVLQAKTLALGSSYERLKHLSAHVSLVLLRNCFTMPRITYTLRTAPTWMFKQDTNDYDIMLRQGLESVLNIQFGEAQWNQATLPIRYGGLGVRSMNDVGVVAFLASSHACSDLVTKILSFNGGEICLPFMKEALDEWTARCPGAVQPDKLALQRPWDNTLCERRYSTLLNTALKTEDVARLKAVKQPESGAWLHALPSPQLGTFLDNDSLRIAVALRLGSKVCEPHLCICGTMVEANGYHGLSCLRSAGRIPRHHAINELIRRAMVSASVPCILEPQGLSRTDGKRPDGLTLIPWEKGRSLIWDATCVSTFAPSHIAQTSKTAGAAAENAAKLKKNKYANLVSAYDFVPVAIETAGPWCAEAKTLVRALGRRLRDKGCDPRSGSYLVQQISLAVQRGNAASIFGTFGPGRSRNEPFLIDNFF

SEQ ID NO: 1760 - protein, 980 aa, Pammene fasciana
MPILPSSSIAAPKITPTPIPTTCPYCPQTRQYKGQRGLNIHIGKVHGSQATASTTQACPGPLAQSLISHKAPQATTSSVTATTSNSNRLGLQRLPWLKKNVRVLKHIPKGARNLAAGKLSALIEVCLRSNEVDDWFALLSFSFSALRVPESRAGQSLTSKVKENVGNDDLNIYFPAELPQKPRSLCRTIEGKVHDGDLRGAVRILLSDSSLAPSNAETLKSLMEKHPSPSRQLTYPPEPDLSNQFLTVSASDVRIAIDSFYSGSASGIDGLRPQHLKELVSPNSGDNGTKLLDSLTKLCNFLLRGMLNPQVCPYLYGASLCALAKKDGGIRPIAIGTTLRRLVAKLGCRSVRDEMAAFLQPRQMGFGTPLGCEAAIHATRHFSIARNNSDSVIIKLDIKNAFNSVERDIILKEVKDHTPTLYPFLFQCYSSPSNLFYSESTISSQVGAQQGDPLGPLVFCLAIQSLIATLESPLNVWYLDDGTIGGDSDVVLNDVGRLLPTLKSIGLEINTSKCEIYACSPIAMNSVLNFEHLLPGIKVLNNSSFNLLGAPIFPEGVSSVLQAKTLALGSSYERLKHLSAHVSLVLLRNCFTMPRITYTLRTAPTWMFKQDTNDYDIMLRQGLESVLNIQFGEAQWNQATLPIRYGGLGVRSMNDVGVVAFLASSHACSDLVTKILSFNGGEICLPFMKEALDEWTARCPGAVQPDKLALQRPWDNTLCERRYSTLLNTALKTEDVARLKAVKQPESGAWLHALPSPQLGTFLDNDSLRIAVALRLGSKVCEPHLCICGTMVEANGYHGLSCLRSAGRIPRHHAINELIRRAMVSASVPCILEPQGLSRTDGKRPDGLTLIPWEKGRSLIWDATCVSTFAPSHIAQTSKTAGAAAENAAKLKKNKYANLVSAYDFVPVAIETAGPWCAEAKTLVRALGRRLRDRGCDPRSGSYLVQQISLAVQRGNAASIFGTFGPGRSRNEPFLIDNFF

SEQ ID NO: 1761 - protein, 979 aa, Cydia splendana
MSLQNPIDAAPGTSPTVVTLFCPYCPQGPQARQFKGQRGLNVHIGKVHGDQVARGTSPVCPPPAPNSMQAPQTASSLASSSNLSSDNSIGLQSLPGLKKSVRVLKHIPRGARNLAAGRLCALIEACLRSNEVDDWFALLAFSFTALRVPDSSTSKSLTSKVKNNIADLNVYFPEEANQKPRSVYRTIEAKVHDGDLRGAVRILLSDSSLAPSSADTLEALRNKHPSPSRQLAYPPEPDLSSQFLTVSVADVKNAIDSFYNGSASGLDGLRPQHLKELVSSSAGDNGFKLLESLAKLCNFLLRGMLNPLVCPYLYGASLCALEKKDGGIRPIAIGTTFRRLVAKLGCRSVREEMAAYLQPCQVGFGTPLGCEAAIHATRHFSMKHEHSDTVIVKLDLKNAFNSVERDVILQQVKLRTPHLYPFLFQCYAFKSNLFYEGTVIASQVGAQQGDPLGPLVFCLAIQSLIAALESPLNVWYLDDGTLGGDSDVVFNDVAKLLPALRAIGLEVSSSKCELYACSPLALSTLSKFESLLPGVKVISKVSFGLLGAPIFPEGVSSMLQAKTSALGSSFERLKHLSAHVSLTLLRNCFSMPRITYSLRTAPTWMFKQDTEDYDTVLKQGLEGLLNIQLVDEQWHQATLPIRYGGLGIRRMHDIGVVSFLASSHASAGLVAKILSMNSGNICLPFLQEALDEWSTRSSGGTHPNNPASQRLWDDILCEQTYSQLLAQAGRIEDVARLKAVGQPESGAWLQALPSPHLGTLLDNDTLRVGVALRLGSKVCEPHRCICGMAVEANGHHGLSCSRAAGRFPRHHAINDLIRRTMVSANVPCILEPQGLSRTDGKRPDGLTLVPWAKGRCLLWDATCVSTFAPTHVAPGSRLAGAAAANAARLKRLKYANLEPAYDFVPVAVETAGPWCSEAKRLIRDLGRRLRDRGGDPRSGSYLVQQISLAIQRGNAASIFGTFGLGGGRNGADSVSRIVY

SEQ ID NO: 1762 - protein, 979 aa, Cydia splendana
MSLQNPIDAAPGTSPTVVTLFCPYCPQGPQARQFKGQRGLNVHIGKVHGDQVARGTSPVCPPPAPNSMQAPQTASSLASFSNLSSDNSIGLQSLPGLKKSVRVLKHIPRGARNLAAGRLCALIEACLRSNEVDDWFALLAFSFTALRVPDSSTSKSLTSKVKNNIADLNVYFPEEANQKPRSVYRTIEAKVHDGDLRGAVRILLSDSSLAPSSADTLEALRNKHPSPSRQLAYPPEPDLSSQFLTVSVADVKNAIDSFYNGSASGLDGLRPQHLKELVSSSAGDNGFKLLESLAKLCNFLLRGMLNPLVCPYLYGASLCALEKKDGGIRPIAIGTTFRRLVAKLGCRSVREEMAAYLQPCQVGFGTPLGCEAAIHATRYFSMKHEHSDTVIVKLDLKNAFNSVERDVILQQVKLRTPHLYPFLFQCYAFKSNLFYEGTVIASQVGAQQGDPLGPLVFCLAIQSLIAALESPLNVWYLDDGTLGGDSDVVFNDVAKLLPALRAIGLEVSSSKCELYACSPLALSTLSKFESLLPGVKVISKVSFGLLGAPIFPEGVSSMLQAKTSALGSSFERLKHLSAHVSLTLLRNCFSMPRITYSLRTAPTWMFKQDTEDYDTVLKQGLEGLLNIQLVDEQWHQATLPIRYGGLGIRRMHDIGVVSFLASSHASAGLVAKILSMNSGNICLPFLQEALDEWSTRSSGGTHPNNPASQRLWDDILCEQTYSQLLAQAGRIEDVARLKAVGQPESGAWLQALPSPHLGTLLDNDTLRVGVALRLGSKVCEPHRCICGMAVEANGHHGLSCSRAAGRFPRHHAINDLIRRTMVSANVPCILEPQGLSRTDGKRPDGLTLVPWAKGRCLLWDATCVSTFAPTHVAPGSRLAGAAAANAARLKRLKYANLEPAYDFVPVAVETAGPWCSEAKRLIRDLGRRLRDRGGDPRSGSYLVQQISLAIQRGNAASIFGTFGLGGGRNGADSVSRIVY

SEQ ID NO: 1763 - protein, 966 aa, Cydia splendana
MSLPVTDAVGGVALSASLDSNVRCPQCPQTRFFRGTRGLNVHISKVHRPHIPCSAPDVSDPGVPGPACSAQTQPQVPAPPFWQYISGLKDTLPVLKRIPRGARVAVSKCLAETIGAAVSENSFRTWEQLLTFSFRVLHVHSKGQTRSSLTSKVKANCLNGSIAQPLPRQNRKLNTAKLVESKVCDGDIKGAARVLFSNDVVASVSPETLAALRDKHPLPAPDFSLPDPPQASDEALQVVAQDVLGAVMSFPNGSAGGLDGLTPQHLKDLLSSDCNGTRDDLLKNLTALVNKMLAGEVPTSVTDILYGANLCALLKKDGGIRPIAVGTTFRRLVAKIACRSNLDRLGKEFSPIQVGFGSRSGCEAAVHAVRTYLERLGGEVLLKVDVANAFNSVDRGTLLTQVREKIPESYKFVWQCYSSPTKLLFKSNLLASSVGCQQGDPLGPAIFSLAIHPIIKDLKSRLNVWYLDDGTLGGDVDTVLCDLQRLTTDFGSIGLSLNFSKCELFISSTNLERENIVNKFREVAPGIKIVDESSLNLLGSPVLDQSFDDYVENKIQNFKSFSERLLEINVHTAYTIMRHCLFVPKFTYVLRCSHFWKFPNLLLRLDELVKDSLASILNISFDSRCWSQATLPIRFGGLGIRSISSVALPAFLASVHSAQGLIGCILTSSCENLEPAHCTEAKNVWSLSCPNTDLPTNLCSQRQWDEPLCQLVRNNLFDTSTGLAERARLLAAAEWESGQWLLALPSPSIGTLLDNVTFRLAASLRVGAVTNVPHRCQCGSMVDSLGHHGLSCSRSAGRIPRHASLNDVIRRALVSVKVPAILEPVGLARDDGKRPDGMTLVPWSMGRPLVWDATCVDTFAVSHLPGTSSGAGHAATTAEDGKRRKYSMLGSGYIFEPFGVETLGSWGPSARRLYKDLASRLVDASGDQRAGQYFAQRISIAIQRGNAASLLGTLPAGGELEGVFYL

SEQ ID NO: 1764 - protein, 968 aa, Pammene fasciana
MPLVSLSCPSRTTASPENRLRCPECIEPRFFKGSRGLNIHIAKKHRSCLTQPSSSLLSHSQTNVPAPSHSQLPNHTRPDIPFHQILCDLKSSRPVLKRIPRGARISVSKSLSDTIKTILCENSTQNWEHLLTFTFKVLHINSNQNSKSLTQKVKDNCCKDKSFHHNPDNFRNSTYNLFKTVESKVADGDIRGAARLLFSDDAVAPNNSDTLTALYSKHPPSATNLCLPEPPQPIEPNLTATPQDVIGAVMSFPNGSAGGLDGLTPQHLKDLLCSGCGETGETLLKDLTALVNIMLAGQVPDDIKDVLYGANLCALTKKDGGIRPIAVGTTLRRLTAKIACRSIIDQLGSELQPIQLGFGSKSGCEAAVHAVRTFLEHEAGEVLLKVDVCNAFNSVDRGALLTQIKEKIPQTYKFLWQCYSSPSKLLYKTNVLDSCVGCQQGDPLGPAIFSLAIHPIIKELNSKLNVWYLDDGTLGGEVTSVLEDFKKIITDLKTIGLSLNFSKCELFITDSCPNKENKIDLFKNLAPGLKIINKESLHLLGCPILDQSFENFVDSKIQNFKGTSHRLAKINIHSAYSIIKHCLFVPKFTYILRASHLWKYPDLALKLDTLIVETLTSIFNISFDDRTWTQASLPIRFGGLGIRKITCVALPAFLSSVHGAQSLIGKILAPSIGSLEAAHCSEARNVWSITCPNTDLPDHPCSQRRWDEPLCRLVRKHLLDTSPSSTDRARLLATAEWESGLWLTALPSPNIGTLLDNTTFRLATCLRLGAPTNHPHRCQCGVMVNNLGHHGLSCVRSAGRIPRHASINDVIRRALVSAKLPAVLEPSGLARDDGKRPDGMTLVPWSMGRPLVWDATCVDTLAPSHIPDTKNNAGAAASSAENLKRRKYVALGSSYIFAAFGVETLGPWGPSARRLYKDLSARLIEASGDQRAGYYFAQRIAIAIQRGNTASLLGTLPVDSDLGQIFYL

SEQ ID NO: 1765 - protein, 968 aa, Pammene fasciana
MPLVSLSCPSRTIASPENRLRCPECIEPRFFKGSRGLNIHIAKKHRSCLTQPSSSLLSHSQTNVPAPSHSQLPNHTRPDIPFHQILCDLKSSRPVLKRIPRGARISVSKSLSDTIKTILCENSTQNWEHLLTFTFKVLHINSNENSKSLTQKVKDNCCKDKSFHHNPDNFRNSTYNLFKTVESKVADGDIRGAARLLFSDDAVAPNNSDTLTALYSKHPPSATNLCLPEPPQPIEPNLTATPQDVIGAVMSFPNGSAGGLDGLTPQHLKDLLCSGCGETGETLLKDLTALVNIMLAGQVPDDIKDVLYGANLCALTKKDGGIRPIAVGTTLRRLTAKIACRSIIDQLGSELQPIQLGFGSKSGCEAAVHAVRTFLEHEAGEVLLKVDVCNAFNSVDRGALLTQIKEKIPQTYKFLWQCYSSPSKLLYKTNVLDSCVGCQQGDPLGPAIFSLAIHPIIKELNSKLNVWYLDDGTLGGEVTSVLEDFKKIITDLKTIGLSLNFSKCELFITDSCPNKENTIDLFKNLAPGIKIINKESLHLLGCPILGQSFENFVDSKIQNFKGTSHRLAKINIHSAYSIIKHCLFVPKFTYILRASHLWKYPDLALKLDTLIVETLTSIFNISFDDRTWTQASLPIRFGGLGIRKITCVALPAFLSSVHGAQSLIGKILAPSIGSLEAAHCSEARNVWSITCPNTDLPDHPCSQRRWDEPLCRLVRKHLLDTSPSSTDRARLLATAEWESGLWLTALPSPNIGTLLDNTTFRLATCLRLGAPTNHPHRCQCGVMVNNLGHHGLSCVRSAGRIPRHASINDVIRRALVSAKLPAVLEPSGLARDDGKRPDGMTLVPWSMGRPLVWDATCVDTLAPSHIPDTKNNAGAAASSAENLKRRKYVALGSSYIFAAFGVETLGPWGPSARRLYKDLSARLIEASGDQRAGYYFAQRIAIAIQRGNTASLLGTLPVDSDLGQIFYL

SEQ ID NO: 1766 - protein, 719 aa, Pammene fasciana
MSFPNGSAGGLDGLTPQHLKDLLCSGCGETGETLLKDLTALVNIMLAGQVPDDIKDVLYGANLCALTKKDGGIRPIAVGTTLRRLTAKIACRSIIDQLGSELQPIQLGFGSKSGCEAAVHAVRTFLEHEAGEVLLKVDVCNAFNSVDRGALLTQIKEKIPQTYKFLWQCYSSPSKLLYKTNVLDSCVGCQQGDPLGPAIFSLAIHPIIKELNSKLNVWYLDDGTLGGEVTSVLEDFKKIITDLKTIGLSLNFSKCELFITDSCPNKENTIDLFKNLAPGIKIINKESLHLLGCPILDQSFENFVDSKIQNFKGTSHRLAKINIHSAYSIIKHCLFVPKFTYILRASHLWKYPDLALKLDTLIVETLTSIFNISFDDRTWTQASLPIRFGGLGIRKITCVALPAFLSSVHGAQSLIGKILAPSIGSLEAAHCSEARNVWSITCPNTDLPDHPCSQRRWDEPLCRLVRKHLLDTSPSSTDRARLLATAEWESGLWLTALPSPNIGTLLDNTTFRLATCLRLGAPTNHPHRCQCGVMVNNLGHHGLSCVRSAGRIPRHASINDVIRRALVSAKLPAVLEPSGLARDDGKRPDGMTLVPWSMGRPLVWDATCVDTLAPSHIPDTKNNAGAAASSAENLKRRKYVALGSSYIFAAFGVETLGPWGPSARRLYKDLSARLIEASGDQRAGYYFAQRIAIAIQRGNTASLLGTLPVDSDLGQIFYL

SEQ ID NO: 1767 - protein, 963 aa, Cydia splendana
MPLSSLSCPTPPTALPENLVRCPECIEPSFFKGPRGLNIHIGKKHKQGLSQPTPSTQFQPNAVASPDSQSSNSNVPFWKILSDLKNTRPVLKRIPRGARVSVAKFLSETIKPIVSKNSIHSWENLLTFTSRVLHIKPDQNTKSLTKIIKDNCSCDFSNYPAGDGSKRSSDNIFKKVECKISDGDIKGAARLLFSDDAVAPANSDTLAALLAKHPPSDPNLHLPDPPQPNDPSLRASTDDVFAAIMSFPNGSAGGLDGLSPQHLKDLLYCGCGDTKESLLKDLTALVNIMLAGQVPLEITGVLYGANLCALTKKDGGIRPIAVGTTLRRLTAKIACHSILKELSSELQPVQLGFGSKSGCEAAVHAVRTYIEHQAGEVLLKVDVSNAFNSVDRGALLTQIKDKIPATYNFLWQCYSSPSKLLYQSNLLASSVGCQQGDPLGPAIFSLAIHPIIKNLKSKLNLWYLDDGTLGGEAFSVLGDLEKLKTDLSIIGLSLNFSKCELFVTESCPNKERTIEQFEQLAPGIKIIKKETLHLLGCPILDQSFENFIDTKIQNFKASSHRLIKINIHSAYCIIKHCLFVPKFTYILRGSHLWKHPSLLSNLDNLVLETLTTIFNISFGERTWTQASLPIRLGGLGIRKISSVALPAFLASVHGAQNLIGKILAPSLGVLEASHCTEAKNVWQLTCPNTDPPINPCSQRQWDEPLCRLTRNRLLDSAHSPTDRARLLATAEWESGLWLQTLPSTTVGTFLDNTTFRLATCLRLGAPTNMPHRCQCGDMVDNLGHHGLSCSRSAGRIPRHASLNDVIRRALVSAKIPAVLEPNGLARVDGKRPDGMTLVPWSMGRPLVWDATCVDTLAPSHIPSTKVGAGAAASSAESLKRRKYVTLGSSYIFAAFGVETLGPWGPSARRLYEELSKRLIEASGDQRAGQYFAQRISIAIQRGNAASLLGTLPTDHDLGQIFYL

SEQ ID NO: 1768 - protein, 964 aa, Cydia splendana
MPLASLSCPTRTTALPENLLRCPECPEPSYYKGPRGLNIHITKKHRQSHTQPSSIVLSQPNVSAPSQLPDHTRSDEPFHKFLSDLKNSRPVLKRIPRGARVSVAKSLSHSIKTILSDNSTCNWEHLLSFTFKVLHISSDKHSKSLTKIVKDNCCSDISFQLTSHNFRNSNNNLFKKVETKVSDGDIKGAARLLFSDDAVAPSNSDTLTALHSKHPSPATNLCLPDPPLPGDPNLIATTQDVLGAVMSFPNGSAGGLDGLTPQHLKDLLCSGCGETGEILLKDLTGLVNIMLAGQVPDGIRDVLYGANLCALTKKDGGIRPIAVGATLRRLAAKIACRSILSKLTPELQPIQLGFGSKSGCEAAVHAVRTFLEHNAGEVLLKVDVCNAFNSVDRGALLTQIKDQIPLIYKFLWQCYSSPSKLLYKTNVLASSVGCQQGDPLGPAIFSLAIHPIIKKLNSKLNIWYLDDGTLGGEAISVLEDLKKINIDLKEIGLSLNFSKCELFITDSCPDKENTINLFRQLAPGIKIINKESLHLLGCPVLDQSFENFVDSKIQNFTATSHRLAKINLHSAYSIVKHCLFVPKFTYILRGTHLWKHPNLVSKLDTLVVETLTSIFNISFDERSWTQASLPIRFGGLGIRKISCVSLPAFLSSVHGAQSLIGKILDPSIGSMEAAHCSEAKNVWSITCPNTDLPENPCSQRQWDEPICQLVRKNLLDTSPSSTDRARLLATAEWESGLWLQALPSPNIGTFLDNTTFRLAASLRVGASTNQPHRCQCGTTVDILGHHGLSCVRSAGRIPRHASINDVIRRALVSAKVPAVLEPSGLARDDGKRPDGLTLVPWSMGRPLVWDATCVDTLAPSHVPSTKDSAGAAASSAESLKRRKYAALGSSYIFAAFGVETLGPWGPSARRLYKDLSARLIEASGDQRAGHYFAQRISIAIQRGNTASLLGTLPVDGDLGQIFYL

SEQ ID NO: 1769 - protein, 967 aa, Notocelia uddmanniana
MPLASLSCPTRSAASPDNHLRCPECSEPRFFKGPRGLNIHIAKKHRACHTQPSSLILSQPNVLAPSPFQQLPNNTRPDVPFHRILSDLKKSRPVLKRIPRGARLSVSKSLSDTIRAVLSDNSVCNWEHLLTFTFKVLHINSNQKSKSLTKIVKDNCCIDFSFQASSDNFTNSNNNLFKKVESKVSDGDIKGAARLLFSDDAVAPANSDTLLALHSKHPPPAASLNLPDPPEPSDLNITATTQDVLGAVKSFPNGSAGGLDGLSPQHLKDLLCYGCGETGEILLKDLTALVNVMLAGQVPDDIKDVLYGANLCALMKKDGGIRPIAVGTTLRRLAAKIACRSILTRLTPELQPVQLGFGSKSGCEAAVHAVRTFLDHDAGEVLLKVDVCNAFNSVDRGALLTQIKEKIPSTYKFLWQCYSSPSKLLYNTNVLASSVGCQQGDPLGPAIFSLAIHPIIKDLNSKLNVWYLDDGTLGGEVISVYEDFKKIITDMKTIGLSLNFSKCELFINDSCLNKENTIDLFKNLAPGIRIISKESLHLLGCPVLDQAFENFVDNKIQKFKTTSHRLAKINLHSAYYIIKYCLFVPKFTYILRGSHLWKYPNLISKLDTLVVETLTSIFNISFDERTWTQASLPIRFGGLGIRKISCVALPAFLSSVHVTQSLIGKILARSIGSLEAAHCSEAKNVWSLTCPNTDQPDNPCSQRRWDEPLCQLVRKNLLDTSTSSLDRARLLASAEWESGLWLQAIPSQNIGTFLDNTTFRLATSLRLGAPTNQPHRCQCGVMVDRLGHHGLSCVRSAGRIPRHASINDVIRRALVSAKLPAVLEPSGLARDDGKRPDGMTLVPWSMGRPLVWDATCVDTLAPSHIPNTQIAAGAAASSAENLKRRKYAALGSGYMFAAFGVETLGPWGQSARRLFIDLSKRLIEASGDQRAGLYFAQRISIAVQRGNTASLLGTLPIDSDLGQNFYL

SEQ ID NO: 1770 - protein, 964 aa, Cydia splendana
MPLASLSCPTRTTALPENLLRCPECPEPSYYKGPRGLNIHITKKHRQSHTQPSSIVLSQPNVSAPSQLPDHTRSDEPFHKFLSDLKNSRPVLKRIPRGARVSVAKSLSHSIKTILSDNSTCNWEHLLSFTFKVLHISSDKHSKSLTKIVKDNCRSDISFQLTSHNFRNSNNNLFKKVETKVSDGDIKGAARLLFSDDAVAPSNSDTLTALHSKHPSPATNLCLPDPPLPGDPNLIATTQDVLGAVMSFPNGSAGGLDGLTPQHLKDLLCSGCGETGEILLKDLTGLVNIMLAGQVPDGIRDVLYGANLCALTKKDGGIRPIAVGATLRRLAAKIACRSILSKLTPELQPIQLGFGSKSGCEAAVHAVRTFLEHNAGEVLLKVDVCNAFNSVDRGALLTQIKDQIPLIYKFLWQCYSSPSKLLYKTNVLASSVGCQQGDPLGPAIFSLAIHPIIKKLNSKLNIWYLDDGTLGGEAISVLEDLKKINIDLKEIGLSLNFSKCELFITDSCPDKENTINLFRQLAPGIKIINKESLHLLGCPVLDQSFENFVDSKIQNFTATSHRLAKINLHSAYSIVKHCLFVPKFTYILRGTHLWKHPNLVSKLDTLVVETLTSIFNISFDERSWTQASLPIRFGGLGIRKISCVSLPAFLSSVHGAQSLIGKILDPSIGSMEAAHCSEAKNVWSITCPNTDLPENPCSQRQWDEPICQLVRKNLLDTSPSSTDRARLLATAEWESGLWLQALPSPNIGTFLDNTTFRLAASLRVGASTNQPHRCQCGTTVDILGHHGLSCVRSAGRIPRHASINDVIRRALVSAKVPAVLEPSGLARDDGKRPDGLTLVPWSMGRPLVWDATCVDTLAPSHVPSTKDSAGAAASSAESLKRRKYAALGSSYIFAAFGVETLGPWGPSARRLYKDLSARLIEASGDQRAGHYFAQRISIAIQRGNTASLLGTLPVDGDLGQIFYL

SEQ ID NO: 1771 - protein, 964 aa, Pammene fasciana
MPLVSLSCPSRTTASPENRLRCPECIEPRFFKGSRGLNIHIAKKHRSCLTQPSSSLLSQSQPNVPAPSSNHTRSDIPFYQILCDLKSSRPVLKRIPRGARISVSKSLSDTIKTILSENSTQNWEHFLTFTFKVLHINSNQNSKSLTQKVKDNCCKDKSFHHNPVNFRNATYNLFKTVESKVADGDIRGAARLLFSDDAVAPNNSDTLTALHNKHPPSATNLCLPEPPQPIEPNLTATPQDVIGAVMSFPNGSAGGLDGLTPQHLKDLLCSGCGETGETLLKDLTALVNIMLAGQVPDDIKDVLYGANLCALTKKDGGIRPIAVGTTLRRLTAKITCRSILDQLSSELQPIQLGFGSKSGCEAAVHAVRTFLEHEAGEVLLKVDVCNAFNSVDRGALLTQIKEKIPQTYKFLWQCYSSPSKLLYKTNVLDSCVGCQQGDPLGPAIFSLAIHPIIKELNSKLNVWYLDDGTLGGEVTSVLEDFKKIITDLKTIGLSLNFSKCELFITDSCPNKENTIDLFKNLAPGIKIINKESLHLLGCPILDQSFENFVDSKIQNFKVTSHRLAKINIHSAYSIIKHCLFVPKFTYILRASHLWKYPDLALKLDTLIVETLTSIFNISFDDRTWTQASLPIRFGGLGIRKITCVALPAFLSSVHGAQSLIGKILAPSIGSLEAAHCSEARNVWSITCPNTDLPDHPCSQRRWDEPLCRLVRKNLLDTSPSSTDRARLLATAEWESGLWLTALPSPNIGTLLDNTTFRLATCLRLGAPTNHPHRCQCGVMVNNLGHHGLSCVRSAGRIPRHASINDVIRRALVSAKLPAVLEPSGLARDDGKRPDGMTLVPWSMGRPLVWDATCVDTLAPSHIPDTKNNAGAAASSAEDLKRRKYVALGSSYIFAAFGVETLGPWGPSARRLYKDLSARLIEASGDQRAGYYFAQRIAIAIQRGNTASLLGTLPVDSDLGQIFYL

SEQ ID NO: 1772 - protein, 967 aa, Notocelia uddmanniana
MPLASLSCPTRSAASPDNHLRCPECSEPRFFKGPRGLNIHIAKKHRACHTQPSSLILSQPNVLAPSPFQQLPNNTRPDVPFHRILSDLKKSRPVLKRIPRGARLSVSKSLSDTIRAVLSDNSVCNWEHLLTFTFKVLHINSNQKSKSLTKIVKDNCCIDFSFQASSDNFTNSNNNLFKKVESKVSDGDIKGAARLLFSGDAVAPANSDTLLALHSKHPPPAASLNLPDPPEPSHLNITATTQDVLGAVKSFPNGSAGGLDGLSPQHLKDLLCYGCGETGEILLKDLTALVNVMLAGQVPDDIKDVLYGANLCALMKKDGGIRPIAVGTTLRRLAAKIACRSILTRLTPELQPVQLGFGSKSGCEAAVHAVRTFLDHDAGEVLLKVDVCNAFNSVDRGALLTQIKEKIPSTYKFLWQCYSSPSKLLCNTNVLASSVGCQQGDPLGPAIFSLAIHPIIKDLNSKLNVWYLDDGTLGGEVISVYEDFKKIITDMKTIGLSLNFSKCELFINDSCLNKENTIDLFKNLAPGIRIISKESLHLLGCPVLDQAFENFVDNKIQKFKTTSHRLAKINLHSAYYIIKYCLFVPKFTYILRGSHLWKYPNLISKLDTLVVETLTSIFNISFDERTWTQASLSIRFGGLGIRKISCVALPAFLSSVHVTQSLIGKILVRSIGSLEAAHCSEAKNVWSLTCPNTDQPDNPCSQRRWDEPLCQLVRKNLLDTSTSSSDRARLLASAEWESGLWLQAIPSQNIGTFLDNTTFRLATSLRLGAPTNQPHRCQCGVMVDRLGHHGLSCVRSAGRIPRHASINDVIRRALVSAKLPAVLEPSGLARDDGKRPDGMTLVPWSMGRPLVWDATCVDTLAPSHIPNTQIAAGAAASSAENLKRRKYAALGSGYMFAAFGVETLGPWGQSARRLFIDLSKRLIEASGDQRVGLYFAQRISIAVQRGNTASLLGTLPIDSDLGQIFYL

SEQ ID NO: 1773 - protein, 964 aa, Cydia splendana
MPLASLSCPTRTTALPENLLRCPECPEPSYYKGPRGLNIHITKKHRQSHTQPSSIVLSQPNVSAPSQLPDHTRSDEPFHKFLSDLKNSRPVLKRIPRGARVSVAKSLSHSIKTILSDNSSCNWEHLLSFTFKVLHISSDKHSKSLTKIVKDNCCSDISFQLTSHNFRNSNNNLFKKVETKVSDGDIKGAARLLFSDDAVAPSNSDTLTALHSKHPSPATNLCLPDPPLPGDPNLIATTQDVLGAVMSFPNGSAGGLDGLTPQHLKDLLCSGCGETGEILLKDLTGLVNIMLAGQVPDGIRDVLYGANLCALTKKDGGIRPIAVGATLRRLAAKIACRSILSKLTPELQPIQLGFGSKSGCEAAVHAVRTFLEHNAGEVLLKVDVCNAFNSVDRGALLTQIKDQIPLIYKFLWQCYSSPSKLLYKTNVLASSVGCQQGDPLGPAIFSLAIHPIIKKLNSKLNIWYLDDGTLGGEAISVLEDFKKINIDLKEIGLSLNFSKCELFITDSCPDKENTINLFRQLAPGIKIINKESLHLLGCPVLDQSFENFVDSKIQNFTATSHRLAKINLHSAYSIVKHCLFVPKFTYILRGTHLWKHPNLVSKLDTLVVETLTSIFNISFDERSWTQASLPIRFGGLGIRKISCVSLPAFLSSVHGAQSLIGKILDPSIGSMEAAHCSEAKNVWSITCPNTDLPENPCSQRQWDEPICQLVRKNLLDTSPSSTDRARLLATAEWESGLWLQAVPSPNIGTFLDNTTFRLAASLRVGASTNQPHRCQCGTTVDILGHHGLSCVRSAGRIPRHASINDVIRRALVSAKVPAVLEPSGLARDDGKRPDGLTLVPWSMGRPLVWDATCVDTLAPSHVPSTKDSAGAAASSAESLKRRKYAALGSSYIFAAFGVETLGPWGPSARRLYKDLSARLIEASGDQRAGHYFAQRISIAIQRGNTASLLGTLPVDGDLGQIFYL

SEQ ID NO: 1774 - protein, 964 aa, Pammene fasciana
MPLVSLSCPSRTTASPENRLRCPECIEPRFFKGSRGLNIHIAKKHRSCLTQPSSSLLSQSQPNVPAPSSNHTRSDIPFHQILCDLKSTRPVLKRIPRGARISVSKSLSDTIKTILSENSTQNWEHFLTFTFKVLHINSNQNSKSLTQKVKDNCCKDKSFHHNPVNFRNSTYNLFKTVESKVADGDIRGAARLLFSDDAVAPNNSDTLTALHNKHPPSATNLCLPEPPQPIEPNLTATPQDVIGAVMSFPNGSAGGLDGLTPQHLKDLLCSGCGETGETLLKDLTALVNIMLAGQVPDDIKDVLYGANLCALTKKDGGIRPIAVGTTLRRLTAKIACRSILDQLSSELQPIQLGFGSKSGCEAAVHAVRTFLEHEAGEVLLKVDVCNAFNSVDRGALLTQIKEKIPQTYKFLWQCYSSPSKLLYKTNVLDSCVGCQQGDPLGPAIFSLAIHPIIKELNSKLNVWYLDDGTLGGEVTSVLEDFKKIITDLKTIGLSLNFSKCELFITDSCPNKENTIDLFKNLAPGIKIINKESLHLLGCPILDQSFENFVDSKIQNFKVTSHRLAKINIHSAYSIIKHCLFVPKFTYILRASHLWKYPDLALKLDTLIVETLTSIFNISFDDRTWTQASLPIRFGGLGIRKITCVALPAFLSSVHGAQSLIGKILAPSIGSLEAAHCSEARNVWSITCLNTDLPDHPCSQRRWDEPLCRLVRKNLLDTSPSSTDRARLLATAEWESGLWLTALPSPNIGTLLDNTTFRLATCLRLGAPTNHPHRCQCGVMVNNLGHHGLSCVRSAGRIPRHASINDVIRRALVSAKLPAVLEPSGLARDDGKRPDGMTLVPWSMGRPLVWDATCVDTLAPSHIPDTKNNAGAAASSAEDLKRRKYVALGSSYIFAAFGVETLGPWGPSARRLYKDLSARLIEASGDQRAGYYFAQRIAIAIQRGNTASLLGTLPVDSDLGQIFYL

SEQ ID NO: 1775 - protein, 968 aa, Pammene fasciana
MPLVSLSCPSRTTASPENRLRCPECIEPRFFKGSRGLNIHIAKKHRSCLTQPSSSLLSHSQTNVPAPSHSQLPNHTRPDIPFHQILCDLKSSRPVLKRIPRGARISVSKSLSDTIKTILCENSTQNWEHLLTFTFKVLHINSNQNSKSLTQKVKDNCCKDKSFHHNPDNFRNSTYNLFKTVESKVADGDIRGAARLLFSDDAVAPNNSDTLTALYSKHPPSATNLCLPEPPQPIEPNLTATPQDVIGAVMSFPNGSAGGLDGLTPQHLKDLLCSGCGETGETLLKDLTALVNIMLAGQVPDDIKDVLYGANLCALTKKDGGIRPIAVGTTLRRLTAKIACRSIIDQLGSELQPIQLGFGSKSGCEAAVHAVRTFLEHEAGEVLLKVDVCNAFNSVDRGALLTQIKEKIPQTYKFLWQCYSSPSKLLYKTNVLDSCVGCQQGDPLGPAIFSLAIHPIIKELNSKLNVWYLDDGTLGGEVTSVLEDFKKIITDLKTIGLSLNFSKCELFITDSCPNKENTIDLFKNLAPGIKIINKESLHLLGCPILDQSFENFVDSKIQNFKGTSHRLAKINIHSAYSIIKHCLFVPKFTYILRASHLWKYPDLALKLDTLIVETLTSIFNISFDDRTWTQASLPIRFGGLGIRKITCVALPAFLSSVHGAQSLIGKILAPSIGSLEAAHCSEARNVWSITCPNTDLPDHPCSQRRWDEPLCRLVRKHLLDTSPSSTDRARLLATAEWESGLWLTALPSPNIGTLLDNTTFRLATCLRLGAPTNHPHRCQCGVMVNNLGHHGLSCVRSAGRIPRHASINDVIRRALVSAKLPAVLEPSGLARDDGKRPDGMTLVPWSMGRPLVWDATCVDTLAPSHIPDTKNNAGAAASSAENLKRRKYVALGSSYIFAAFGVETLGPWGPSARRLYKDLSARLIEASGDQRAGYYFAQRIAIAIQRGNTASLLGTLPVDSDLGQIFYL

SEQ ID NO: 1776 - protein, 963 aa, Cydia splendana
MPLSSLSCPTPPTALPENLVRCPECIEPSFFKGPRGLNIHIGKKHKQGLSQPTPSTQFQPNAVASPDSQSSNSNVPFWKILSDLKNTRPVLKRIPRGARVSVAKFLSETIKSIVSKNSIHSWENLLTFTSRVLHIKPDQNTKSLTKIIKDNCSCDFSNYPAADGSKRSSDNIFKKVECKISDGDIKGAARLLFSDDAVAPANSDTLAALLAKHPPSDPNLHLPDPPQPNDPSLRASTDDVFAAIMSFPNGSAGGLDGLSPQHLKDLLYCGCGDTKESLLKDLTALVNIMLAGQVPLEITGVLYGANLCALTKKDGGIRPIAVGTTLRRLTAKIACHSILKELSSELQPVQLGFGSKSGCEAAVHAVRTYIEHQAGEVLLKVDVSNAFNSVDRGALLTQIKDKIPATYNFLWQCYSSPSKLLYQSNLLASSVGCQQGDPLGPAIFSLAIHPIIKNLKSKLNLWYLDDGTLGGEAFSVLGDLEKLKTDLSIVGLSLNFSKCELFVTESCPNKERTIEQFEQLAPGIKIIKKETLHLLGCPILDQSFENFIDTKIQNFKASSHRLIKINIHSAYCIIKHCLFVPKFTYILRGSHLWKHPSLLSNLDNLVLETLTTIFNISFGERTWTQASLPIRLGGLGIRKISSVALPAFLASVHGAQNLIGKILAPSLGVLEASHCTEAKNVWQLTCPNTDPPINPCSQRQWDEPLCRLTRNRLLDSAHSPTDRARLLATAEWESGLWLQTLPSTTVGTFLDNTTFRLATCLRLGAPTNMPHRCQCGDMVDNLGHHGLSCSRSAGRIPRHASLNDVIRRALVSAKIPAVLEPNGLARVDGKRPDGMTLVPWSMGRPLVWDATCVDTLAPSHIPSTKVGAGAAASSAESLKRRKYVTLGSSYIFAAFGVETLGPWGPSARRLYEELSKRLIEASGDQRAGQYFAQRISIAIQRGNAASLLGTLPTDHDLGQIFYL

SEQ ID NO: 1777 - protein, 964 aa, Pammene fasciana
MPLVSLSCPSRTTASPENRLRCPECIEPRFFKGSRGLNIHIAKKHRSCLTQPSSSLLSQSQPNVPAPSSNHTRSDIPFHQILCDLKSSRPVLKRIPRGARISVSKSLSDTIKTILSENSTQNWEHFLTFTFKVLHINSNQNSKSLTQKVKDNCCKDKSFHHNPVNFRNATYNLFKTVESKVADGDIRGAARLLFSDDAVAPNNSDTLTALHNKHPPSATNLCLPEPPQPIEPNLTATPQDVIGAVMSFPNGSAGGLDGLTPQHLKDLLCSGCGETGETLLKDLTALVNIMLAGQVPDDIKDVLYGANLCALTKKDGGIRPIAVGTTLRRLTAKIACRSILDQLSSELQPIQLGFGSKSGCEAAVHAVRTFLEHEAGEVLLKVDVCNAFNSVDRGALLTQIKEKIPQTYKFLWQCYSSPSKLLYKTNVLDSCVGCQQGDPLGPAIFSLAIHPIIKELNSKLNVWYLDDGTLGGEVTSVLEDFKKIITDLKTIGLSLNFSKCELFITDSCPNKENTIDLFKNLAPGIKIINKESLHLLGCPILDQSFENFVDSKIQNFKVTSHRLAKINIHSAYSIIKHCLFVPKFTYILRASHLWKYPDLALKLDTLIVETLTSIFNISFDDRTWTQASLPIRFGGLGIRKITCVALPAFLSSVHGAQSLIGKILAPSIGSLEAAHCSEARNVWSITCPNTDLPDHPCSQRRWDEPLCRLVRKNLLDTSPSSTDRARLLATAEWESGLWLTALPSPNIGTLLDNTTFRLATCLRLGAPTNHPHRCQCGVMVNNLGHHGLSCVRSAGRIPRHASINDVIRRALVSAKLPAVLEPSGLARDDGKRPDGMTLVPWSMGRPLVWDATCVDTLAPSHIPDTKNNAGAAASSAEDLKRRKYVALGSSYIFAAFGVETLGPWGPSARRLYKDLSARLIEASGDQRAGYYFAQRIAIAIQRGNTASLLGTLPVDSDLGQIFYL

SEQ ID NO: 1778 - protein, 963 aa, Cydia splendana
MPLSSLSCPTPPTALPENLVRCPECIEPSFFKGPRGLNIHIGKKHKQGLSQPTPSTQFQPNAVASPDSQSSNSNVPFWKILSDLKNTRPVLKRIPRGARVSVAKFLSETIKSIVSKNSIHSWENLLTFTSRVLHIKPDQNTKSLTKIIKDNCSCDLSNYPAADGSKRSSDNIFKKVECKISDGDIKGAARLLFSDDAVAPANSDTLAALLAKHPPSDPNLHLPDPPQPNDPSLRASTDDVFAAIMSFPNGSAGGLDGLSPQHLKDLLYCGCGDTKESLLKDLTALVNIMLAGQVPLEITGVLYGANLCALTKKDGGIRPIAVGTTLRRLTAKIACHSILKELSSELQPVQLGFGSKSGCEAAVHAVRTYIEHQAGEVLLKVDVSNAFNSVDRGALLTQIKDKIPATYNFLWQCYSSPSKLLYQSNLLASSVGCQQGDPLGPAIFSLAIHPIIKNLKSKLNLWYLDDGTLGGEAFSVLGDLEKLKTDLSIIGLSLNFSKCELFVTESCPNKERTIEQFEQLAPGIKIIKKETLHLLGCPILDQSFENFIDTKIQNFKASSHRLIKINIHSAYCIIKHCLFVPKFTYILRGSHLWKHPSLLSNLDNLVLETLTTIFNISFGERTWTQASLPIRLGGLGIRKISSVALPAFLASVHGAQNLIGKILAPSLGVLEASHCTEAKNVWQLTCPNTDPPINPCSQRQWDEPLCRLTRNRLLDSAHSPTDRARLLATAEWESGLWLQTLPSTTVGTFLDNTTFRLATCLRLGAPTNMPHRCQCGDMVDNLGHHGLSCSRSAGRIPRHASLNDVIRRALVSAKIPAVLEPNGLARVDGKRPDGMTLVPWSMGRPLVWDATCVDTLAPSHIPSTKVGAGAAASSAESLKRRKYVTLGSSYIFAAFGVETLGPWGPSARRLYEELSKRLIEASGDQRAGQYFAQRISIAIQRGNAASLLGTLPTDHDLGQIFYL

SEQ ID NO: 1779 - protein, 967 aa, Notocelia uddmanniana
MPLASLSCPTRSVASPDNHLRCPECSEPRFFKGPRGLNIHIAKKHRACHTQPSSLILSQPNVLAPSPFQQLPNNTRPDVPFHRILSDLKKSRPVLKRIPRGARLSVSKSSSDTIRAVLSDNSVCNWEHLLTFTFKVLHINSNQKSKSLTKIVKDNCCIDFSFQASSDNFTNSNNNLFKKVESKVSDGDIKGAARLLFPDDAVAPANSDTLLALHSKHPPPAASLNLPDPPEPSDLNITATTQDVLGAVKSFPNGSAGGLDGLSPQHLKDLLCYGCGETGEILLKDLTALVNVMLAGQVPDDIKDVLYGANLCALMKKDGGIRPIAVGTTLRRLAAKIACRSILTRLTPELQPVQLGFGSKSGCEAAVHAVRTFLDHDAGEVLLKVDVCNAFNSVDRGALLTQIKEKIPSTYKFLWQCYSSPSKLLYNTNVLASSVGCQQGDPLGPAIFSLAIHPIIKDLNSKLNVWYLDDGTLGGEVISVYEDFKKIITDMKTIGLSLNVSKCELFINDSCLNKENTIDLFKNLAPGIRIISKESLHLLGCPVLDQAFENFVDNKILKFKTTSHRLAKINLHSAYYIIKYCLFVPKFTYILRGSHLWKYPNLISKLDTLVVETLTSIFNISFDERAWTQASLPIRFGGLGIRKISCVALPAFLSSVHVTQSLIGKILARSIGSLEAAHCSEAKNVSSLTCPNTDQPDNPCSQRRWDEPLCQLVRKNLLDTSTSSSDRARLLASAEWASGLWLQAIPSQNIGTFLDNTTFRLATSLRLGAPTNQPHRCQCGVMVDRLGHHGLSCVRSAGRIPRHASINDVIRRALVSAKLPAVLEPSGLARDDGKRPDGMTLVPWSMGRPLVWDATCVDTLAPSHIPNTQIAAGAAASSAENLKRRKYAALGSGYMFAAFGVETLGPWGQSARRLFIDLSKRLIEASGDQRAGLYFAQRISIAVQRGNTASLLGTLPIDSDLGQIFYL

SEQ ID NO: 1780 - protein, 968 aa, Pammene fasciana
MPLVSLSCPSRTTASPENRLRCPECIEPRFFKGSRGLNIHIAKKHRSCLTQPSSSLLSHSQTNVPAPSHSQLPNHTRPDIPFHQILCDLKSSRPVLKRIPRGARISVSKSLSDTIKTILCENSTQNWEHLLTFTFKVLHINSNQNSKSLTQKVKDNCCKDKSFHHNPDNFRNSTYNLFKTVESKVADGDIRGAARLLFSDDAVAPNNSDTLTALYSKHPPSATNLCLPEPPQPIEPNLTATPQDVIGAVMSFPNGSAGGLDGLTPQHLKDLLCSGCGETGETLLKDLTALVNIMLAGQVPDDIKDVLYGANLCALTKKDGGIRPIAVGTTLRRLTAKIACRSIIDQLGSELQPIQLGFGSKSGCEAAVHAVRTFLEHEAGEVLLKVDVCNAFNSVDRGALLTQIKEKIPQTYKFLWQCYSSPSKLLYKTNVLDSCVGCQQGDPLGPAIFSLAIHPIIKELNSKLNVWYLDDGTLGGEVTSVLEDFKKIITDLKTIGLSLNFSKCELFITDSCPNKENTIDLFKNLAPGIKIINKESLHLLGCPILDQSFENFVDSKIQNFKGTSHRLAKINIHSAYSIIKHCLFVPKFTYILRASHLWKYPDLALKLDTLIVETLTSIFKISFDDRTWTQASLPIRFGGLGIRKITCVALPAFLSSVHGAQSLIGKILAPSIGSLEAAHCSEARNVWSITCPNTDLPDHPCSQRRWDEPLCRLVRKHLLDTSPSSTDRARLLATAEWESGLWLTALPSPNIGTLLDNTTFRLATCLRLGAPTNHPHRCQCGVMVNNLGHHGLSCVRSAGRIPRHASINDVIRRALVSAKLPAVLEPSGLARDDGKRPDGMTLVPWSMGRPLVWDATCVDTLAPSHIPDTKNNAGAAASSAENLKRRKYVALGSSYIFAAFGVETLGPWGPSARRLYKDLSARLIEASGDQRAGYYFAQRIAIAIQRGNTASLLGTLPVDSDLGQFFYL

SEQ ID NO: 1781 - protein, 964 aa, Cydia splendana
MPLASLSCPTRTTALPENLLRCPECPEPSYYKGPRGLNIHITKKHRQSHTQPTSIVLSQPNVSAPSQLPDHTRSDEPFHKFLSDLKNSRPVLKRIPRGARVSVAKSLSHSIKTILSDNSTRNWEHLLSFTFKVLHISSDKHSKSLTKIVKDNCCSDISFQLTSHNFRNSNNNLFKKVETKVSDGDIKGAARLLFSDDAVAPSNSDTLTALHSKHPSPATNLCLPDPPLPGDPNLIATTQDVLGAVMSFPNGSAGGLDGLTPQHLKDLLCSGCGETGEILLKDLTGLVNIMLAGQVPDGIRDVLYGANLCALTKKDGGIRPIAVGATLRRLAAKIACRSILSKLTPELQPIQLGFGSKSGCEAAVHAVRTFLEHNAGEVLLKVDVCNAFNSVDRGALLTQIKDQIPLIYKFLWQCYSSPSKLLYKTNVLASSVGCQQGDPLGPAIFSLAIHPIIKKLNSKLNIWYLDDGTLGGEAISVLEDLKKINIDLKEIGLSLNFSKCELFITDSCPDKENTINLFRQLAPGIKIINKESLHLLGCPVLDQSFENFVDSKIQNFTATSHRLAKINLHSAYSIVKHCLFVPKFTYILRGTHLWKHPNLVSKLDTLVVETLTSIFNISFDERSWTQASLPIRFGGLGIRKISCVSLPAFLSSVHGAQSLIGKILDPSIGSMEAAHCSEAKNVWSITCPNTDLPENPCSQRQWDEPICQLVRKNLLDTSPSSTDRARLLATAEWESGLWLQALPSPNIGTFLDNTTFRLAASLRVGASTNQPHRCQCGTTVDILGHHGLSCVRSAGRIPRHASINDVIRRALVSAKVPAVLEPSGLARDDGKRPDGLTLVPWSMGRPLVWDATCVDTLAPSHVPSTKDSAGAAASSAESLKRRKYAALGSSYIFAAFGVETLGPWGPSARRLYKDLSARLIEASGDQRAGHYFAQRISIAIQRGNTASLLGTLPVDGDLGQIFYL

SEQ ID NO: 1782 - protein, 933 aa, Pammene fasciana
MPLVSLSCPSRTTASPENRLRCPECIEPRFFKGSRGLNIHIAKKHRSCLTQPSSSLLSHSQTNVPAPSHSQLPNHTRPDIPFHQILCDLKSSRPVLKRIPRGARISVSKSLSDTIKTILCENSTRNWEHLLTFTFKVLHINSNQNSKSLTQKVKDNCCKDKSFHHNPDNFRNFTYNLFKTVESKVADGDIRGAARLLFSDDAVAPNNSDTLTALYSKHPPSATNLCLPEPPQPIEPNLTATPQDVIGAVMSFPNGSAGGLDGLTPQHLKDLLCSGCGETGETLLKDLTALVNIMLAGQVPDDIKDVLYGANLCALTKKDGGIRPIAVGTTLRRLTAKIACRSIIYQLGSELQPIQLGFGSKSGCEAAVHAVRTFLEHEAGEVLLKVDVCNAFNSVDRGALLTQIKEKIPQTYKFLWQCYSSPSKLLYKTNVLDSCVGCQQGDPLGPAIFSLAIHPIIKELNSKLNVWYLDDGTLGGEVTSVLEDFKKIITDLKTIGLSLNFSKCELFITDSCPNKENTIDLFKNLAPGIKIINKESLHLLGCPILDQSFENFVDSKIQNFKGTSHRLAKINIHSAYSIIKHCLFVPKFTYILRASHLWKYPDLALKLDTLIVETLTSIFNISFDDRTWTQASLPIRFGGLGIRKITCVALPAFLSSVHGAQSLIGKILAPSIGSLEAAHCSEARNVWSITCPNTDLPDHPCSQRRWDEPLCRLVRKHLLDTSPSSTDRARLLATAEWESGLWLTALPSPNIGTLLDNTTFRLATCLRLGAPTNHPHRCQCGVMVNNLGHHGLSCVRSAGRIPRHASINDVIRRALVSAKLPAVLEPSGLARDDGKRPDGMTLVPWSMGRPLVWDATCVDTLAPSHIPDTKNNAGAAASSAENLKRRKYVALGSSYIFAAFGVETLGPWGPSARRLYKDLSARLIEASGDQRAG

SEQ ID NO: 1783 - protein, 964 aa, Pammene fasciana
MPLVSLSCPSRTTASPENRLRCPECIEPRFFKGSRGLNIHIAKKHRSCLTQPSSSLLSQSQPNVPAPSSNHTRSDIPFYQILCDLKSSRPVLKRIPRGARISVSKSLSDTIKTILSENSTQNWEHFLTFTFKVLHINSNQNSKSLTQKVKDNCCKDKSFHHNPVNFRNSTYNLFKTVESKVADGDIRGAARLLFSDDAVAPNNSDTLTALHNKHPPSATNLCLPEPPQPIEPNLTATPQDVIGAVMSFPNGSAGGLDGLTPQHLKDLLCSGCGETGETLLKDLTALVNIMLAGQVPDDIKDVLYGANLCALTKKDGGIRPIAVGTTLRRLTAKIACRSILDQLSSELQPIQLGFGSKSGCEAAVHAVRTFLEHEAGEVLLKVDVCNAFNSVDRGALLTQIKEKIPQTYKFLWQCYSSPSKLLYKTNVLDSCVGCQQGDPLGPAIFSLAIHPIIKELNSKLNVWYLDDGTLGGEVTSVLEDFKKIITDLKTIGLSLNFSKCELFITDSCPNKENTIDLFKNLAPGIKIINKESLHLLGCPILDQSFENFVDSKIQNFKVTSHRLAKINIHSAYSIIKHCLFVPKFTYILRASHLWKYPDLALKLDTLIVETLTSIFNISFDDRTWTQASLPIRFGGLGIRKITCVALPAFLSSVHGAQSLIGKILAPSIGSLEAAHCSEARNVWSITCSNTDLPDHPCSQRRWDEPLCRLVRKNLLDTSPSSTDRARLLATAEWESGLWLTALPSSNIGTLLDNTTFRLATCLRLGAPTNHPHRCQCGVMVNNLGHHGLSCVRSAGRIPRHASINDVIRRALVSAKLPAVLEPSGLARDDGKRPDGMTLVPWSMGRPLVWDATCVDTLAPSHIPDTKNNAGAAASSAEDLKRRKYVALGSSYIFAAFGVETLGPWGPSARRLYKDLSARLIEASGDQRAGYYFAQRIAIAIQRGNTASLLGTLPVDSDLGQIFYL

SEQ ID NO: 1784 - protein, 719 aa, Pammene fasciana
MSFPNGSAGGLDGLTPQHLKDLLCSGCGETGETLLKDLTALVNIMLAGQVPDDIKDVLYGANLCALTKKDGGIRPIAVGTTLRRLTAKIACRSIIDQLGSELQPIQLGFGSKSGCEAAVHAVRTFLEHEAGEVLLKVDVCNAFNSVDRGALLTQIKEKNPQTYKFLWQCYSSPSKLLYKTNVLDSCVGCQQGDPLGPAIFSLAIHPIIKELNSKLNVWYLDDGTLGGEVTSVLEDFKKIITDLKTIGLSLNFSKCELFITDSCPNKENTIDLFKNLAPGIKIINKESLHLLGCPILDQSFENFVDSKIQNFKGTSHRLAKINIHSAYSIIKHCLFVPKFTYILRASHLWKYPDLALKLDTLIVETLTSIFNISFDDRTWTQASLPIRFGGLGIRKITCVALPAFLSSVHGAQSLIGKILAPSIGSLEAAHCSEARNVWSITCPNTDLPDHPCSQRRWDEPLCRLVRKHLLDTSPSSTDRARLLATAEWESGLWLTALPSPNIGTLLDNTTFRLATCLRLGAPTNHPHRCQCGVMVNNLGHHGLSCVRSAGRIPRHASINDVIRRALVSAKLPAVLEPSGLARDDGKRPDGMTLVPWSMGRPLVWDATCVDTLAPSHIPDTKNNAGAAASSAENLKRRKYVALGSSYIFAAFGVETLGPWGPSARRLYKDLSARLIEASGDQRAGYYFAQRIAIAIQRGNTASLLGTLPVDSDLGQIFYL

SEQ ID NO: 1785 - protein, 967 aa, Notocelia uddmanniana
MPLASLSCPTRSAASPDNHLRCPECSEPRFFKGPRGLNIHIAKKHRACHTQPSSLILSQPNVLAPSPFQQLPNNTRPDVPFHRILSDLKKSRPVLKRIPRGARLSVSKSLSDTIRAVLSDNSVCNWEHLLTFTFKVLHINSNQKSKSLTKIVKDNCCIDFSFQASSDNFTNSNNNLFKKVESKVSDGDIKGAARLLFSDDAVAPANSDTLLALHSKHPPPAASLNLPDPPEPSDLNITATTQDVLGAVKSFPNGSAGGLDGLSPQHLKDLLCYGCGETGEILLKDLTALVNVMLAGQVPDDIKDVLYGANLCALMKKDGGIRPIAVGTTLRRLAAKIACRSILTRLTPELQPVQLGFGSKSGCEAAVHAVRTFLDHDAGEVLLKVDVCNAFNSVDRGALLTQIKEKIPSTYKFLWQCYSSPSKLLYNTNVLASSVGCQQGDPLGPAIFSLAIHPIIKDLNSKLNVWYLDDGTLGGEVISVYEDFKKIITDMKTIGLSLNFSKCELFINDSCLNKENTIDLFKNLAPGIRIISKESLHLLGCPVLDQAFENFVEKKIQKFKTTSHRLAKINLHSAYYIIKYCLFVPKFTYILRGSHLWKYPNLISKLDTLVVETLTSIFNISFDERTWTQASLPIRFGGLGIRKISCVALPAFLSSVHVTQSLIGKILARSIGSLEAAHCSEAKNVWSLTCPNTDQPDNLCSQRRWDEPLCQLVRKNLLDTSTSSSDRARLLASAEWESGLWLQAIPSQNIGTFLDNTTFRLATSLRLGAPTNQPHRCQCGVMVDRLGHHGLSCVRSAGRIPRHASINDVIRWALVSAKLPAVLEPSGLARDDGKRPDGMTLVPWSMGRPLVWDATCVDTLAPSHIPNTQIAAGAAASSAENLKRRKYAALGSGYMFAAFGVETLGPWGQSARRLFIDLSKRLIEASGDQRAGLYFAQRISIAVQRGNTASLLGTLPIDSDLGQIFYL

SEQ ID NO: 1786 - protein, 961 aa, Cydia splendana
MPLSSLSCPTPPTALPENLVRCPECIEPSFFKGPRGLNIHIGKKHKQGLSQPTPSTQFQPNAVASPDSQSSNSNVPFWKILSDLKNTRPVLKRIPRALSVAKFLSETIKSIVSKNSIHSWENLLTFTSRVLHIKPDQNTKSLTKIIKDNCSCDFSNYPAADGSKRSSDNIFKKVECKISDGDIKGAARLLFSDDAVAPANSDTLAALLAKHPPSDPNLHLPDPPQPNDPSLRASTDDVFAAIMSFPNGSAGGLDGLSPQHLKDLLYCGCGDTKESLLKDLTALVNIMLAGQVPLEITGVLYGANLCALTKKDGGIRPIAVGTTLRRLTAKIACHSILKELSSELQPVQLGFGSKSGCEAAVHAVRTYIEHQAGEVLLKVDVSNAFNSVDRGALLTQIKDKIPATYNFLWQCYSSPSKLLYQSNLLASSVGCQQGDPLGPAIFSLAIHPIIKNLKSKLNLWYLDDGTLGGEAFSVLGDLEKLKTDLSIIGLSLNFSKCELFVTESCPNKERTIEQFEQLAPGIKIIKKETLHLLGCPILDQSFENFIDTKIQNFKASSHRLIKINIHSAYCIIKHCLFVPKFTYILRGSHLWKHPSLLSNLDNLVLETLTTIFNISFGERTWTQASLPIRMGGLGIRKISSVALPAFLASVHGAQNLIGKILAPSLGVLEASHCTEAKNVWQLTCPNTDPPINPCSQRQWDEPLCRLTRNRLLDSAHSPTDRARLLATAEWESGLWLQTLPSTTVGTFLDNTTFRLATCLRLGAPTNMPHRCQCGDMVDNLGHHGLSCSRSAGRIPRHASLNDVIRRALVSAKIPAVLEPNGLARVDGKRPDGMTLVPWSMGRPLVWDATCVDTLAPSHIPSTKVGAGAAASSAESLKRRKYVTLGSSYIFAAFGVETLGPWGPSARRLYEELSKRLIEASGDQRAGQYFAQRISIAIQRGNAASLLGTLPTDHDLGQIFYL

SEQ ID NO: 1787 - protein, 961 aa, Pammene fasciana
MPLVSLSCPSRTTASPENRLRCPECIEPRFFKGSRGLNIHIAKKHRSCLTQPSSSLLSQSQPNVPAPSSNHTRSDIPFHQILCDLKSFRPVLKRIPRGARISVSKSLSDTIKTILSENSTQNWEHFLTFTFKVLHINSNQNSKSLTQKVKDNCCKDKSFHHNPVNFRNSTYNLFKTVESKVADGDIRGAARLLFSDDAVAPNNSDTLTALHNKHPPLATNLCLPEPPQPIEPNLTATPQDVIGAVMSFPNGSAGGLDGLTPQHLKDLLCSGCGETGETLLKDLTALVNIMLAGQVPDDIKDVLYGANLCALTKKDGGIRPIAVGTTLRRLTAKIACRSILDQLSSELQLGFGSKSGCEAAVHAVRTFLEHEAGEVLLKVDVCNAFNSVDRGALLTQIKEKIPQTYKFLWQCYSSPSKLLYKTNVLDSCVGCQQGDPLGPAIFSLAIHPIIKELNSKLNVWYLDDGTLGGEVTSVLEDFKKIITDLKTIGLSLNFSKCELFITDSCPNKENTIDLFKNLAPGIKIINKESLHLLGCPILDQSFENFVDSKIQNFKVTSHRLAKINIHSAYSIIKHCLFVPKFTYILRASHLWKYPDLALKLDTLIVETLTSIFNISFDDRTWTQASLPIRFGGLGIRKITCVALPAFLSSVHGAQSLIGKILAPSIGSLEAAHCSEARNVWSITCPNTDLPDHPCSQRRWDEPLCRLVRKNLLDTSPSSTDRARLLATAEWESGLWLTALPSPNIGTLLDNTTFRLATCLRLGAPTNHPHRCQCGVMVNNLGHHGLSCVRSAGRIPRHASINDVIRRALVSAKLPAVLEPSGLARDDGKRPDGMTLVPWSMGRPLVWDATCVDTLAPSHIPDTKNNAGAAASSAEDLKRRKYVALGSSYIFAAFGVETLGPWGPSARRLYKDLSARLIEASGDQRAGYYFAQRIAIAIQRGNTASLLGTLPVDSDLGQIFYL

SEQ ID NO: 1788 - protein, 918 aa, Pammene fasciana
MPLVSLSCPSRTTASPENRLRCPECIEPRFFKGSRGLNIHIAKKHRSCLTQPSSSLLSQSQPNVPAPSSNHTRSDIPFYQILCDLKSSRPVLKRIPRGARISVSKSLSDTIKTILSENSTQNWEHFLTFTFKVLHINSNQNSKSLTQKVKDNCCKDKSFHHNPVNFRNSTYDLFKTVESKVADGDIRGAARLLFSDDAVAPNNSDTLTALHNKHPPSATNLCLPEPPQPIEPNLTATPQDVIGAVMSFPNGSAGGLDGLTPQHLKDLLCSGCGETGETLLKDLTALVNIMLAGQVPDDIKDVLYGANLCALTKKDGGIRPIAVGTTLRRLTAKIACRSILDQLSSELQPIQLGFGSKSGCEAAVHAVRTFLEHEAGEVLLKVDVCNAFNSVDRGALLTQIKEKNPQTYKFLWQCYSSPSKLLYKTNVLDSCVGCQQGDPLGPAIFSLAIHPIIKELNSKLNVWYLDDGTLGGEVTSVLEDFKKIITDLKTIGLSLNFSKCELFITDSCPNKENTIDLFKNLAPGIKIINKESLHLLGCPILDQSFENFVDSKIQNFKVTSHRLAKINIHSAYSIIKHCLFVPKFTYILRASHLWKYPDLALKLDTLIVETLTSIFNISFDDRTWTQASLPIRFGGLGIRKITCVALPAFLSSVHGAQSLIGKILAPSIGSLEAAHCSEARNVWSITCSNTDLPDHPCSQRRWDEPLCRLVRKNLLDTSPSSTDRARLLATAEWESGLWLTALPSSNIGTLLDNTTFRLATCLRLGAPTNHPHRCQCGVMVNNLGHHGLSCVRSAGRIPRHASINDVIRRALVSAKLPAVLEPSGLARDDGKRPDGMTLVPWSMGRPLVWDATCVDTLAPSHIPDTKNNAGAAASSAEDLKRRKYVALGSSYIFAAFGVETLGPWGQARADCTKTCRRA

SEQ ID NO: 1789 - protein, 962 aa, Pammene fasciana
MPLVSLSCPSRTTASPENRLRCPECIEPRFFKGSRGLNIHIAKKHRSCLTQPSSSLLSQSQPNVPAPSSNHTRSDIPFHQILCDLKSSRPVLKRIPRGARISVSKSLSDTIKTILSENSTQNWEHFLTFTFKVLHINSNQNSKSLTQKVKDNCCKDKSFHHNPVNFRNSTYNLFKTVESKVADGDIRGAARLLFSDDAVAPNNSDTLTALHNKHPPSATNLCLPEPPQPIEPNLTATPQDVIGAVMSFPNGSAGGLDGLTPQHLKDLLCCGETGETLLKDLTALVNIMLAGQVPDDIKDVLYGANLCALTKKDGGIRPIAVGTTLRRLTAKIACRSILDQLSSELQPIQLGFGSKSGCEAAVHAVRTFLEHEAGEVLLKVDVCNAFNSVDRGALLTQIKEKIPQTYKFLWQCYSSPSKLLYKTNVLDSCVGCQQGDPLGPAIFSLAIHPIIKELNSKLNVWYLDDGTLGGEVTSVLEDLKKIITDLKTIGLSLNFSKCELFITDSYPNKENTIDLFKNLAPGIKIINKESLHLLGCPILDQSFENFVDSKIQNFKVTSHRLAKINIHSAYSIIKHCLFVPKFTYILRASHLWKYPDLALKLDTLIVETLTSIFNISFDDRTWTQASLPIRFDGLGIRKITCVALPAFLSSVHGAQSLIGKILAPSIGSLEAAHCSEARNVWSITCPNTDLPDHPCSQRRWDEPLCRLVRKNLLDTSPGSTDRARLLATAEWESGLWLTALPSPNIGTLLDNTNFRLATCLRLGAPTNHPHRCQCGVMVNNLGHHGLSCVRSAGRIPRHASINDVIRRALVSAKLPAVLEPSGLARDDGKRPDGMTLVPWSMGRPLVWDATCVDTLAPSHIPDTKNNAGAAASSAEDLKRRKYVALGSSYIFAAFGVETLGPWGPSARRLYKDLSARLIEASGDQRAGYYFAQRIAIAIQRGNTASLLGTLPVDSDLGQIFYL

SEQ ID NO: 1790 - protein, 959 aa, Notocelia uddmanniana
MSLPATTAMSLSSSLENSVRCPHCAQARFFKGTQGLNVHIARAHRPHISCSAPPVSFPESTGLSQPLGSDSPFWESIGGLKGTLPVFKRIPRGARVAVSKCLAETIQAVLSENSVHAWQQLLIFSYRVLHVESKDQARASLTSKVKVNCTNVSSVHPLPLQKRSQNSAKLVESKVSDGDIGGAARVLFSSDVVAPDNPETLAALREKHPLPAASFSLPDPPQPDDFTLQATAQEVLLAVLSFPNGSAGGLDGLTPQHLKDLLSSDCNGTRDGLLRNLTALVNKMLAGEVPTGVADILYGANLCALLKKDGGIRPIAVGTTFRRLVAKIACRSVLERLGKEFSPLQLGFGSRGGCEAAVHAVRTYMGRLGEQDVLLKVDVRNAFNSVDRGTLLTQIREKIPETYRFLWQCYSSPTKLLFRSNLLESSVGCQQGDPLGPAIFSLAIHPVIKNIKSQLNVWYLDDGTLGGDADTVLADLQKLSSDFGSIGLTLNFSKCELFVSSTSPDRESIVERFTRVAPGIKIVDEKSLHLLGCPVLDQSFEGYVNDKIQNFKSISDRLLRVNVHAAYTIVRHCLFVPKFSYVLRGSHLWKYPNLLLRFDELIEESLTTILNTSFDVRSWEQASLPIRLGGLGIRKISSVALPAFLSSVHSTQGLIRGILASSLGFLEVAHCAEAKNAWALSCPNSNPPSNPCSQRQWDEPLCQLVRNNLLDTSTGLADRARLLAAVEWESGLWLRALPSPSIGTLLDNVTFRLAASLRVGAVTNVPHRCQCGTMVDSLGHHGLSCSRSAGRIPRHASINDVIRRALVSVKVPAILEPVGLARDDGKRPDGMTLVPWRMGRPLVWDATCVDTFAASHLPGTSVNAGHAASSAEDLKRRKYATLGSSYIFEAFGVETLGPWGPSARRIYKDLSARLIDVTGDQRAGQYFAQRVSIAIQRGNAASLLGTLPTGSDLEGVFCL

SEQ ID NO: 1791 - protein, 964 aa, Cydia splendana
MSLSASNVVVPTTSLDIDVRCPQCPQPRYFKGSKGLNIHITKKHKPQVSCSAPVISVPPSTPVLQPRSPPSDPPFWQTLSNLKNTLPIVKRIPRGARVAVSKRLAETVKNTVSENSKHAWEELLTFSFKVLHVNANNQAHMSLTTKIKANCLHDSPMHHINNIHQQYTNSQNMSKIIESKVADGDIRGAARIIFSNDVIAPNSTDTLSALSNKHPSPAASFVLPDAPQLTDIPLKATAEDVLGAVMSFPNGSAGGLDGLTPQHLKDVLSSECNGTRDELLVQLTSLVNLMLTGKVPEDVIDILYGANLCALQKKDGGIRPIAVGCTFRRLTAKIACRAILEKLGREFSPFQLGFGSKSGCEAAVHAVRTYVERRAGEVLLKVDVTNAFNSVDRGALLTQIKEKIPETYNFLWQCYSSPTKLLYKSNLLASSVGCQQGDPLGPAIFSLAIHSIIKNLNSKLNIWYLDDGTLGGEADTVLDDLKKLTSELKSIGLTLNFSKCELFILNPSSDCKIIEDSFAMIAPGIKIISDDQLHLLGCPILDQSFDEYVNAKIQNFNSVSERLLKINMHTAFSIIRYCLFVPKFTYVLRCSHLWKHPTLLLKLDSLIQDTLSSVLNIRFEERSWTQASLPIRHGGLGIRKISSVSLPAFLSSVHSAQNLIGGILSRSLGAIEAAHCTEAKNVWSLTCSNTDPPANPCSQRQWDEPLCRLVRNNLVDTSTSTADRARLLATAEWESGLWLQALPSPFIGTLLDNTTFRLATCLRIGTVTNVPHHCRCGAMVDKFGHHGLSCGRSAGRIPRHASINDVIRRAFVSIKVPAILEPVGLARDDGKRPDGMTLVPWKMGRPLVWDATCVDTLAPSHLPGTSRDAGHAASMAEDLKRRKYATLGSSYIFEAFGVETLGPWGPSARRIYRALAERLIDAAGDQRAGLYFAQRVSIAIQRGNAASLLGTLPIGSDLGDVFYL

SEQ ID NO: 1792 - protein, 964 aa, Cydia splendana
MSLSASNVVVPTTSLDIDVRCPQCPQPRYFKGSKGLNIHITKKHKPQVSCSAPVISVPPSTPVLQPRSPPSDPPFWQTLSNLKNTLPIVKRIPRGARVAVSKRLAETVKNTVSENSKHAWEELLTFSFKVLHVNANNQAHMSLTTKIKANCLHDSPMHHINNIHQQYTNSQNMSKIIESKVADGDIRGAARIIFSNDVIAPNSTDTLSALSNKHPSPAASSVLPDAPQLSDIPLKATAEDVLGAVMSFPNGSAGGLDGLTPQHLKDVLSSECNGTRDELLVQLTSLVNLMLTGKVPEDVIDILYGANLCALQKKDGGIRPIAVGCTFRRLTAKIACRAILEKLGREFSPFQLGFGSKSGCEAAVHAVRTYVERRAGEVLLKVDVTNAFNSVDRGALLTQIKEKIPETYNFLWQCYSSPTKLLYKSNLLASSVGCQQGDPLGPAIFSLAIHSIIKNLNSKLNIWYLDDGTLGGEADTVLDDLKKLTSELKSIGLTLNFSKCELFILNPSSDCKIIEDSFAMIAPGIKIISDNQLHLLGCPILDQSFDEYVNAKIQNFNSVSERLLKINMHTAFSIIRYCLFVPKFTYVLRCSHLWKHPTLLLKLDSLIQDTLSSVLNIRFEERSWTQASLPIRHGGLGIRKISSVSLPAFLSSVHSAQNLIGGILSRSLGAIEAAHCTEAKNVWSLTCSNTDPPANPCSQRQWDEPLCRLVRNNLVDTSTSTADRARLLATAEWESGLWLQALPSPSIGTLLDNTTFRLATCLRIGTVTNVPHHCRCGAMVDKFGHHGLSCGRSAGRIPRHASINDVIRRAFVSVKVPAILEPVGLARDDGKRPDGMTLVPWKMGRPLVWDATCVDTLAPSHLPGTSRDAGHAASMAEDLKRRKYATLGSSYIFEAFGVETLGPWGPSARRIYRALAERLIDAAGDQRAGLYFAQRVSIAIQHGNAASLLGTLPIGSDLGDVFYL

SEQ ID NO: 1793 - protein, 964 aa, Cydia splendana
MSLSASNVVVPTTSLDIDVRCPQCPQPRYFKGSKGLNIHITKKHKPQVSCSAPVISVPPSTPVLQPRSPPSDPPFWQTLSNLKNTLPIVKRIPRGARVAVTKRLAETVKNTVSENSKHAWEELLTFSFKVLHVNANNQAHMSLTTKIKANCRHDSPMHHINNIHQQYTNSQNMSKIIESKVADGDIRGAARIIFSNDVIAPNSTDTLSALSNKHPSPAASSVLPDAPQLSDIPLKATAEDVLGAVMSFPNGSAGGLDGLTPQHLKDVLSSECNGTRDELLVQLTSLVNLMLTGKVPEDVIDILYGANLCALQKKDGGIRPIAVGCTFRRLTAKIACRAILEKLGREFSPFQLGFGSKSGCEAAVHAVRTYVERRAGEVLLKVDVTNAFNSVDRGALLTQIKEKIPETYNFLWQCYSSPTKLLYKSNLLASSVGCQQGDPLGPAIFSLAIHSIIKNLNSKLNIWYLDDGTLGGEADTVLDDLKKLTSELKSIGLTLNFSKCELFILNPSSDCKIIEDSFAMIAPGIKIISDNQLHLLGCPILDQSFDEYVNAKIQNFNSVSERLLKINMHTAFSIIRYCLFVPKFTYVLRCSHLWKHPTLLLKLDSLIQDTLSSVLNIRFEERSWTQASLPIRHGGLGIRKISSVSLPAFLSSVHSAQNLIGGILSRSLGAIEAAHCTEAKNVWSLTCSNTDPPANPCSQRQWDEPLCRLVRNNLVDTSTSTADRARLLATAEWESGLWLQALPSPSIGTLLDNTTFRLATCLRIGTLTNVPHHCRCGAMVDKFGHHGLSCGRSAGRIPRHASINDVIRRAFVSVKVPAILEPVGLARDDGKRPDGMTLVPWKMGRPLVWDATCVDTLAPSHLPGTSRDAGHAASMAEDLKRRKYATLGSSYIFEAFGVETLGPWGPSARRIYRALAERLIDAAGDQRAGLYFAQRVSIAIQRGNAASLLGTLPIGSDLGDVFYL

SEQ ID NO: 1794 - protein, 964 aa, Cydia splendana
MSLSASNVVVPTTSLDIDVRCPQCPQPRYFKGSKGLNIHITKKHKPQVSCSAPVISVPPSTPVLQPRSPPSDPPFWQTLSNLKNTLPIVKRIPRGARVAVSKRLAETVKNTVSENSKHAWEELLTFSFKVLHVNANNQAHMSLTTKIKANCLHDSPMHHINNIHQQYTNSQNMSKIIESKVADGDIRGAARIIFSNDVIAPNSTDTLSALSNKHPSPAASFVLPDAPQLTDIPLKATAEDVLGAVMSFPNGSAGGLDGLTPQHLKDVLSSECNGTRDELLVQLTSLVNLMLTGKVPEDVIDILYGANLCALQKKDGGIRPIAVGCTFRRLTAKIACRAILEKLGREFSPFQLGFGSKSGCEAAVHAVRTYVERRAGEVLLKVDVTNAFNSVDRGALLTQIKEKIPETYNFLWQCYSSPTKLLYKSNLLASSVGCQQGDPLGPAIFSLAIHSIIKNLNSKLNIWYLDDGTLGGEADTVLDDLKKLTSELKSIGLTLNFSKCELFILNPSSDCKIIEDSFAMIAPGIKIISDNQLHLLGCPILDQSFDEYVNAKIQNFNSVSERLLKINMHTAFSIIRYCLFVPKFTYVLRCSHLWKHPTLLLKLDSLIQDTLSSVLNIRFEERSWTQASLPIRHGGLGIRKISSVSLPAFLSSVHSAQNLIGGILSRSLGAIEAAHCTEAKNVWSLTCSNTDPPANPCSQRQWDEPLCRLVRNNLVDTSTSTADRARLLATAEWESGLWLQALPSPFIGTLLDNTAFRLATCLRIGTVTNVPHHCRCGAMVDKFGHHGLSCGRSAGRIPRHASINDVIRRAFVSIKVPAILEPVGLARDDGKRPDGMTLVPWKMGRPLVWDATCVDTLAPSHLPGTSRDAGHAASMAEDLKRRKYATLGSSYIFEAFGVETLGPWGPSARRIYRALAERLIDAAGDQRAGLYFAQRVSIAIQRGNAASLLGTLPIGSDLGDVFYL

SEQ ID NO: 1795 - protein, 961 aa, Pammene fasciana
MSLSANDVAAPTTSLDLLVPCPQCPQLRYFKGTKGLNIHIARKHKPQVTCSAPTASVISSSPISHQSVSSDTPFWETIGNLKKTLPILKRIPRGARVAVSQSLGEVIKAVVTENSTNAWEQLLTFSYKILHINPEDKSRKSLTSKIKENCSHTVQLHPDSPQQHNYRGNIFQTVENKVADGDIRGASRILFSNDVVAPNSPETLIALTNKHPPPAANLVLPDPPQTTDESLKATAEDVLGAVLSFPNGSAGGLDGLTPQHLKDVLSSSCNGTRDELLKQLTSLVNLMLAGEVPTDVTDILYGANLCALQKKDGGIRPIAVGSTFRRLTAKIACRAILKKLGKEFSPIQLGFGSNSGCEAAVHAVRTYVEHGADEVLLKVDVTNAFNSVDRGTLLTQIKEKIPETYKFLWQCYSSPTKLLYQSNLLASSVGCQQGDPLGPAIFSLAIHPIIKTLNSKLNVWYLDDGTLGGDANTVLNDLQNLTSALKSIGLTLNSSKCELFVFNTVSDKESITESFANIAPGIKIVNENLLHLLGCPILDQSFENYVNDKIQNFRSVSDRLLKINMHTAFTIIRHCLFVPKFTYVLRGSHLWKHPNLLLKLDSLLEETLELILNIHLDDRSWTQASLPIRHGGLGIRKISSVSLPGFLSSVHSAGNLIGNILTPSLGILEAAHCTEAKNVWTLTCPNTDLPANPCSQRQWDEPLCRLVRNNLLNTSTSSADRARLLATAEWASGLWLQTLPSPSIGTLLDNTTFRLATSLRIGTPTNAPHRCQCGTMVDSLGHHGLSCYRSAGRIPRHASINDVIRRAFVSVKMPAVLEPIGLSRDDGKRPDGMTLVPWRMGRPLVWDATCVDTLAPSHLPGTSKNAGNAASVAEDLKRRKYAALGSGYIFEAFGVETLGPWGPSARRIYQDLAARLIETTGDQRADQYFAQRISIAIQRGNAASLLGTLPIGSDLEYVFYL

SEQ ID NO: 1796 - protein, 961 aa, Pammene fasciana
MSLSANDVAAPTTSLDLLVPCPQCPQLRYFKGTKGLNIHIARKHKPQVTCSAPTASVISSSPISHQSVGSDTPFWETIGNLKKTLPILKRIPRGARVAVSQSLGEVIKAVVTENSTNAWEQLLTFSYKILHINPEDKSRKSLTSKIKENCSHTVQLHPDSPQQHNYRGNIFQTVENKVADGDIRGASRILFSNDVVAPNSPETLIALTNKHPPPAANLVLPDPPQTTDESLKATADDVLGAVLSFPNGSAGGLDGLTPQHLKDVLSSSCNGTRDELLKQLTSLVNLMLAGEVPTDVTDILYGANLCALQKKDGGIRPIAVGSTFRRLTAKIACRAILKKLGKEFSPIQLGFGSNSGCEAAVHAVRTYVEHGAGEVLLKVDVTNAFNSVDRGTLLTQIKEKIPETYKFLWQCYSSPTKLLYQSNLLASSVGCQQGDPLGPAIFSLAIHPIIKTLNSKLNVWYLDDGTLGGDANTVLNDLQNLTSALKSIGLTLNSSKCELFVFNTVSDKESITESFANIAPGIKIVNENLLHLLGCPILDQSFENYVNDKIQNFRSVSDRLLKINMHTAFTIIRHCLFVPKFTYVLRGSHLWKHPNLLLKLDSLLEETLELILNIHLDDRSWTQASLPIRHGGLGIRKISSVSLPGFLSSVHSAGNLIGNILTPSLGILEAAHCTEAKNVWTLTCPNTDLPANPCSQRQWDEPLCRLVRNNLLNTSTSSADRARLLATAEWESGLWLQTLPSPSIGTLLDNTTFRLATSLRIGTPTNAPHRCQCGTMVDSLGHHGLSCYRSAGRIPRHASINDVIRRAFVSVKMPAVLEPIGLSRDDGKRPDGMTLVPWRMGRPLVWDATCVDTLAPSHLPGTSKNAGNAASVAEDLKRRKYAALGSGYIFEAFGVETLGPWGPSARRIYQDLAARLIETTGDQRAGQYFAQRISIAIQRGNAASLLGTLPIGSDLEYVFYL

SEQ ID NO: 1797 - protein, 957 aa, Pammene fasciana
MSLSANHVATPTTSLDINLPCPQCPQLRYFKGTKGLNIHIARKHKQHVTCSAPTTSITSSTPILQQQPVSSDAPFWQTIGDLKKTLPILKRIPRGARVAVSQSLAEIIKATVTENSTQAWQQLLTFSFKVLHINPEDQSQKSLTTKIKENCFHNFAVHPDTSQQSVYRGNIFKTVENKVADGDIRGAARILFSNDVVAPNSPETLIALTNKHPLPTANLVLPDPPETTDEPVKATAEDVLGAVMSFPNGSAGGLDGLTPQHLKDVLSSDCNGTRDELLRQLTALVNLMLAGEVPTDVTDILYGANLCALQKKDGGIRPIAVGSTFRRLTAKIACRAILNKLGTEFSPVQLGFGSNSGCEAAVHAVRTYVERGAGEVLLKVDVTNAFNSVDRGTLLTQIKEKIPETYKFLWQCYSSPTKLLYQSNLLASSVGCQQGDPLGPAIFSLAIHPIIKTLNSKLNVWYLDDGTLGGDAVTVLNDLQNLTSALTSIGLTLNFSKCELFVANTTLNKESIIESFRNIAPGIRIVNESLLHLLGCPILDQSFDKIQNFKSVSDRLLKINMHTAYTIIRHCLFVPKFTYVLRGSHLWKHPDLLLKLDKLIEESLESVLNIPFDNRSWTQASLPIRHGGLGIRKISSISLPAFLYSVHSAQNLIGSILTPSLGVLEAAHCTEAKNVWALTCPNVDPPVNPCSQRQWDEPLCRLVRNNLLDTSTSSADRARLLATAEWESGLWLQALPSPFIGTLLDNSTFRLATSLRIGAATNAPHRCQCGTMVDSLGHHGLSCYRSAGRIPRHTSINDVIRRALVSVKMPAVLEPVGLARDDGKRPDGMTLVPWRMGRPLVWDGTCVDTLAPSHLPSTCRNAGSAASTAEDLKRRKYAALGSAYIFEAFGVETLGPWGPGARRVYKDLASRLVDATGDQKAGQYFAQRISIAIQRGNAASLLGTLPIGSDLGYIYYL

SEQ ID NO: 1798 - protein, 975 aa, Pammene fasciana
MPLSTLSCPTPAAASPENRVRCPQCQVPHYFKGSRGLNIHIAKKHRPCHSQPACPTRTLSQPAVSTPPRSQVPNTPFWQILSDFKNTRPVLKRIPRGARVSVAKFLSDTIKNVISCNSFHSWENLLTFSYKVLHIVPNPNSKSLTQKVKDNCSADISHLPSGHGFRHLTNNLYKKVESKVSDGDIKGAARLLFSDDAVAPDNSNTLSALLAKHPSPDTNFSLPDPPQPNDLTLTASTEDVFGAIMSFPNGSAAGLDGLSPQHLKDLLFCGCGDTKEMLLKDLTALVNIMLAGEVPNEITGILYGANLCALTKKDGGVRPIAVGTTLRRLTAKIACRSIHDELSSLLQPVQLGFGSKSGCEAAVHAVRTYIEHQAGEVLLKVATHTGCCWWLGGDISNAFNSVDRVALLTQIKDKIPITYKFLWQCYSTPSKLLYKSNVLSSSVGCQQGDPLGPAIFSLAIHPIIQELNSKLNVWYLDDGTLGGEATSVLSDLEHLITDLKSIGLSLNLSKCELFITESCANEERTIEKFKQLAPGIKIITKESLHLLGCPILDQSFENFINTKIQNFKASSHRLSKINMHSAYCIIKHCLFVPKFTYILRGSHFWKHPTLISNLDDLVLGTLTSIFNISFGERTWSQASLPIRFGGLGIRKISSVALPAFLASVHGAQSLIGKILAPSVGVLEAAHSTEAKNVWSVTCPNTDPPANPCSQRQWDEPLCRLTKTALFNTATNPSDQARLIATAEWESGLWLQALPSPTIGTLLDNTTFRLATSLRIGTPTNVPHRCQCGATVDGLGHHGLSCSRSAGRIPRPASINDVIRRALVSAKVPAVLEPNGLTRDDGKRPDGMTLVPWSMGRPLVWDATCVDTLAPSHIPGTKVDAGAAASSAEDRKRRKYAALGSSYLFAAFGVETLGPWGPSARRLHKEISARLIEASGDQRAGHYFAQRISIAIQRGNAASLLGTLPHDRDLGQIFYL

SEQ ID NO: 1799 - protein, 963 aa, Pammene fasciana
MPLSTLSCPTPAAASPDNRVRCPQCQVPHYFKGSRGLNIHIAKKHRPCHSQPACPTRTLSQTAVSTPPRSQVPNTPFWQILSDFKNTRPVLKRIPRGARVSVAKFLSDTIKNVISCNSFHSWENLLTFSYKVLHIVPNPNSKSLTQKVKDNCSADISHLPSGHGFRYLTNNLYKKVESKVSDGDIKGAARLLFSDDAVAPDISNTLSALLAKHPSPDTIFSLPDPPQPNDLTLTASTEDVFGAIMSFPNGSAAGLDGLSPQHLKDLLFCGCGDTKEMLLKDLTALVNIMLAGEVPNEITGILYGANLCALTKKDGGIRPIAVGTTLRRLTAKIACRSIHDELSSLLQPVQLGFGSKSGCEAAVHAVRTYIEHQAGEVLLKVDISNAFNSVDRVALLTQIKDKIPITYKFLWQCYSTPSKLLYKSNVLSSSVGCQQGDPLGPAIFSLAIHPIIQELNSKLNVWYLDDGTLGGEATSVLSDLEHLITDLKSIGLSLNLSKCELFITESCATEERTIEKFKQLAPGIKIITKESLHLLGCPILDQSFENFINTKIQNFKASSHRLSKINMHSAYCIIKHCLFVPKFTYILRGSHFWKHPTLISNLDDLVLGTLTSIFNISFGERTWSQASLPIRFGGLGIRKISSVALPAFLASVHGAQSLIGKILAPSVGVLEAAHSTEAKNVWSVTCPNTDPPANPCSQRQWDEPLCRLTKTALFNTATNPSDQARLIATAEWESGLWLQALPSPTIGTLLDNTTFRLATSLRIGAPTNVPHRCQCGATVDGLGHHGLSCSRSAGRIPRHASINDVIRRALVSAKVPAVLEPNGLTRDDGKRPDGMTLVPWSMGRPLVWDATCVDTLAPSHIPGTKVDAGAAASSAEDRKRRKYAALGSSYLFAAFGVETLGPWGPSARRLHKEISARLIEASGDQRAGHYFAQRISIAIQRGNAASLLGTLPHDRDLGQIFYL

SEQ ID NO: 1800 - protein, 963 aa, Pammene fasciana
MPLSTLSCPTPAAASPENRVRCPQCQVPHYFKGSRGLNIHIAKKHRPCHSQPACPTRTLSQPAVSTPPRSQVPNTPFWQILSDFKNTRPVLKRIPRGARVSVAKFLSDTIKNVISCNSFHSWENLLTFSYKVLHIVPNPNSKSLTQKVKDNCSADISHLPSGHGFRHLTNNLYKKVESKVSDGDIKGAARLLFSDDAVAPDNSNTLSALLAKHPSPDTNFSLPDPPQPNDLTLTASTEDVFGAIMSFPNGSAAGLDGLSPQHLKDLLFCGCGDTKEMLLKDLTALVNIMLAGEVPNEITGILYGANLCALTKKDGGVRPIAVGTTLRRLTAKIACRSIHDELSSLLQPVQLGFGSKSGCEAAVHAVRTYIEHQAGEVLLKVDISNAFNSVDRVALLTQIKDKIPITYKFLWQCYSTPSKLLYKSNVLSSSVGCQQGDPLGPAIFSLAIHPIIQELNSKLNVWYLDDGTLGGEATSVLSDLEHLITDLKSIGLSLNLSKCELFITESCANEERTIEKFKQLAPGIKIITKESLHLLGCPILDQSFENFINTKIQNFKASSHRLSKINMHSAYCIIKHCLFVPKFTYILRGSHFWKHPTLISNLDDLVLGTLTSIFNISFGERTWSQASLPIRFGGLGIRKISSVALPAFLASVHGAQSLIGKILAPSVGVLEAAHSTEAKNVWSVTCPNTDPPANPCSQRQWDEPLCRLTKTALFNTATSPSDQARLIATAEWESGLWLQALPSPTIGTLLDNTTFRLATSLRIGAPTNVPHRCQCGATVDGLGHHGLSCSRSAGRIPRHASINDVIRRALVSAKVPAVLEPNGLTRDDGKRPDGMTLVPWSMGRPLVWDATCVDTLAPSHIPGTKVDAGAAASSAEDRKRRKYAALGSSYLFAAFGVETLGPWGPSARRLHKEISARLIEASGDQRAGHYFAQRISIAIQRGNAASLLGTLPHDRDLGQIFYL

SEQ ID NO: 1801 - protein, 963 aa, Pammene fasciana
MPLSTLSCPTPAAASPENRVRCPQCQVPHYFKGSRGLNIHIAKKHRPCHSQPACPTRTLSQPAVSTPPRSQVPNTPFWQILSDFKNTRPVLKRIPRGARVSVAKFLSDTIRNVISCNSFHSWENLLTFSYKVLHIVPNPNSKSLTQKVKDNCSADISHLPSGHGFRHLTNNLYKKVESKVSDGDIKGAARLLFSDDAVAPDNSNTLSALLAKHPSPDTNFSLPDPPQPNDLTLTASTEDVFGAIMSFPNGSAAGLDGLSPQHLKDLLFCGCGDTKEMLLKDLTALVNIMLAGEVPNEITGILYGANLCALTKKDGGVRPIAVGTTLRRLTAKIACRSIHDELSSLLQPVQLGFGSKSGCEAAVHAVRTYIEHQAGEVLLKVDISNAFNSVDRVALLTQIKDKIPITYKFLWQCYSTPSKLLYKSNVLSSSVGCQQGDPLGPAIFSLAIHPIIQELNSKLNVWYLDDGTLGGEATSVLSDLEHLITDLKSIGLSLNLSKCELFITESCANEERTIEKFKQLAPGIKIITKESLHLLGCPILDQSFENFINTKIQNFKASSHRLSKINMHSAYCIIKHCLFVPKFTYILRGSHFWKHPTLISNLDDLVLGTLTSIFNISFGERTWSQASLHIRFGGLGIRKISSVALPAFLASVHGAQSLIGKILAPSVGVLEAAHSTEAKNVWSVTCPNTDPPANPCSQRQWDEPLCRLTKTALFNTATNPSDQARLIATAEWESGLWLQALPSPTIGTLLDNTTFRLATSLRIGAPTNVPHRCQCGATVDGLGHHGLSCSRSAGRIPRHASIKDVIRRALVSAKVPAVLEPNGLTRDDGKRPDGMTLVPWSMGRPLVWDATCVDTLAPSHIPGTKVDAGAAASSAEDRKRRKYAALGSSYLFAAFGVETLGPWGPSARRLHKEISARLIEASGDQRAGHYFAQRISIAIQRGNAANLLGTLPHDRDLGQIFYL

SEQ ID NO: 1802 - protein, 963 aa, Pammene fasciana
MPLSTLSCPTPAAASPENRVRCPQCQVPHYFKGSRGLNIHIAKKHRPCHSQPACPTRTLSQPAVSTPPRSQVPNTPFWQILSDFKNTRPVLKRIPRGARVSVAKFLSDTIKNVISCNSFHSWENLLTFSYKVLHIVPNPNSKSLTQKVKDNCSADISHLPSGHGFRHLTNNLYKKVESKVSDGDIKGAARLLFSDDAVAPDNSNTLSALLAKHPSPDTNFSLPDPPQPNDLTLTASTEDVFGAIMSFPNGSAAGLDGLSPQHLKDLLFCGCGDTKEMLLKDLTALVNIMLAGEVPNEITGILYGANLCALTKKDGGVRPIAVGTTLRRLTAKIACRSIHDELSSLLQPVQLGFGSKSGCEAAVHAVRTYIEHQAGEVLLKVDISNAFNSVDRVALLTQIKDKIPITYKFLWQCYSTPSKLLYKSNVLSSSVGCQQGDPLGPAIFSLAIHPIIQELNSKLNVWYLDDGTLGGEATSVLSDLEHLITDLKSIGLSLNLSKCELFITESCANEERTIEKFKQLAPGIKIITKESLHLLGCPILDQSFENFINTKIQNFKASSHRLSKINMHSAYCIIKHCLFVPKFTYILRGSHFWKHPTLISNLDDLVLGTLTSIFNISFGERTWSQASLPIRFGGLGIRKISSVALPAFLASVHGAQSLIGKILAPSVGVLEAAHSTEAKNVWSVTCPNTDPPANPCSQRQWDEPLCRLTKTALFNTATNPSDQARLIATAEWESGLWLQALPSPTIGTLLDNTTFRLATSLRIGAPTNVPHRCQCGATVDGLGHHGLSCSRSAGRIPRHASINDVIRRALVSAKVPAVLEPNGLTRDDGKRPDGMTLVPWSMGRPLVWDATCVDTLAPSHIPGTKVDAGAAASSAEDRKRRKYAALGSSYLFAAFGVETLGPWGPSARRLHKEISARLIEASGDQRAGHYFAQRISIAIQRGNAASLLGTLPHDRDLGQIFYL

SEQ ID NO: 1803 - protein, 963 aa, Pammene fasciana
MPLSTLSCPTPAAASPENRVRCPQCQVPHYFKGSRGLNIHIAKKHRPCHSQPACPTRTLSQPAVSTPPRSQVPNTPFWQILSDFKNTRPVLKRIPRGARVSVAKFLSDTIKNVISCNSFHSWENLLTFSYKVLHIVPNPNSKSLTQKVKDNCSADISHLPSGHGFRHLTNNLYKKVESKVSDGDIKGAARLLFSDDAVAPDNSNTLSALLAKHPSPDTNFSLPDPPQPNDLTLTASTEDVFGAIMSFPNGSAAGLDGLSPQHLKDLLFCGCGDTKEMLLKDLTALVNIMLAGEVPNEITGILYGANLCALTKKDGGVRPIAVGTTLRRLTAKIACRSIHDELSSLLQPVQLGFGSKSGCEAAVHAVRTYIEHQAGEVLLKVDISNAFNSVDRVALLTQIKDKIPITYKFLWQCYSTPSKLLYKSNVLSSSVGCQQGDPLGPAIFSLAIHPIIQELNSKLNVWYLDDGTLGGEATSVLSDLEHLITDLKSIGLSLNLSKCELFITESCANEERTIEKFKQLAPGIKIITKESLHLLGCPILDQSFENFINTKIQYFKASSHRLSKINMHSAYCIIKHCLFVPKFTYILRGSHFWKHPTLISNLDDLVLGTLTSIFNISFGERTWSQASLPIRFGGLGIRKISSVALPAFLASVHGAQSLIGKILAPSVGVLEAAHSTEAKNVWSVTCPNTDPPANPCSQRQWDEPLCRLTKTALFNTATNPSDQARLIATAEWESGLWLQALPSPTIGTLLDNTTFRLATSLRIGAPTNVPHRCQCGATVDGLGHHGLSCSRSAGRIPRHASINDVIRRALVSAKVPAVLEPNGLTRDDGKRPDGMTLVPWSMGRPLVWDATCVDTLAPSHIPGTKVDAGAAASSAEDRKRRKYAALGSSYLFAAFGVETLGPWGPSARRLHKEISARLIEASGDQRAGHYFAQRISIAIQRGNAASLLGTLPHDRDLGQIFYL

SEQ ID NO: 1804 - protein, 673 aa, Cydia splendana
MSFPNGSAGGLDGLTPQHLKDLLCSGCGETGEILLKDLTALVNIMLAGQVPDGIKDVLYGANLCALTKKDGGIRPIAVGTTLRRLAAKIACRSILSKLTPELQPVQLGFGSKSGCEAAVHAVRTFLDHKAGEVLLKVDVCNAFNSVDRGALLTQIKDKIPLVYKFLWQCYSSPSKLLYKSNVLASSVGCQQGDPLGPAIFSLAIHPIIKELNSKLNVWYLDDGTLGGEAISVLEDLKKINTDMEKIGLSLNFSKCELFITDTCPDKENTIDLFTQLAPGVKIINEDSLHLLGCPVLDQSFENFVDSKIQNFKATSHRLAKINLHSAYSIIKHCLFVPKFTYILRGTHFWKHPTLVSKLDKLVAETLTSIFNIPFDDRSWTQASLPIRFGGLGIRKISCVALPAFLSSVHGAQSLIEKILDPSIGSMEAAHCSEAKNIWSITCPNTDPPANPCSQRQWDEPLCQLVRKNLLNTSTSSADRARLLATAEWESGLWLQALPSPNIGTFLDNTTFRLAASLRLGASTNQAHRCQCGTMVDTLGHHGLSCVRSAGRLSRHASINDVVRRALVSAKVPAILEPSGLARDDGKRPDGMTLVPWSMGRPLVWDATCVDTLAPSHVPSTSAAAGAAASSAESLKRRKYAALGTTYMFAAFGVETLGPWSQVRVGYIKIYRRA

SEQ ID NO: 1805 - protein, 964 aa, Cydia splendana
MPLASLSCPTRTTALPENLLRCPECPEPSYYKGPRGLNIHITKKHRQSHTQPSSIVLSQPNVSAPSQLPDHTRSDKPFHKFLSDLKNSRPVLKRIPRGARVSVAKSLSHSIKTILSDNSTRNWEHLLSFTFKVLHISSDKHSKSLTKIVKDNCCSDISFQLTSHNFRNSNNNLFKKVETKVSDGDIKGAARLLFSDDAVAPSNSDTLTALHSKHPSPATNLCLPDPPLPGDPNLIATTQDVLGAVMSFPNGSAGGLDGLTPQHLKDLLCSGCGETGEILLKDLTGLVNIMLAGQVPDGIRDVLYGANLCALTKKDGGIRPIAVGATLRRLAAKIACRSILSKLTPELQPIQLGFGSKSGCEAAVHAVRTFLEHNAGEVLLKVDVCNAFNSVDRGALLTQIKDQIPLIYKFLWQCYSSPSKLLYKTNVLASSVGCQQGDPLGPAIFSLAIHPIIKKLNSKLNIWYLDDGTLGGEAISVLEDLKKINIDLKEIGLSLNFSKCELFITDSCPDKENTINLFRQLAPGIKIINKESLHLLGCPVLDQSFENFVDSKIQNFTATSHRLAKINLHSAYSIVKHCLFVPKFTYILRGTHLWKHPNLVSKLDTLVVETLTSIFNISFDERSWTQASLPIRFGGLGIRKISCVSLPAFLSSVHGAQSLIGKILDPSIGSMEAAHCSEAKNVWSITCPNTDLPENPCSQGQWDEPICQLVRKNLLDTSPSSTDRARLLATAEWESGLWLQALPSPNIGTFLDNTTFRLAASLRVGASTNQPHRCQCGTTVDILGHHGLSCVRSAGRIPRHASINDVIRRALVSAKVPAVLEPSGLARDDGKRPDGLTLVPWSMGRPLVWDATCVDTLAPSHVPSTKDSAGAAASSAESLKRRKYAALGSSYIFAAFGVETLGPWGPSARRLYKDLSARLIEASGDQRAGHYFAQRISIAIQRGNTASLLGTLPVDGDLGQIFYL

SEQ ID NO: 1806 - protein, 965 aa, Cydia pomonella
MPLASLSCPIQTAASPENRLRCPECPKPSFFKGPRGLNIHIAKKHQRSHTQPSCPVLPQPNVPPPSQLPDHTSLDVPFHQILSDLKNSRPVLKRIPRGARVSVSKSLSHTIKTVLSDNSKPNWEHLLTFTFKVLHVNSNENTKSLTKIVKDNCCTDTLFQPKFDNVRNSNKSNLFKKVESKVSDGDIKGAARLLFSDDAVAPTNSDTLTALHSKHPLPATNLSLPDPPLTSDLSLIATTQDVFGAVMSFPNGSAGGLDGLTPQHLKDLLCSGCGETGEILLKDLTALVNIMLAGQVPDGIRDVLYGANLCALTKKDGGIRPIAVGTTLRRLAAKIACRSILSKLTPELQPVQLGFGSKSGCEAAVHAVRTFLEHKAGEILLKVDVCNAFNSVDRGALLTQIKDKIPLVYKFLWQCYSSPSKLLYKTNVLASSVGCQQGDPLGPAIFSLAIHPIIKELNSKLNVWYLDDGTLGGEVISVLEDLKKINTDMKKIGLSLNFSKCELFITDSCPDKENTMNLFKQLAPDIKILNNDSLHLLGCPVLDQSFENFIDEKILNFKATSHRLAKINLHSAYSIIKHCLFVPKFTYILRGTHLWKYPNLVSKLDTLVIETLTSIFNISFDERSWTQASLPIRFGGLGIRKISCVALPAFLSSVHGAQSLIGKILDSSIGSMEAAHCSEAKNVWSITCPNTDPPANPCSQKQWDEPLCQLVRKNLLDTSTSSTDRARLLATAEWESGLWLQALPSPNIGTFLDDTTFRLAASLRLGASTNQPHRCQCGAMVDILGHHGLSCVRSAGRMPRHASINDVIRRALVSARVPAVLEPSGLARDDGKRPDGMTLVPWSMGRPLVWDATCVDTLAPSHVPSTKVTAGAAASSAESLKRRKYSALGSSYMFAAFGVETLGPWGPSARRLFKDLSARLIEASGDQRAGHYFAQRISIAIQRGNTASLLGTLPIDGDLGQIFYL

SEQ ID NO: 1807 - protein, 966 aa, Cydia splendana
MPLVSLSCPTRTTASPENLLRCPECPKPSYYKGPRGLNIHITKKHRQSHTQPSSTVLSQPNILAPSQSSDHTRSDVPFHQTLSDLKNSRPVLKRIPRGARVSVAKSLSHTIKTVLSDNSIRNWEHLLTFTFKVLHINSDENSKSLTKTVKANCCSDISFQPSSHNFRNTNNNLFQKVESKISDGDIKGAARLLFSDDAVAPSNSDTLTALHSKHPPPATNLCLPDPPLPGDPNLIATTRDVLGAVMSFPNGSAGGLDGLTPQHLKDLLCSGCGETGEILLKDLTALVNIMLAGQVPDGIKDVLYGANLCALTKKDGCIRPIAVGTTLRRLAAKIACRSILSKLTPELQPVQLGFGSKSGCEAAVHAVRTFLEHKAGEVLLKVDVCNAFNSVDRGALLTQIKDKIPLVYKFLWQCYSSPSKLLYKSNVLASSVGCQQGDPLGPAIFSLAIHPIIKELNSKLNVWYLDDGTLGGEAISVLEDLNKINTDMEKIGLSLNFSKCELFITDTCPDKENTIDLFTQLAPGVKIINEDSLHLLGCPVLDQSFENLVDSKIQNFKATSHRLAKINLHSAYSIIKHCLFVPKFTYILRGTHFWKHPTLVSTLDTLVAETLTSIFNIPFDDRSWTQASLPIRFGGLGIRKISCVALPAFLSSVHGAQSLIEKILDPSIGSMEAAHCSEAKNVWSITCPNTDPPANPCSQRQWDEPLCQLVRKNLLNTSTSSADRARLLATAEWESGLWLQALPSPNIGTFLDNTTFRLAAISLRLGASTNQAHRCQCGTMVDTLGHHGLSCVRSAGRLSRHASINDVIRRALVSAKVPAILEPSGLARDDSKRPDGMTLVPWSMGRPLVWDATCVDTLAPSHVPSTSAAAGAAASSAESLKRRKYAALLGTSYMFAAFGVETLGPWGPSARRLYKDLSTRLIEASGDQRAGQYFAQRISLAIQRGNAASLLGTLPVDGDLGQIFYL

SEQ ID NO: 1808 - protein, 721 aa, Pammene fasciana
MSFPNGSAAGLDGLSPQHLKDLLFCGCGDTKEMLLKDLTALVNIMLAGEVPNEITGILYGANLCALTKKDGGVRPIAVGTTLRRLTAKIACRSIHDELSSLLQPVQLGFGSKSGCEAAVYAVRTYIQHQAGEVLLKVDISNAFNSVDRVALLTQIKDKIPITYKFLWQCYSTPSKLLYKSNVLSSSVGCQQGDPLGPAIFSLAIHPIIQELNSKLNVWYLDDGTLGGEATSVLSGLEHLITDLKSIGLSLNLSKCELFITESCANEERTIEKFKQLAPGIKIITKESLHLLGCPILDQSFENFINTKIQNFKASSHRLSKINMHSAYCIIKHCLFVPKFTYILRGSHFWKHPTLISNLDDLVLGTLTSIFNISFGERTWSQASLPIRFGGLGIRKISSVALPAFLASVHGAQSLIFFWKILAPSVGVLEAAHSTEAKNVWSVTCPNTDPPANPCSQRQWDEPLCRLTKTTLFNTATNPSDQARLIATAEWESGLWLQALPSPTIGTLLDNTTFRLATSLRIGAPTNVPHRCQCGATVDGLGHHGLSCSRSAGRIPRHASINDVIRRALVSAKVPAVLEPNGLTRDDGKRPHGMTLVPWSMGRPLVWDATCVDTLAPSHIPGTKVDAGAAASSAEDRKRRKYAALGSSYLFAAFGVETLGPWGPSARRLHKEISARLIEASGDQRAGHYFAQRISIAIQRGNAASLLATLPHDRDLGQIFYL

SEQ ID NO: 1809 - protein, 900 aa, Ypsolopha scabrella
MTQYAQGNRSRNLILFVEDIKRRHGTHAQYENVNTTTQEYLDTLKQKLNAASSRLRRYKTCTLRKSQNTLFRNNEKQFYRSSLNTRQQTQIPHDTPTPQELHSFWSKIWSNPLEHNRNAEWIDKQSNEVNHITQMKFDTIPIETYVKVINKTHNWKAPGSDKIHNYWYKKLKSVQPYLHTHIHKFIESPDTLPLFLTQGTTYMIPKDDDTANPAKYRPITCLQTFYKIMTSCISEIIYTHLTDNNILAEQQKGSRKNCQGCKEQLTIDSVGMRQARKTKRNIYTMFIDYRKAFDSVPHSWLIQVLTHYKINQTIVDYLQKIMINWQTNLKINSEVGEVSTAPITIQRGIFQGDALSPLWFCLALNPLSNLLNTTNAGFKLVNNSQLSHNLTHLMYMDDIKLYANNKRELFKLANITQTFSNDIKMQFGIDKCKINSIKKGKVELNSCTLTTGETIEPMDEHSTYKYLGFKQSKCIEQKETKSDLIKKFKQRLTHILKTYLNSRNYYLRIKAINTYAIPILTYSFGIISWSKTDLQKLQTIINVQLTKFRKHHPKSCKQRLTLPRLEGGRKIIDITNIHNRQITILRKYFHTKSEQSELHKHVTASDIKLTPLNLSNKNIQPNESLTQATEKIEIWKKKSLHGRHRKDLDQSHIDKNWSNAWLKRGELFPETEAFMIAIQDQVINTRNYKKYILKERNLPTDMCRHCSSASETIQHITGACKTIVQTDYKHRHDQVASIIHQHFAHKNKFIEQKSPYYKYIPEKILDSNAIKIYWDRTIITDKTVYFNRPDITIHDKQDGTVYLIDIAIPNTHNIQATHTEKMNKYKDLAVEIKTQWRANTVKIVPIIISTTGVIPKTILTSLKILNIPTYLIHIIQKAVILNTCRITRKFLQADLSQNTL

SEQ ID NO: 1810 - protein, 1388 aa, Ypsolopha scabrella
MRLRSRNILPQAGTSNGESRPELKRPGSPTYSGVGTVSLCSEQPRNVVGQKTNSPSPNMLSCHPTSSTTSPISLFAASDSSRHSFSRSPSHASQSSMSSSSSQNDEAADVVQEAYADNPEPTVAQKRTRRRWSVETNTFIWRTYLEITMLEADTRRFLDKLYDAFIHKFPEIQVSKQRIGDQRRAIVQNNLLPKNTLNQIRKQVEESLNKTQNLPNNTVYTQNTIRPTQGRSLTRMRWSNETNESIMKIYYRITELEKNKTAYRQQLYSKFIESYPKLSHISEQRLADQRRAIIKNKYIPDYRLEEIKNEVEIEITNDNSMRTQNSITQEEEASQITENLTDRTNNNLNEQIIILNNTQQHSVQQTSKQTEFTDENAQRELTEIFEETLEKYKDTDPIQRPYIPKQKSTKKLAQLTQYIDNTILPKYLNSEQDFFTLHTLIYCAAFTVATCNGTKIFVSNTQFKRPKSDRKPSWQTRLEEKIRKLRQDLGRMTQYAQGNRSRNVILFVEDIKRRHGTHAQYENVNTTTQEYLDTLKQKLNAASSRLRRYKTCTLRKSQNTLFRNNEKQFYRSSLNTRQQTQIPHDTPTPQELHSFWSKIWSNPLEHNRNAEWIDKQSNEVNHITQMKFDTIPIETYVKVINKTHNWKAPGSDKIHNYWYKKLKSVQPYLHTHIHKFIESPDTLPLFLTQGTTYMIPKDDDTANPAKYRPITCLQTFYKIMTSCISEIIYTHLTDNNILAEQQKGSRKNCQGCKEQLTIDSVAMRQARKTKRNIYTMFIDYRKAFDSVPHSWLIQVLTHYKINQTIVDFLQKIMTNWQTNLKINSEVGEVSTAPITIQRGIFQGDALSPLWFCLALNPLSNLLNTTNAGFKLVNNSQLSHSLTHLMYMDDIKLYANNKRELFELANITQTFSNDIKMQFGIDKCKINSIKKGKVELNSYTLTTGETIEPMDEHSTYKYLGFKQSKCIEQKETKSDLIKKFKQRLTHILKTYLNSRNLIKAINTYAIPILTYSFGIISWSKTDLQKLQTIINVQLTKFRKHHPKSCKQRLTLPRLEGGRKIIDITNIHNRQITILRKYFHTKSEQSELHKHVTASDIKLTPLNLSNKNIQPNESLTQTTEKIEIWKKNSLHGRHRKDLDQSHIDKNWSNAWLKRGELFPETEAFMIAIQDQVINTRNYKKYILKERNLPTDMCRHCSSASETIQHITGACKTIVQTDYKHRHDQVASIIHQHFAHKNKFIEQRSPYYKYIPEKILDSNAIKIYWDRTIITDKTVYFNRPDITIHDKQDGTVYLIDIAIPNTHNIQATHTEKMNKYKDLAVEIKTQWRANTVKIVPIIISTTGVIPKTILTSLKILNIPTYLIHIIQKAVILNTCRITRKFLQADLSQNSL

SEQ ID NO: 1811 - protein, 888 aa, Ypsolopha scabrella
MTQYAQGNRSRNVILLVEDIKRRHGTHAQYENVNTTTQEYLDTFKQKLNAASSRLRRYKTCTLRKSQNTLFRNNEKLFYRSSLNTRQQTQIPHDTPTPQELHSFWSKIWSNPLEHNRNAEWIDKQSNEVNHITQMKFDTIPIETYVKVINKTHNWKAPGSDKIHNYWYKKLKSVQPYLHTHIHKFIESPDTLPPFLTQGTTYMIPKDDDTANPAKYRPITCLQTFYKIMTSCISEIIYTHLTDNNISAEQQKGSRKNCQGCKEQLTIDSVAMRQARKTKRNIYTMFIDYRKAFDSVPHSWLIQVLTHYKINQTIVDFLQKIMTNWQTNLKINSEVGEVSTAPITIQRGIFQGDALSPLWFCLALNPLSNLLNTTNAGFKLVNNSQLSHSLTHLMYMDDIKLYANNKRELFKLANVTQTFSNDIKMQFGIDKCKINSIKKGKVELNSYTLTTGETIEPMDEHSTYKYLGFKQSKCIEQKETKSDLIKKFKQRLTHILKTYLNSRNLIKAINTYAIPILTYSFGIISWSKTDLQKLQKIINVQLTKFRKHHPKSCKQRLTLPRLEGGRKIIDITNIHNRQITILRKYFHTKSEQSELHKHVTASDIKLTPLNIQPNESLTQATEKIEWKKKSLHGRHRKDLDQSHIDKNWSNAWLKRGELFPETEAFVIAIQDQVINTRNYKKYILKERNLPTDMCRHCSSASETIQHITGACKTIVQTDYKHRHDQVASIIHQNFAHKNKFIEQKSPYYKYIPEKILDSNAIKIYWDRTIITDKTVYFNRPDITIHDKQDGTVYLIDIAIPNTHNIQATHTEKMNKYKDLAVEIKTQWRANTVKIVPIIISATGVIPKTILTSLNIPTYLIHIIQKAVILNTCRITRKFLQAVLSQNTL

SEQ ID NO: 1812 - protein, 1388 aa, Ypsolopha scabrella
MRLRSRNILPQAGTSNGESRPELKRPGSPTYSGVGTVSLCSEQPRNVVGQKTNSPSPNMLSCHPTSSTTSPISLFAASDSSRHSFSRSPSHASQSSMSSSSSQNDEAADVVQEAYADNPEPTVAQKRTRRRWSEETNTFIWRTYLEITMLEADTRRFLDKLYDAFIHKFPEIQVSKQRIGDQRRAIVQNNLLPKNTLNQIRKQVEESLNKTQNLPNNTVYTQNTIRPTQGRSLTRMRWSNETNESIMKIYYRITELEKNKTAYRQQLYSKFIESYPELSHISEQRLADQRRAIIKNKYIPDYRLEEIKNEVEIEITNDNSMRTQNSITQEEEASQITENLTDLTNNNLNEQIIILNNTQQHSVQQTSKQTELTDENAQRELTEIFEETLEKYKDTDPIQRPYIPKQKSTKKLAQLTQYIDNTILPKYLNSEQDFFTLHTLIYCAAFTVATCNGTKIFVSNTQFKRPKSDRKPSWQTRLEEKIRKLRQDLGRMTQYAQGNRSRNVILFVEDIKRRHGTHAQYENFNTTTQEYLDTLKQKLNAASSRLRRYKTCTLRKSQNTLFRNNEKQFYRSSLNTRQQTQIPHDTPTPQELHSFWSKIWSNPLEHNRNAEWIDKQSNEVNHITQMKFDTIPIETYVKVINKTHNWKAPGSDKIHNYWYKKLKSVQPYLHTHIHKFIESPDTLPLFLTQGTTYMIPKDDDTANPAKYRPITCLQTFYKIMTSCISEIIYTHLTDNNILAEQQKGSRKNCQGCKEQLTIDSVAMRQARKTKRNIYTMFIDYRKAFDSVPHSWLIQVLTHYKINQTIVDFLQKIMTNWQTNLKINSEVGEVSTAPITIQRGIFQGDALSPLWFCLALNPLSNLLNTTNAGFKLVNNSQLSHSLTHLMYMDDIKLYANNKRKLFKLANITQTFSNDIKMQFGIDKCKINSMKKGKVELNSYTLTTGETIEPMDEHSTYKYLGFKQSKCIEQKETKSDLIKKFKQRLTHILKTYLNSRNLIKAINTYAIPILTYSFGIISWSKTDLQKLQTIINVQLTKFRKHHPKSCKQRLTLPRLEGGRKIIDITNIHNRQITILRKYFHTKSEQSELHKHVTASDIKLTPLNLSNKNIQPNESLTQATEKIEIWKKKSLHGRHRKDLDQSHIDKNWSNAWLKRGELFPETEAFMIAIQDQVINTRNYKKYILKERNLPTDMCRHCSSASETIQHITGACKTIVQTDYKHRHDQVASIIHQHFAHKNKFIEQKSPYYKYIPEKILDSNAIKIYWDRTIITDKTVYFNRPDITIHDKQDGTVYLIDIAIPNTHNIQATHTEKINKYKDLAVEIKTQWRANTVKIVPIIISTTGVIPKTILTSLKILNIPTYLIHIIQKAVILNTCRITRKFLQANLSQNTL

SEQ ID NO: 1813 - protein, 1390 aa, Ypsolopha scabrella
MRLRSRNILPQAGTSNGESRPELKRPGSPTYSGVGTVSLCSEQPRNVVGQKTNSPSPNMLSCHPTSSTTSPISLFAASDSSRHSFSRSPSHASQSSMSSSSSQNDEAADVVQEAYADNPEPTVAQKRTRRRWSEETNTFIWRTYLEITMLEADTRRFLDKLYDPFIHKFPEIQVSKQRIGDQRRAIVQNILLPKNTLNQIRKQVEESVNKTRNLPNNTVYTQNTIRPTQGRSLTRMRWSNETNESIMKIYYRITELEENKTAYRQQLYSKFIENYPELSHISEQRLADQRRAIIKNKYIPDYRLEEIKNEVEIEITNDNSTRTQNSITQEEEASQITENLTDLTNNNLNEQIIILNNTQQHSVQQTSKQTELTDENAQRELTEIFEETLEKYKDTDPIQRPYIPKQKSTKKLAQLTQYIDNTILPKYLNSEQDFFTLHTLIYCAAFTVATCNGTKIFVSNTQFKRPKSDRKPSWQTRLEEKIRKLRQDLGRMTQYAQGNRSRNVILFVEDIKRRHGTHAQYENVNTTTQEYLDTLKQKLNAASSRLRRYKTCTLRKSQNTLFRNNVKQFYRSSLNTRQQTQIPHDTPRPQELHSFWSKIWSNPLEHNRNAEWIDKQRNEVNHITQMKFDTIPIETYVKVINKTHNWKAPGSDKIHNYWYKKLKSVQPYLHTHIHKFIESPDTLPVFLTQGTTYMIPKDDDTANPAKYRPITCLQTFYKIMTSCISEIIYTHLTDNNILAEQQKGSRKNCQGCKEQLTIDSVAMRQARKTKRNIYTMFIDYRKAFDSVPHSWLIQVLTHYKINQTIVDFLQKIMTNWQTNLKINSEVGEVSTAPITIQRGIFQGDALSPLWFCLALNPLSNLLNTTNAGFKLVNNSQLSHSLTHLMYMDDIKLYANNKRELFKLANITQTFSNDIKMQFGIDKCKINSIKKGKVELNSYTLTTGETIEPMDEHSTYKYLGFKQSKCIEQKETKSDLIKKFKQRLTHILKTYLNSRNLIKAINTYAIPILTYSFGIISWSKTDLQKLQTIVNVQLTKFRKHHPKSCKQRLTLPRLEGGRKIIDITNIHNRQITILQKYFHTKSEQSELHKHVTASDIKLTPLNLSNKNIQPNESLTQATEKIEIWKKKSLHGRHRKDLDQSHIDKNWSNAWLKRGELFPETEAFMIAIQDQVINTRNYKKYILKERNLPTDMCRHCSSASETIQHITGACKTIVQTDYKHRHDQVASIIHQHFAHKNKFIGQIITIHNYKYIPEKILDSNAIKIYWDKTKFTDKTVYFNRPDITIHDKQDGTVYLIDIAIPNTHNIQATHTEKMNKYKDLAIEIKTQWRANTVKIVPIIISTTGVIPKTILTSLKILNIPTYLIHIIQKAVILNTCRITRKFLQADLSQNTL

SEQ ID NO: 1814 - protein, 1388 aa, Ypsolopha scabrella
MRLRSRNILPQAGTSNGESRPELKRPGSPTYSGVGIVSLCSEQPRNVVGQKTNSPSPNMLSCHPTSSTTSPISLFAASDSSRHSFSRSPSHASQSSMSSSSSQNDEAADVVQEAYADNPEPTVAQKRTRRRWSEETNTFIWRTYLEITMLEADTRRFLDKLYDAFIHKFPEIQVSKQRIGDQRRAIVQNNLLPKNTLNQIRKQVEESLNKTQNLPNNTVYTQNTIKPTQGRSLTRMRWSNETNESIMKIYYRITELEKNKTAYRQQLYSKFIESYPELSHISEQRLADQRRAIIKNKYIPDYRLEEIKNEVEIEITNDNSMRTQNSITQEEEASQITENLTDLTNNNLNEQIIILNNTQQHSVQQTSKQTELTDENAQRELTEIFEETLEKYKDTDPIQRPYIPKQKSTKKLAQLTQYIDNTILPKYLNSEQDFFTLHTLIYCAAFTVATCNGTKIFVSNTQFKRPKSDRKPSWQTRLEEKIRKLRQDLGRMTQYAQGNRSGNVILFVEDIKRRHGTHAQYENVNTTTQEYLDTLKQKLNAASSRLRRYKTCTLRKSQNTLFRNNEKQFYRSSLNTRQQTQIPHDTPTPQELHSFWSKIWSNPLEHNRNAEWIDKQSNEVNHITQMKFDTIPIETYVKVINKTHNWKAPGSDKIHNYWYKKLKSVQPYLHTHIHKFIESPDTLPLFLTQGTTYMIPKDDDTANPAKYRPITCLQTFYKIMTSCISEIIYIHLTDNNILAEQQKGSRKNCQGCKEQLTIDSVAMRQARKTKRNIYTMFIDYRKAFDSVPHSWLIQVLTHYKINQTIVDFLQKIMTNWQTNLKINSEVGEVSTAPITIQRGIFQGDALSPLWFCLALNPLSNLLNTTNAGFKLVNNSQLSHSLTHLMYMDDIKLYANNKRELFKLANITQTFSNDIKMQFGIDKCKINSIKKGKVELNSYTLTTGETIEPMDEHSTYKYLGFKQSKCIEQKETKSDLIKKFQQRLTHILKTYLNSRNLIKAINTYAIPILTYSFGIISWSKTDLQKLQTIINVQLTKFRKHHPKSCKQRLTLPRLEGGRKIIDVTNIHNRQITILRKYFHTKSEQSELHKHVTASDIKLTPLNLSNKNIQPNESLTQATEKIEIWKKKSLHGRHRKDLDQSHIDKNWSNAWLKRGELFPETEAFMIAIQDQVINTRNYKKYILKERNLPTDMCRHCSSASETIQHITGACKTIVQTDYKHRHDQVASIIHQHFAHKNKFIEQKSPYYKYIPEKILDSNAIKIYWDRTIITDKTVYFNRPDTTIHDKQDGTVYLIDIAIPNTHNIQATHTEKMNKYKDLAVEIKTQWRANTVKIVPIIISTTGVIPKTIMTSLKILNIPTYLIHIIQKAVILNTCRITRKFLQSDLSQNTL

SEQ ID NO: 1815 - protein, 1387 aa, Ypsolopha scabrella
MRLRSRNILPQAGTSNGESRPELKRPGSPTYSGVGTVSLCSEQPRNVVGQKTNSPSPNMLSCHPTSSTTSPISLFAASDSSRHSFSRSPSHASQSSMSSSSSQNDEAADVVQEAYADNPEPTVAQKRTRRRWSVETNTFIWRTYLEITMLEADTRRFLDKLYDAFIHKFPEIQVSKQRIGDQRRAIVQNNLLPKNTLNQIRKQVEESLNKTQNLPNNTVYTQNTIRPTQGRSLTRMRWSNETNESIMKIYYRITELEKNKTAYRQQLYSKFIESYPELSHISEQRLADQRRAIIKNKYIPDYRLEEIKNEVEIEITNDNSMRTQNSITQEEEASQITENLTDRTNNNLNEQIIILNNTQQHSVQQTSKQTELTDENAQRELTEIFEETLEKYKDTDPIQRPYIPKQKSTKKLAQLTQYIDNTILPKYLNSEQDFFTLHTLIYCAAFTVATCNGTKIFVSNTQFKRPKSDRKPSWQTRLEEKIRKLRQDLGRMTQYAQGNRSRNVILFVEDIKRRHGTHAQYENVNTTTQEYLDTLKQKLNAASSRLRRYKTCTLRKSQNTLFRNNEKQFYRSSLNTRQQTQIPHDTPTPQELHSFWSKIWSNPLEHNRNAEWIDKQSNEVNHITQMKFDTIPIETYVKVINKTHNWKAPGSDKIHNYWYKKLKSVQPYLHTRIHKFIESPDTLPLFLTQGTTYMIPKDDDTANPAKYRPITCLQTFYKIMTSCISEIIYTHLTDNNILAEQQKGSRKNCQGCKEQLTIDSVAMRQARKTKRNIYTMFIDYRKAFDSVPHSWLIQVLTHYKINQTIVDFLQKIMTNWQTNLKINSEVGEVSTAPITIQRGIFQGDALSPLWFCLALNPLSNLLNTTNAGFKLVNNSQLSHSLTHLMYMDDIKLYANNKRELFKLANITQTFSNDIKMQFGIDKCKINSIKKGKVELNSYTLNTGETIEPMDEHSTYKYLGFKQSKCIEQKETKSDLIKKFKQRLTHILKTYLNSRNLIKAINTYAIPILTYSFGIISWSKTDLQKLQTIINVQLTKFRKHHPKSCKQRLTLPRLERGRKIIDITNIHNRQITILRKYFHTKSEQFELHKHVTASDIKLTPLNLSNKNIQPNESLTQATEKIEIWKKKSLHGRHRKDLDQSHIDKNWSNAWLKRGELFPETEAFMIAIQDQVINTRNYKKYILKERNLPTDICRHCSSASETIQHITGACKTIVQTDYKHRHDQVASIIHQHFAHKNKFIEQKSPYYKYIPEKILDSNAIKIYWDRTIITDKTVYFNRPDITIHDKQDGTVYLIDIAIPNTHNIQATHTEKMNKYKDLAVEIKTQWQANTVKIIPIIISTTGVIPKTIHTSLILNIPTYLIHIIQKAVILNTRRITRKFLQADLSQNTL

SEQ ID NO: 1816 - protein, 1337 aa, Ypsolopha scabrella
MENPAPSSPSPNMLSCHPTSSTTSPISLFAASDSSRHSFSRSPSHASQSSMSSSSSQNDEAADVVQEAYADNPEPTVAQKRTRRRWSEETNTFIWRTYLEITMLEADTRRFLEKLYDAFIHKFPEIQVSKQRIGDQRRAIVQNNLLPKNTLNQIRKQVEESLNKTQNLPNNTVYTQNTIRPTQGRLLTRMRWSNETNESIMKIYYRITELEKNKTAYRQQLYSKFIESYPELSHISEQRLADQRRAMIKNKYIPDYRLEEIKNEVEIEITNDNSMRTQNSITQEEEASQITENLTDRTNNNLNEQIIILNNTQQHSVQQTSKQTELTDENAQRELTEIFEETLEKYKDTDPIQRPCIPKQKSTKKLSQLTQYIDNTILPKYLNSEQDFFTLHTAFTVATCNGTKIFVSNTQFKRPKSDRKPSWQTRLEEKIRKLRQDLGRLTQYAQGNRSRNVILFVEDIKRRHGTHAQYENVNTTTQEYLDTLKQKLNAASSRLRRYKTCTLRKSQNTLFRNNEKQFYRSSLNTRQQTQIPHVTPTPQELHSFWSKIWSNPLEHNRNAEWIDKQSNEVNHITQMKFDTIPIETYVKVINKTHNWKAPGSDKIHNYWYKKLKSVQPYLHTHIHKFIESPDTLPLFLTQGTTYMIPKDDDTANPAKYRPITCLQTFYKIMTSCISEIIYTHLTDNNILAEQQKGSRKNCQGCKEQLTIDSVAMRQARKTKRNIYTMFIDYRKAFDSVPHSWLIQVLTHYKINQTIVDFLQKIMINWQTNLKINSEVGEVSTAPITIQRGIFQGDALSPLWFCLALNPLSNLLNTTNAGFKLVNNSQLSHSLTHLMYMDDIKLYANNKRELFKLANITQTFSNDIKMQFGIDKCKINSIKKGKVELNSYTLTIGETIEPMDEHSTYKYLGFKQSKCIEQKETKSDLIKKFKQRLTHILKTYLNSRNLIKAINTYAIPILTYSFGIISWSKTDLQKLQTIINVQLTKFRMHHPKSCKQRLTLPRLEGGRKIIDITNIHNRQITILRKYFHTKSEQSELHKHVTASDIKLTPLNLSNKNIQPNESLTQATEKIEIWKKKSLHGRHHKDLDQSHIDKNWSNAWLKRGELFPETEAFMIAIQDQVINTRNYKKYILKERNLPIDMCRHCSSASETIQHITGACKTIVQTDYKHRHDQVASIIHQHFAHKNKFIEQKSPYYKYIPEKIRDSNAIKIYWDRTIITDKTVYFNRPDITIHDKQDGTVYLIDIAIPNTHNIQATHTEKMNKYKDLAVEIKTQWRANTVKIVPIIISTTGVIPKTILTSLKILNIPTYLIHIIQKAVILNTCRITRKFLQADLSQNTL

SEQ ID NO: 1817 - protein, 1220 aa, Ypsolopha scabrella
MLEADTRRFLDKLYDAFIHKFPEIQVSKQRIGDQRRAIVQNNLLPKNTLNQIRKQVEESLNKTQYLPNNTVYTQNTIRPTQGRSLTRMRWSNETNESIMKIYYRITELEKNKTAYRQQLYSKFIESYPELSHISEQRLADQRRAIIKNKYIPDYRLEEIKKEEEASQITENLTDLTNNNLNEQIIILNNTQQHSVQQTSKQTELTDENAQRELTEIFEETLEKYKDTDPIQRPYIPKQKSTKKLAQLTQYIDNTILPKYLNSEQDFFTLHTLIYCAAFTVATCNGTKIFVSNTQFKRPKSDRKPSWQTRLEEKIRKLRQDLGRMTQYAQGNRSKNVILFVEDIKRRHGTHAQYENVNTTTQEYLDTLKQKLNAASSRLRRYKTCTLRKSQNTLFRNNEKQFYRSSLNTRQQTQIPHDTPTLQELHSFWSKIWSNPLEHNRNAEWIDKQSNEVNHITQMKFDTIPIETYVKFINKTHNWKAPGSDKIHNYWYKKLKSVQPYLHTHIHKFIESPDTLPLFLTQGTTYMIPKDDDTANPAKYRPITCLQTFYKIMTSCISEIIYTHLTDNNILAEQQKGSRKNCQGCKEQLTIDSVAMRQARKTKRNIYTMFINYRKAFDSVPHSWLIQVLTHYKINQTIVDFLQKIMTNWQTNLKINSEVGEVSTAPITIQRGIFQGDALSPLWFCLALNPLSNLLNTTNAGFKLVNNSQLSHSLTHLMYMDDIKLYANNKRELFKLANITQTFSNDIKMQFGIDKCKINSIKKGKVELNSYTLTTGETIEPMDEHSTYKYLGFKQSKCIEQKETKSDLIKKFKQRLTHILKTYLNSRNLIKAINTYAIPILTYSFGIISWSKTDLQKLQTIINVQLTKFRKHHPKSCKQRLTLPRLEGGRKIIDITNIHNRQITILRKYFHTKSEQSELHKHVTASDIKLTPLNLSNKNIQPNESLTQATEKMEIWKKKSLHGRHRKDLDQSHIDKNWSNAWLKRGELFPETEAFMIAIQDQVINTRNYKKYILNKRNLPTDMCRHCSSASETIQHITGACKTIVQTDYKHRHDQVASIIHQHFAHKNKFIEQKSPYYKYIPEKILDSNAIKIYWDRTIITDKTVYFNRPDITIHDKQDGTVYLIDIAIPNTHNIQATHTEKMNKYKDLAVEIKTQWRANTVKIVPIIISTTGVIPKTILTSLKILNIPTYLIHIIQKAVILNTCRITRKFLQADLSQNTL

SEQ ID NO: 1818 - protein, 1388 aa, Ypsolopha scabrella
MRLRSRNILPQAGTSNGESRPELKRPGSPTYSGVGTVSLCSEQPRNVVGQKTNSPSPNMLSCHPTSSTTSPISLFAASDSSRHSISRSPSHASQSSMSSSSSQNDEAADVVQEAYADNPEPTVAQKRTRRRWSVETNTFIWRTYLEITMLEADTRRFLDKLYDAFIHKFPEIQVSKQRIGDQRRAIVQNNLLPKNTLNQIRKQVEESLNKTQNLPNNTVYTQNTIRPTQGRSLTRMRWSNETNESIMKIYYRITELEKNKTAYRQQLYSKFIESYPELSHISEQRLADQRRAIIKNKYIPDYRLEEIKNEVEIEITNDNSMRTQNSITQEEEASQITENLTDRTNNNLNEQIIILNNTQQHSVQQTSKQTELTDENAQRELTEIFEETLEKYKDTDPIQRPYIPKQKSTKKLAQLTQYIDNTILPKYLNSEQDFFTLHTLIYCAAFTVATCNGTKIFVSNTQFKRPKSDRKPSWQTRLEEKIRKLRQDLGRMTQYAQGNRSRNVILFVEDIKRRHGTHAQYENVNTTTQEYLDTLKQKLNAASSRLRRCKTCTLRKSQNTLFRNNEKQFYRSSLNTRQQTQIPHDTPTPQELHSFWSKIWSNPLEHNRNAEWIDKQSNEVNHITQMKFDTIPIETYVKVINKTHNWKAPGSDKIHNYWYKKLKSVQPYLHTRIHKFIESPDTLPLFLTQGTTYMIPKDDDTANPAKYRPITCLQTFYKIMTSCISEIIYTHLTDNNILAEQQKGSRKNCQGCKEQLTIDSVAMKQARKTKRNIYTMFIDYRKAFDSVPHSWLIQVLTHYKINQTIVDFLQKIMTNWQTNLKINSEVGEVSTAPITIQRGIFQGDALSPLWFCLALNPLSNLLNTTNAGFKLVNNSQLSHSLTHLMYMDDIKLYANNKRELFKLANITQTFSNDIKMQFGIDKCKINSIKKGKDELNSYTLTTGETIEPMDEHSTYKYLGFKQSKCIEQKETKSDLIKKFKQRLTHILKTYLNSRNLIKAINTYAIPILTYSFGIISWSKTDLQKLQTIINVQLTKFRKHHPKSCKQRLTLPRLEGGRKIIDITNIHNRQITILRKYFHTKSEQFELHKHVTASDIKLTPLNLSNKNIQPNESLTQATEKIEIWKKKSLHGRHRKDLDQSHIDKNWSNAWLKRGELFPETEAFMIAIQDQVINTRNYKKYILKERNLPTDICRHCSSASETIQHITGACKTIVQTDYKHRHDQVASIIHQHFAHKNKFIEQKSPYYKYIPEKILDSNAIKIYWDRTIITDKTVYFNRPDITIHDKQDGTVFLIDIAIPNTHNIQATHTEKMNKYKDLAVEIKTQWRANTVKIVPIIISTTGVIPKTILTSLKILNIPTYLIHIIQKAVILNTCRITRKFLQADLSQNTL

SEQ ID NO: 1819 - protein, 1388 aa, Ypsolopha scabrella
MRLRSRNILPQAGTSNGESRPELKRPGSPTYSGVGTVSLCSEQPRNVVGQKTNSPSPNMLSCHPTSSTTSPISLFAASDSSRHSFSRSPSNASQSSMSSSSSQNDEAADVVQEAYADNPEPTVAQKRTRRRWSEETNTFIWRTYLEITMLEADTRRFLDKLYDAFIHKFPEIQVSKQRIGDQRRAIVQNNLLPKNTLNQIRKQVEESLNKTQYLPNNTVYTQNTIRPTQGRSLTRMRWSNETNESIMKIYYRITELEKNKTAYRQQLYSKFIESYPELSHISEQRLADQRRAIIKNKYIPDYRLEEIKNEVEIEITNDNSMRTQNSITQEEEASQITENLTDLTNNNLNEQIIILNNTQQHSVQQTSKQTELTDENAQRELTEIFEETLEKYKDTDPIQRPYIPKQKSTKKLAQLTQYIDNTILPKYLNSEKDFFTLHTLIYCAAFTVATCNGTKIFVSNTQFKRPKSDRKPSWQTRLEEKIRKLRQDLGRMTQYAQGNRSRNVILFVEDIKRRHGTNAQYENVNTTTQEYLDTLKQKLNAASSRLRRYKTCTLRKSQNTLFRNNEKQFYRSSLNTRQQTQIPHDTPTPQELHSFWSKIWSNPLEHNRNAEWIDKQSNEVNHITQMKFDTIPIETYVKVINKTHNWKAPGSDKIHNYWYKKLKSVQPYLHTHIHKFIESPDTLPLFLTQGTTYMIPKDDDTANPAKYRPITCLQTFYKIITSCISEIIYTHLTDNNILAEQQKGSRKNCQGCKEQLTIDSVAMRQARKTKRNIYTMFIDYRKAFDSVPHSWLIQVLTHYKINQTIVDFVQKIMTNWQTNLKINSEVGEVFTAPITIQRGIFQGDALSPLWFCLALNPLSNLLNTTNAGFKLVNNSQLSHSLTHLMYMDDIKLYANNKRELFKLANITQTFSNDIKMQFGIDKCKINSIKKGKVELNSYTLTTGETIEPMDEHSTYKYLGFKQSKCIEQKETKSDLIKKFKQRLTYILKTYLNSRNLIKAINTYAIPILTYSFGIISWSKTDLQKLQTIINVQLTKFRKHHPKSCKQRLTLPRLEEGRKIIDITNIHNRQITILRKYFHTKSEQSELHKHVTASDIKLTPLNLSNKNIQPNESLTQATKKIEIWKKKSLHGRHRKDLDQSHIDKNWSNAWLKRGELFPETEAFMIAIQDQVINTRNYKKYILKERNLHTDMCRHCSSASETIQHITGACKTIVQTDYKHRHDQVASIIHQHFAHKNKFIEQKSPYYKYIPEKILDSNAIKIYWDRTIITDKTVYFNRPDITIHDKQDGTVYLIDIAIPNTHNIQATHTEKMNKYKDLAVEIKTQWRANTVKIVPIIISTTGVIPKTILTSLKILNIPTYLIHIIQKAVILNTCRITRKFLQADLSQNTL

SEQ ID NO: 1820 - protein, 897 aa, Ypsolopha scabrella
MTQYAQGNRSRNVILFVEEIKRRHGTHAQYENVNTTTQEYLDTLKQKLNAASSRLRRYKTCTLKKAQNTLFRNNEKQFYRSSLNTRQQTQIPHDTPTPQELHSFWSKIWSNPLEHNRNAEWIDKQSNEVNHITQMKFDTIPIETYVKVINKTHNWKAPGSDKIHNYWYKKLKSVQPYLHTHIHKFIESPDTLPLFLTQGTTYMIPKDDDTANPAKYRPITCLQTFYKIMTSCISEIIYTHLTDNNILAEQQKGSRKNCQGCKEQLTIDSVAMRQARKTKRNIYTMFIDYRKAFDSVPHSWLIQVLTYYKINQTIVDFLQKIMTNWQTNLKINSEVGEVSTAPITIQRGIFQGDALSPLWFCLALNPLSNLLNTTNAGFKLVNNSQLSHSLTHLMYMDDIKLYANNKRELFKLANITQTFSNDIKMQFGIDKCKINSIKKGKVELNSYTLTTGETIEPMDEHSTNKYLGFKQSKCIEQKETKSDLIKKFKQRLTHILKTYLNSRNLIKAINTYAIPILTYSFGIISWSKTDLQKLQTIINVQLTKFRKHHPKSCKQRLTLPRLEGGRKIIDITNIHNRQITILRKYFHTKSEQSELHKHVTASDIKLTPLNLSNKNIQPNESLTQATEKIEIWKKKPLHGRHRKDLDQSHIDKNWSNAWLKRGELFPETEAFMIAIQDQVINTRNYKKYILKERNLPTDMCRHCSSASETIQHITGACKTIVQTDYKHRHDQVASIIHQHFAHKNKFIEQKSPYYKYIPEKILDSNAIKIYWDRTIITDKTVYFNRPDITIHDKQDGTVYLIDIAIPNTHNIQATHTEKMNKYKDLAVEIKTQWRANTVKIVPIIISTTGVIPKTILTSLKILNIPTYLIHIIQKAVILNTCRITRKFLQADLSQNTL

SEQ ID NO: 1821 - protein, 1388 aa, Ypsolopha scabrella
MRLRSRNILPQAGTSNGESRPELKRPGSPTYSGVGTVSLCSEQPRNVVGQKTNSPSPNMLSCHPTSSTTSPISLFAASDSSRHSFSRSPSHASQSSMSSSSSQNDEAADVVQEAYADNPEPTVAQKRTRRRWSEETNTFIWRTYLEITMLEADTRRFLDKLYDAFIHKFPEIQVSKQRIGDQRRAIVQNNLLPKNTLNQIRKQVEESLNKTQNLPNNTVYTQNTIRPTQGRSLTRMRWSNETNESIMKIYYRITELEKNKTAYRQQLYSKFIESYPKLSHISEQRLADQRRAIIKNKYIPDYRLEEIKNEVEIEITNDNSMRTQNSITQEEEASQITENLTDLTNNNLNEQIIILNNTQQHSVQQTSKQTELTDENAQRELTEIFEETLEKYKDTDPIQRPYIPKQKSTKKLAQLTQYIDNTILPKYLNSEQDFFTLHTLIYCAAFTVATCNGTKIFVSNTQFKRPKSDRKPSWQTRLEEKIRKLRQDLGRMTQYAQGNRSRNVILFVEDIKRRHGTHAQYENVNTTTQEYLDTLKQKLNAASSRLRRYKTCTLRKSQNTLFRNNEKQFYRSSLNTRQQTQIPHDTPTPQELHSFWSKIWSNPLEHNRNAEWIDKQSNEVNHITQMKFDTIPIETYVKVINKTHDWKAPGSDKIHNYWYKKLKSVQPYLHTHIHKFIESPDTLPLFLTQGTTYMIPKDDDTANPAKYRPITCLQTFYKIMTSCISEIIYTHLTDNNILAEQQKGSRKNCQGCKEQLTIDSVAMRQARKTKRNIYTMFIDYRKAFDSVPHSWLIQVLTHYKINQTIVDFLQKIMINWQTNLKINSEVGEVSTAPITIQRGIFQGDALSPLWFCLALNPLSNLLNTTNAGFKLVNNSQLSHSLTHLMYMDDIKLYANNKRELFKLANITQTFSNDIKMQFGIDKCKINSIKKGKVELNSYTLTTGETIEPMDEHSTYKYLGFKQSKCIEQKETKSDLIKKFKQRLTHILKTYLNSRNLIKAINTYAIPILTYSFGIISWSKTDLQKLQTIINVQLTKFRKHHPKSCKQRLTLPRLEGGRKIIDITNIHNRQITILRKYFHTKSEQSELHKHVTASDIKLTPLNLSNKNIQPNESLTQATEKIEIWKKKSLHGRHRKDLDQSHIDKNWSNAWLKRGELFPETEAFMIAIQDQVINTRNYKKYILKERNLPTDMCRHCSSASETIQHITGACKTIVQTDYKHRHDQVASIIHQHFAHKNKFIEQKSPYYKYIPEKILDSNAIKIYWDRTIITDKTVYFNRPDITIHDKQDGTVYLIDIAIPNTHNIQATHTEKMNKYKDLAVEIKTQWRANTVKIVPIIISTTGVIPKTILTSLKILNIPTYLIHIIQKAVILNTCRITRKFLQADLSQNTL

SEQ ID NO: 1822 - protein, 1388 aa, Ypsolopha scabrella
MRLRSRNILPQAGTSNGESRPELKRPGSPTYSGVGTVSLCSEQPRNVVGQKTNSPSPNMLSCHPTSSTTSPISLFAASDSSRHSFSRSPSHASQSSMSSSSSQNDEAADVVQEAYADNPEPTVAQKRTRRRWSVETNTFIWRTYLEITMLEADTRRFLDKLYDAFIHKFPEIQVSKQRIGDQRRAIVQNNLLPKNTLNQIRKQVEESLNKTQNLPNNTVYTQNTIRPTQGRSLTRMRWSNETNESIMKIYYRITELEKNKTAYRQQLYSKFIESYPKLSHISEQRLADQRRAIIKNKYIPDYRLEEIKNEVEIEITNDNSMRTQNSITQEEEASQITENLTDRTNNNLNEQIIILNNTQQHSVQQTSKQTEFTDENAQRELTEIFEETLEKYKDTDPIQRPYIPKQKSTKKLAQLTQYIDNTILPKYLNSEQDFFTLHTLIYCAAFTVATCNGTKIFVSNTQFKRPKSDRKPSWQTRLEEKIRKLRQDLGRMTQYAQGNRSRNVILFVEDIKRRHGTHAQYENVNTTTQEYLDTLKQKLNAASSRLRRYKTCTLRKSQNTLFRNNEKQFYRSSLNTRQQTQIPHDTPTPQELHSFWSKIWSNPLEHNRNAEWIDKQSNEVNHITQMKFDTIPIETYVKVINKTHNWKAPGSDKIHNYWYKKLKSVQPYLHTHIHKFIESPDTLPLFLTQGTTYMIPKDDDTANPAKYRPITCLQTFYKIMTSCISEIIYTHLTDNNILAEQQKGSRKNCQGCKEQLTIDSVAMRQARKTKRNIYTMFIDYRKAFDSVPHSWLIQVLTHYKINQTIVDFLQKIMTNWQTNLKINSEVGEVSTAPITIQRGIFQGDALSPLWFCLALNPLSNLLNTTNAGFKLVNNSQLSHSLTHLMYMDDIKLYANNKRELFKLANITQTFSNDIKMQFGIDKCKINSIKKGKVELNSYTLTTGETIEPMDEHSTYKYLGFKQSKCIEQKETKSDLIKKFKQRLTHILKTYLNSRNLIKAINTYAIPILTYSFGIISWSKTDLQKLQTIINVQLTKFRKHHPKSCKQRLTLPRLEGGRKIIDITNIHNRQITILRKYFHTKSEQSELHKHVTASDIKLTPLNLSNKNIQPNESLTQTTEKIEIWKKKSLHGRHRKDLDQSHIDKNWSNAWLKRGELFPETEAFMIAIQDQVINTRNYKKYILKERNLPTDMCRHCSSASETIQHITGACKTIVQTDYKHRHDQVASIIHQHFAHKNKFIEQRSPYYKYIPEKILDSNAIKIYWDRTIITDKTVYFNRPDITIHDKQDGTVYLIDIAIPNTHNIQATHTEKMNKYKDLAVEIKTQWRANTVKIVPIIISTTGVIPKTILTSLKILNIPTYLIHIIQKAVILNTCRITRKFLQADLSQNTL

SEQ ID NO: 1823 - protein, 894 aa, Ypsolopha scabrella
MTQYAQGNRSRNVILFVEDIKIRHGTHAQYENVNTTTQEYLDTLKQKLNAASSRLRRYKTCTLRKSQNTLFRNNEKQFYRSSLNTRQQTQIPHDTPTPQELHSFWSKIWSNPLEHNRNAEWIDKQSNEVNHITQMKFDTIPIETYVKIINKTHNWKAPGSDKIHNYWYKKLKSVQPYLHTHIHKFIESPDTLPLFLTQGTTYMIPKDDDTANPAKYRPITCLQTFYKIMTSCISEIIYTHLTDNNILAEQQKGSRKNCQGCKEQLTIDSVAMRQARKTKRNIYTMFIDYRKAFDSVPHNWLIQVLTHYKINQTIVDFLQKIMTNWQTNLKINSEVGEVSTAPITIQRGIFQGDALSPLWFCLALNPLSNLLNTTNAGFKLVNNSQLSHSLTHLMYMDDIKLYASNKRELFKLANITQTFSNDIKMQFGIDKCKINSIKKGKVELNSYTLTTGKTIEPMDEHSTYKYLGSKQSKCIEQRGTKSELIKKFKQRLTHILKTYLNSRNLIKAINTYAIPILTYSFGIISWSKTDLQKLQTIINVQLTKFRKHHPKSCKQRLTLPRLEGGRKIIDITNIHNRQITILRKYFHTKSEQSELHKHVTASDIKLTPLNLSNKNIQPNESLTQATEKIEIWKKKSLHGRHRKDLDQSHIDKNWSNAWLKRGELFPETETFMIAIQDQVINTRNYKKYILKERNLPTDMCRHCSSASETIQHITGACKTIVQTDYKHRHDQVASIIHQHFAHKNKFIEQKSPYYKYIPEKILDSNAIKIYWDRTIITDKTVYFNRPDITIHDKQDGTVYLIDIAIPNTHNIQATHTEKMNKYKDLAVEIKTQWRANTVKIVPIIISTTGVIPKTILTSLNIPTYLIHIIQKAVTLNTCRITRKILQADLSQNTL

SEQ ID NO: 1824 - protein, 1388 aa, Ypsolopha scabrella
MRLRSRNILPQAGTSNGESRPELKRPGSPTYSGVGTVSLCSEQPRNVVGQKTNSPSPNMLSCHPTSSTTSPISLFAASDSSRHSFSRSPSHASQSSMSSSSSQNDEAADVVQEAYADNPEPTVAQKRTRQRWSEETNTFIWRTYLEITMLEADTRRFLDKLYDAFIHKFPEIQVSKQRIGDQRRAIVQNNLLPKNTLNQIRKQVEESLNKTQNLPNNTVYTQNTIRPTQGRSLTRMRWSNETNESIMKIYYRITELEKNKTAYRQQLYSKFIESYPELSHISEQRLADQRRAIIKNKYIPDYRLEEIKNEVEIEITNDNSMRTQNSITQEEEASQITENLTDLTNNNLNEQIIILNNTQQHSVQQTSKQTELTDENAQRELTKIFEETLEKYKDTDPIQRPYIPKQKSTKKLAQLTQYVDNTILPKYLNSEQDFFTLHTLIYCAAFTVATCNGTKIFVSNTQFKRPKSDRKPSWQTRLEEKIRKLRQDLGRMTQYAQGNRSRNVILFVEDIKRRHGTHAQYENVNTTTQEYLDTLKQKLNAASSRLRRYKTCTLRKSQNTLFRNNEKQFYRSSLNTRQQTQIPHDTPTPQELHSFWSKMWSNPLEHNRNAEWIDKQSNEVNHITQMKFDTIPIETYVKVINKTHNWKAPGSDKIHNYWYKKLKSVQPYLHTHIHKFIESPDTLPLFLTQGTTYMIPKDDDTANPAKYRPITCLQTFYKIMTSCISEIIYTHLTDNNILAEQQKGSRKNCQGCKEQLTIDSVAMRQARKTKRNIYTMFIDYRKAFDSVPHSWLIQVLTHYKINQTIVDFLQKIMTNWQTNLKINSEVGEVSTAPITIQRGIFQGDALSPLWFCIALNPLSSLLNTTNAGFKLVNNSQLSHSLTHLMYMDDIKLYANNKRELFKLANITQTFSNDIKMQFGIDKCKINSIKKGKVELNSYTLTTGETIEPMDEHSTYKYLGFKQSKCIEQKETKSDLIKKFKQRLTHILKTYLNSRNLIKAINTYAIPILTYSFGIISWSKTDLQKLQTIINVQLTKFRKHHPKSCKQRLTLPRLEGGRKIIDITNIHNRQITILRKYFHTKSEQSELHKHVTASDMKLTPLNLSNKNIQPNESLTQATEKIEIWKKKSLHGRHRKDLDQSHIDKNWSNAWLKRGELFPETEAFMIAIQDQIINTRNYKKYILKERNLPTDMCRHCSSASETIQHITGACKTIVQTDYKHRHDQVASIIHQHFAHKNKFIEQKSPYYKYIPEKILDSNAIKIYWDRTIITDKTVYFNRPDITIHDKQDGTVYLIDIAIPNTHNIQATHTEKMNKYKDLAVEIKTQWRANTVKIVPIIISTTGVIPKTIMTSLKILNIPTYLIHIIQKAVILNTCRITRKFLQSDLSQNTL

SEQ ID NO: 1825 - protein, 1388 aa, Ypsolopha scabrella
MRLRSRNILPQAGTSNGESRPELKRPGSPTYSGVGTVSLCSEQPRNVVGQKTNSPSPNMLSCHPTSSTTSPISLFAASDSSRHSFSRSPSHASQSSMSSSSSQNDEAADVVQEAYADNPEPTVAQKRTRRRWSEETNTFIWRTYLEITMLEADTRRFLDKLYDAFIHKFPEIQVSKQRIGDQRRAIVQNNLLPKNTLNQIRKQVEESLNKTQNLPNNTVYTQNTIRPTQGRSLTRMRWSNETNESIMKIYYRITELEKNKTAYRQQLYSKFIESYPKLSHISEQRLADQRRAIIKNKYIPDYRLEEIKNEVEIEITNDNSMRTQNSITQEEEASQITENLTDLTNNNLNEQIIILNNTQQHSVQQTSKQTELTNENAQRELTEIFEETLEKYKDTDPIQRPYIPKQKSTKKLAQLTQYIDNTILPKYLNSEQDFFTLHTLIYCAAFTVATCNGTKIFVSNTQFKRPKSDRKPSWQTRLEEKIRKLRQDLGRMTQYAQGNRSRNVILFVEDIKRRHGTHAQYENVNTTTQEYLDTLKQKLNAASSRLRRYKTCTLRKSQNTLFRNNEKQFYRSSLNTRQQTQIPHDTPTPQELHSFWSKIWSNPLEHNRNAEWIDKQSNEVNHITQMKFDTIPIETYVKVINKTHNWKAPGSDKIHNYWYKKLKSVQPYLHTHIHKFIESPDTLPLFLTQGTTYMIPKDDDTANPAKYRPITCLQTFYIIMKSCISEIIYTHLTDNNILAEQQKGSRKNCQGCKEQLTIDSVAMRQARKTKRNIYTMFIDYRKAFDSVPHSWLIQVLTHYKINQTIVDFLQKIMINWQTNLKINSEVGEVSTAPITIQRGIFQGDALSPLWFCLALNPLSNLLNTTNAGFKLVNNSQLSHSLTHLMYMDDIKLYANNKRELFKLANITQTFSNDIKMQFGIDKCKINSIKKGKVELNSYTLTTGETIEPMDEHSTYKYLGFKQSKCIEQKETKSDLIKKFKQRLTHILKTYLNSRNLIKAINTYAIPILTYSFGIISWSKTDLQKLQTIINVQLTKFRKHHPKSCKQRLTLPRLEGGRKIIDITNIHNRQITILRKYFHTKSEQSELHKHVTASDIKLTPLNLSNKNIQPNESLTQATEKIEIWKKKSLHGRHRKDLDQSHIDKNWSNAWLKRGELFPETEAFMIAIQDQVINTRNYKKYILKERNLPTDMCRHCSSASETIQHITGACKTIVQTDYKHRHDQVASIIHQHFAHKNKFIEQKSPYYKYIPEKILDSNAIKIYWDRTIITDKTVYFNRPDITIHDKQDGTVYLIDIAIPNTHNIQATHTEKMNKYKDLAVEIKTQWRANTVKIVPIIISTTGVIPKTILTSLKILNIPTYLIHIIQKAVILNTCRITRKFLQADLSQNTL

SEQ ID NO: 1826 - protein, 897 aa, Ypsolopha scabrella
MTQYAQGNRSRNVILFVEDIKRRHGTHAQYENVNTTTQEYLDTLKQKLNAASSRLRRYKTCTLRKSQNTLFRNNEKQFYRSSLNTRQQTQIPHDTPTPQELHSFWSKIWSNPLEHNRNAEWIDKQSNEVNHITQMKFDTIPIETYVKVINKTHNWKAPGSDKIHNYWYKKLKSVQPYLHTHIHKFIESPDTLPLFLTQGTTYMIPKDDDTANPAKYRPITCLQTFYKIMTSCISEIIYTHLTDNNILAEQQKGSRKNCQGCKEQLTIDSVAMRQARKTKRNIYTMFIDYRKAFDSVPHSWLIQVLTHYKINQTIVDFLQKIMINWQTNLKINSEVGEVSTAPITIQRGIFQGDALSPLWFCLALNPLSNLLNTTNAGFKLVNNSQLSHSLTHLMYMDDIKLYANNKRELFKLANITQTFSNDIKMQFGIDKCKINSIKKGKVELNSYTLTTGETIEPMDEHSTYKYLGFKQSKCIEQKETKSDLIKKFKQRLTHILKTYLNSRNLIKAINTYAIPILTYSFGIISWSKTDLQKLQTIINVQLTKFRKHHPKSCKQRLTLPRLEGGRKIIDITNIHNRQITILRKYFHTKSEQSELHKHVTASDIKLTPLNLSNKNIQPNESLTQATEKIEIWKKKSLHGRHRKDLDQSHIDKNWSNAWLKRGELFPETEAFMIAIQDQVINTRNYKKYILKERNLPTDMCRHCSSASETIQHITGACKTIVQTDYKHRHDQVASIIHQHFAHKNKFIEQKSPYYKYIPEKILDSNAIKIYWDRTIITDKTVYFNRPDITIHDKQDGTVYLIDIAIPNTHNIQATHTEKMNKYKDLAVEIKTQWRANTVKIVPIIISTTGVIPKTILTSLKILNIPTYLIHIIQKAVILNTCRITRKFLQADLSQNTL

SEQ ID NO: 1827 - protein, 1266 aa, Ypsolopha scabrella
MLIIIIIIIIIIETNTFIWRTYLEITMLEADTRRFLDKLYDAFIHKFPEIQVSKQRIGDQRRAIVQNNLLPKNTLNQIRKQVEESLNKTQNLPNNTVYTQNTIRPTQGRSLTRMRWSNETNESIMKIYYRITELEKNKTAYRQQLYSKFIESYPELSHISEQRLADQRRAIIKNKYIPDYRLEEIKNEVEIEITNDNSMRTQNSITQEEEASQITENLTDLTNNNLNEQIIILNNTQQHSVQQTSRQKELTDENAQRELTEIFEETLEKYKDTDPIQRPYIPKQKSTKKLAQLTQYIYNTILPKYLNSEQNFFTLHTLIYCAAFTVATCNGTKIFVSNTQFKRPKSDRKPSWQTRLEEKIRKLRQDLGRMTQYAQGNRSRNVILFVEDIKIRHGTHAQYENVNTTTQEYLDTLKQKLNAASSRLRRYKTCTLRKSQNTLFRNNEKQFYRSSLNTRQQTQIPHDTPTPQELHSFWSKIWSNPLEHNRNAEWIDKQSNEVNHITQMKFDTIPIETYVKVINKTHNWKAPGSDKIHNYWYKKLKSVQPYLHTHIHKFIESPDTLPLFLTQGTTYMIPKDDDTANPAKYRPITCLQTFYKIMTSCISEIIYTHLTDNNILAEQQKGSRKNCQGCKEQLTIDSVAMRQARKTKRNIYTMFIDYRKAFDSVPHSWLIQVLTHYKINQTIVDFLQKIMTNWQTNLKINSEVGEVSTAPITIQRGIFQGDALSPLWFCLALNPLSNLLNTTNAGFKLVNNSQLPHSLTHLMYMDDIKLYANNKRELFKLANITQTFSNDIKMQFGIDKCKINSIKKGKVELNSYTLTTGETIEPMDEHSTYKYLGFKQSKCIEQKETKSDLIKKFKQRLTHILKTYLNSRNLIKAINTYAIPILTYSFGIISWSKTDLQKLQTIINVQLTKFRKHHPKSCKQRLTLPRLEGGRKIIDITNIHNRQITILRKYFHTKSEQSELHKHVTASDIKLTPLNLSNKNIQPNESLTQATEKIEIWKKKSLHGRHRKDLDQSHIDKNWSNAWLKRGELFPETEAFMIAIQDQVINTRNYKKYILKERNLPTDMCRHCSSASETIQHITGACKTIVQTDYKHRHDQVASIIHQHFAHKNKFIEQKSPYYKYIPEKILDSNAIKIYWDRTIITDKTVYFNRPDITIHDKQDGTVYLIDIAIPNTHNIQATHTEKMNKYKDLAVEIKTQWRANTVKIVPIIISTTGVIPKTILTSLKILNIPTYLIHLIQKAVILNTCRITRKFLQADLSQNTL

SEQ ID NO: 1828 - protein, 1388 aa, Ypsolopha scabrella
MRLRSRNILPQAGTSNGESRPELKRPGSPTYSGVGTVSLCSEQPRNVVGQKTNSPSPNMLSCHPTSSTTSPISLFAASDSSRHSFSRSPSHASQSSMSSSSSQNDEAADVVQEAYADNPEPTVAQKRTRRRWSVETNTFIWRTYLEITMLEADTRRFLDKLYDAFIHKFPEIQVSKQRIGDQRRAIVQNNLLPKNTLNQIRKQVEESLNKTQNLPNNTVYTQNTIRPTQGRSLTRMRWSNETNESIMKIYYRITELEKNKTAYRQQLYSKFIESYPELSHISEQRLADQRRAIIKNKYIPDYRLEEIKNEVEIEITNDNSMRTQNSITQEEEASQITENLTDRTNNNLNEQIIILNNTQQHSVQQTSKQTEFTDENAQRELTEIFEETLEKYKDTDPIQRPYIPKQKSTKKLAQLTQYIDNTILPKYLNAEQDFFTLHTLIYCAAFTVATCNGTKIFVSNTQFKRPKSDRKPSWQTRLEEKIRKLRQDLGRMTQYAQGNRSRNVILFVEDIKRRHGTHAQYENVNTTTQEYLDTLKQKLNAASSRLRRYKTCTLRKSQNTLFRNNEKQFYRSSLNTRQQTQIPHDTPTPQELHSFWSKIWSNPLEHNRNAEWIDKQSNEVNHITQMKFDTIPIETYVKVINKTHNWKAPGSDKIHNYWYKKLKSVQPYLHTHIHKFIESPDTLPLFLTQGTTYMIPKDDDTANPAKYRPITCLQTFYKIMTSCISEIIYTHLTDNNILAEQQKGSRKNCQGCKEQLTIDSVAMRQARKTKRNIYTMFIDYRKAFDSVPHSWLIQVLTHYKINQTIVDFLQKIMTNWQTNLKINSEVGEVSTAPITIQRGIFQGDALSPLWFCLALNPLSNLLNTTNAGFKLVNNSQLSHSLTHLMYMDDIKLYANNKRELFKLANITQTFSNDIKMQFGIDKCKINSIKKGKVELNSYTLTTGETIEPMDEHSTYKYLGFKQSKCIEQKETKSDLIKKFKQRLTHILKTYLNSRNLIKAINTYAIPILTYSFGIISWSKTDLQKLQTIINVQLTKFRKHHPKSCKQRLTLPRLEGGRKIIDITNIHNRQITILRKYFHTKSEQSELHKHVTASDIKLTPLNLSNKNIQPNESLTQTTEKIEIWKKKSLHGRHRKDLDQSHIDKNWSNAWLKRGELFPETEAFMIAIQDQVINTRNYKKYILKERNLPTDMCRHCSSASETIQHITGACKTIVQTDYKHRHDQVASIIHQHFAHKNKFIEQRSPYYKYIPEKILDSNAIKIYWDRTIITDKTVYFNRPDITIHDKQDGTVYLIDIAIPNTHNIQATHTEKMNKYKDLAVEIKTQWRANTVKIVPIIISTTGVIPKTILTSLKILNIPTYLIHIIQKAVILNTCRITRKFLQADLSQNTL

SEQ ID NO: 1829 - protein, 1388 aa, Ypsolopha scabrella
MRLRSRNILPQAGTSNGESRPELKRPGSPTYSGVGIVSLCSEQPRNVVGQKTNSPSPNMLSCHPTSSTTSPISLFAASDSSRHSFSRSPSHASQSSMSSSSSQNDEAADVVQEAYADNPEPTVAQKRTRRRWSEETNTFIWRTYLEITMLEADTRRFLDKLYDAFIHKFPEIQVSKQRIGDQRRAIVQNNLLPKNTLNQIRKQVEESLNKTQNLPNNTVYTQNTIKPTQGRSLTRMRWSNETNESIMKIYYRITELEKNKTAYRQQLYSKFIESYPELSHISEQRLADQRRAIIKNKYIPDYRLEEIKNEVEIEITNDNSMRTQNSITQEEEASQITENLTDLTNNNLNEQIIILNNTQQHSVQQTSKQTELTDENAQRELTEIFEETLEKYKDTDPIQRPYIPKQKSTKKLAQLTQYIDNTILPKYLNSEQDFFTLHTLIYCAAFTVATCNGTKIFVSNTQFKRPKSDRKPSWQTRLEEKIRKLRQDLGRMTQYAQGNRSGNVILFVEDIKRRHGTHAQYENVNTTTQEYLDTLKQKLNAASSRLRRYKTCTLRKSQNTLFRNNEKQFYRSSLNTRQQTQIPHDTPTPQELHSFWSKIWSNPLEHNRNAEWIDKQSNEVNHITQMKFDTIPIETYVKVINKTHNWKAPGSDKIHNYWYKKLKSVQPYLHTHIHKFIESPDTLPLFLTQGTTYMIPKDDDTANPAKYRPITCLQTFYKIMTSCISEIIYIHLTDNNILAEQQKGSRKNCQGCKEQLTIDSVAMRQARKTKRNIYTMFIDYRKAFDSVPHSWLIQVLTHYKINQTIVDFLQKIMTNWQTNLKINSEVGEVSTAPITIQRGIFQGDALSPLWFCLALNPLSNLLNTTNAGFKLVNNSQLSHSLTHLMYMDDIKLYANNKRELFKLANITQTFSNDIKMQFGIDKCKINSIKKGKVELNSYTLTTGETIEPMDEHSTYKYLGFKQSKCIEQKETKSDLIKKFQQRLTHILKTYLNSRNLIKAINTYAIPILTYSFGIISWSKTDLQKLQTIINVQLTKFRKHHPKSCKQRLTLPRLEGGRKIIDVTNIHNRQITILRKYFHTKSEQSELHKHVTASDIKLTPLNLSNKNIQPNESLTQATEKIEIWKKKSLHGRHRKDLDQSHIDKNWSNAWLKRGELFPETEAFMIAIQDQVINTRNYKKYILKERNLPTDMCRHCSSASETIQHITGACKTIVQTDYKHRHDQVASIIHQHFAHKNKFIEQKSPYYKYIPEKILDSNAIKIYWDRTIITDKTVYFNRPDITIHDKQDGTVYLIDIAIPNTHNIQATHTEKMNKYKDLAVEIKTQWRANTVKIVPIIISTTGVIPKTIMTSLKILNIPTYLIHIIQKAVILNTCRITRKFLQSDLSQNTL

SEQ ID NO: 1830 - protein, 897 aa, Ypsolopha scabrella
MTQYAQGNRSRNVILFVEDIKRRHGTHAQYENVNTTTQEYLDTLKQKLNAASSRLRRYKTCTLRKSQNTLFRNNEKQFYRSSLNTRQQTQIPHDTPTPQELHSFWSKIWSNPLEHNRNAEWIDKQSNEVNHITQMKFDTIPIETYVKLINKTHNWKAPGSDKIHNYWYKKLKSVQPYLHTHIHKFIESPDTLPLFLTQGTTYMIPKDDDTANPAKYRPITCLQTFYKIMTSCISEIIYTHLTDNNILAEQQKGSRKNCQGCKEQLTIDSVAMRQARKTKRNIYTMFIDYRKAFDSVPHSWLIQVLTHYKINQTIVDFLQKIMINWQTNLKINSEVGEVSTAPITIQRGIFQGDALSPLWFCLALNPLSNLLNTTNAGFKLVNNSQLSHSLTHLMYMDDIKLYANNKRELFKLANITQTFSNDIKMQFGIDKCKINSIKKGKVELNSYTLTTGETIEPMDEHSTYKYLGFKQSKCIEQKETKSDLIKKFKQRLTHILKTYLNSRNLIKAINTYAIPILTYSFGIISWSKTDLQKLQTIINVQLTKFRKHHPKSCKQRLTLPRLEGGRKIIDITNIHNRQITILRKYFHTKSEQSELHKHVTASDVKLTPLNLSNKNIQPNESLTQATEKIEIWKKKSLHGRHRKDLDQSHIDKNWSNAWLKRGELFPETEAFMIAIQDQVINTRNYKKYILKERNLPTDMCRHCSSASETIQHITGACKTIVQTDYKHRHDQVASIIHQHFAHKNKFIEQKSPYYKYIPEKIVDSNAIKIYWDRTIITDKTVYFNRPDITIHDKQDGTVYLIDIAIPNTHNIQATHTEKMNKYKDLAVEIKTQWRANTVKIVPIIISTTGVIPKTILTSLKILNIPTYLIHIIQKAVILNTCRITRKFLQADLSQNTL

SEQ ID NO: 1831 - protein, 1292 aa, Ypsolopha scabrella
MSSSSSQNDEAADVVQEAYADNPEPTVAQKRTRRRWSEETNTFIWRTYLEITMLEADTRRFLDKLYDAFIHKFPEIQVSKQRIGDQRRAIVQNNLLPKNTLNQIRKQVEESLNKTQNLPNNTVYTQNTIRPTQGRSLTRMRWSNETNESIMKIYYRITELEKNKTAYRQQLYSKFIESYPELSHISEQRLADQRRAIIKNKYIPDYRLEEIKNEVEIEITNDNSMRTQNSITREEEASQITENLTDLTNNNLNEQIIILINTQQHSVQQTSKQTELTDENAQRELTEIFEETLEKYKDTDPIQRPYIPKQKSTKKLAQLTQYIDNTILPKYLNSEQDFFTLHTLIYCAAFTVATCNGTKIFVSNTQFKRPKSDRKPSWQTGLEEKIRKLRQDLGRMTQYAQGNRSRNVILFVEDIKRKHGTHAQYENVNTTTQEYLDTLKQKLNAASSRLRRYKTCTLRKSQNTLFRNNEKQFYRSSLNTRQQTQIPHDTPTPQELHSFWSKIWSNRLEHNRNAEWIDKQSNEVNHITQMKFDTIPIETYVKVINKTHNWKAPGSDKIHNYWYKKLKSVQPYLHTHIHKFIESPDTLPLFLTQGTTYMIPKDDDTANPAKYRPITYLQTFYKIITSCISEIIYTHLTDNNILAEQQKGSRKNCQGCKKQLTIDSVAMRQARKTKRNIYTMFIDYRKAFDSVPHSWLIQVLTHYKINQTIVDFLQKIMTNWQTNLKINSEVGEVFASPITIQRGIFQGDALSPLWFCLALNPLSNLLNTTNAGFKLVNNSQLSHSLTHLMYMDDIKLYANNKRELFKLANITQTFSNDIKMQFGIDKCEINSIKKGKVELNSYTLTTGETIEPMDEHSTYKYLGFKQSKCIEQKETKSDLIKKFKQRLTYILKTYLNSRNLIKAINTYAIPILTYSFGIISWSKTDLQKLQTIINVQLTKFRKHHPKSCKQRLTLPRLEGGRKIIDITNIHNRQITILRKYFHTKSEQSELNKHVTASDIKLTPLNLSNKNIQPNESLTQATEKIEIWKKKSLHGRHRKDLDQSHIDKNWSNAWLKRGELFPETEAFMIAIQDQVINTRNYKKYILKERNLHTDMCRHCSSASETIQHITGACKTIVQTDYKHRHDQVASIIHQHFAHKNKFIEQKSPYYKYIPEKILDSNAIKIYWDRTIITDKTVYFNRPDITIHDKQDGTVYLIDIAIPNTHNIQATHTEKMNKYKDLAVEIKIQWRANTVKIVPIIISTTGVIPKTILTSLKILNIPTYLIHIIQKAVILNTCRITRKFLQADLSQNTL

SEQ ID NO: 1832 - protein, 966 aa, Ypsolopha scabrella
MSQTAGPSTGPGPGVYNNDPSPDFLTCPECPPDRTFKGKRGLNIHITKSHKLSQLSPQISQTVTDQVPDAGTQRGDEPFHQILTKFKNFHPIVKRIPRGARISVARKLSDIISNVVKENSECAWESLLRFSYETLHVNDRVRKQSTLTQGIKNNCINPPLFTETLKKFHVNSRYKKVENKISDGDIRGAAQLLFSSDDIAPDSPETLAILQSKHPPASAATSLPQAPQPGDPQIQVLGKDVLAAIMSFKNGTAGGVDGLSPQHLKDLLCGTTGQAGETLLSNITSLVNLMLAGKVNWEISSILYGANLYALKKKDGGIRPIAVGTTFRRLVSKLCCRHIAPKLTEYLQPTQLGFGSKGGCEAAVHALRTYIEQNGGEVVLKVDIQNAFNAVDRGALLKEVKEVIPEIFPYLWQCYSQSSKLLYQDHLLLSSVGCQQGDPLGPAIFSLAIHKIITSMHSNLNMWYLDDGTLGGDSKTVLNDLRDLSEKFRLIGLELNSSKCEIFITDTVPDTQKTSIYDDFNSLAPNIKILDKCSLRLLGAPILKDSMPQFLDNEKSKFFDTIPHLTKINSHMAFQIIKYCLFVPCFTFVLRSSPMFNLKNLLSTVDSLIQVALTRVLNLPITDRCWLQASLPIRFGGLGIRKVSDVALPAFLSSIHSTETLYKKLIQPSLVDIEVSCCDEAKQAWSVACPCEDVPDNFSSQRQWDEPCCKLQQKNLLASSRNITERARLLAVAEHESGLWLHALPSTNIGTLLDDRSFTTAVGLRIGASLTEPHHCPCGASVCRAGLHGLSCQRSAGRLSRHAALNDVIRRALVSVGAPATLEPPGVVRDDGKRPDGMTLIPWKHGRPLVWDATCVDTLAPSHVSMSSRAAGSAVAAAELSKGRKYAAIGSSYMFTPFGVETMGTWGPEARQFIKDLSVKLIDTSGDRRAGSYLGQRISLAIQRGNAASILGTLPQGSDLEAIFFL

SEQ ID NO: 1833 - protein, 968 aa, Ypsolopha scabrella
MSQTAGPSTGPGPGVYNNDPSPDFLTCPECPPDRTFKGKRGLNIHITKSHKPSQLSPQISQTVTDQEPDAGTQRGDEPFHQILTKFKNFHPIVKRIPRGARISVARKLSDIISNVVKENSECAWESLLRFSYETLHVNDRVRKQSSLTQGIKNNCINPPLFTETLKKFHVNSIGRYKKVENKISDGDIRGAAQLLFSSDDIAPDSPETLAILQSKHPPASAATSLPQAPQPGDPQIQVLGKDVLAAIMSFKNGTAGGVDGLSPQHLKDLLCGTTGQAGETLLSNITSLVNLMLAGKVNWEISSILYGANLYALKKKDGGIRPIAVGTTFRRLVSKLCCRHITPKLTEYLQPTQLGFGSKGGCEAAVHALRTYIEQNGGEVVLKVDIQNAFNAVDRGALLKEVKEVIPEIFPYLWQCYSQSSKLLYQDHLLLSSVGCQQGDPLGPAIFSLAIHKIITSMHSNLNMWYLDDGTLGGDSKTVLNDLRDLSEKFRLIGLELNSSKCEIFITDTVPDTQKTSIYDDFNSLAPNIKILDKCSLRLLGAPILKDSMPQFLDNEKSKFFDTIPHLTKINSHMAFQIIRYCLFVPCFTFVLRSSSMFKLKNLLSTVDSLIQVALTRVLNLPITDRCWLQASLPIRFGGLGIRKVSDVALPAFLSSIHSTETLYKKLIQPSLVDIEVSCCDEAKQAWSVACPCEDVPDNFSSQRQWDEPCCKLQQKKLLASSRNITERARLLAVAEHESGLWLHALPSANIGTLLDDRSFTTAVGLRIGASLTEPHHCPCGASVCRAGLHGLSCQRSAGRLSRHAALNDVIRRALVSVGAPATLEPPGVVRDDGKRPDGMTLIPWKHGRPLVWDATCVDTLAPSHVSMSSRAAGSAAAAAELSKGRKYAAIGSSYMFTPFGVETMGTWGPEARQFIKDLSVKLIDTSGDRRAGSYLGQRISLAIQRGNAASILGTLPQGSDLEAIFFL

SEQ ID NO: 1834 - protein, 966 aa, Ypsolopha scabrella
MSQTAGPSTGPGPGVYNNDPSPDFLTCPECPPDRTFKGKRGLNIHITKSHKPSQLSPQISQTVTDQEPDAGTQRGDEPFHQILTKFKNFHPIVKRIPRGARISVARKLSDIISNVVKENSECAWESLLRFSYETLHVNDRVRKQSSLTQGIKNNCINPPLFTETLKKFHVNSRYKKVENKISDGDIRGAAQLLFSSDDIAPDSPETLAILQSKHPPASAATSLPQAPQPGDPQIQVLGKDVLAAIMSFKNGTAGGVDGLSPQHLKDLLCGTTGQAGETLLCNITSLVNLMLAVKVNWEISSILYGANLYALKKKDGGIRPIAVGTTFRRLVSKLCCRHITPKLTEYLQPTQLGFGSKGGCEAAVHALRTYIEQNGGEVVLKVDIQNAFNAVDRGALLKEVKEVIPEIFPYLWQCYSQSSKLLYQDHLLLSSVGCQQGDPLGPAIFSLAIHKIITSMHSNLNMWYLDDGTLGGDSKTVLNDLRDLSEKFRLIGLELNSSKCEIFITDTVPDTQKTSIYDDFNSLAPNIKILDKCSLRLLGAPILKDSMPQFLDNEKSKFFDTIPHLTKINSHMAFQIIRYCLFVPCFTFVLRSSPMFKLKNLLSTVDSLIQVALTRVLNLPITDRCWLQASLPIRFGGLGIRKVSDVALPAFLSSIHSTETLYKKLIQPSLVDIEVSCCDEAKQAWSVACPCEDVPDNFSSQRQWDEPCCKLQQKKLLASSRNITERARLLAVAEHESGLWLHALPSANIGTLLDDRSFTTAVGLRIGASLTEPHHCPCGASVCRAGLHGLSCQRSAGRLSRHAALNDVIRRALVSVGAPATLEPPGVVRDDGKRPDGMTLIPWKHGRPLVWDATCVDTLAPSHVSMSSRAAGSAAAAAELSKGRKYAAIGSSYMFTPFGVETMGTWGPEARQFIKDLSVKLIDTSGDRRAGSYLGQRISLAIQRGNAASILGTLPQGSDLEAIFFL

SEQ ID NO: 1835 - protein, 966 aa, Ypsolopha scabrella
MSQTAGPSTGPGPGVYNNDPSPDFLTCPECPPDRTFKGKRGLNIHITKSHKLSQLSPQISQTVTDQVPDAGTQRGDEPFHQILTKFKNFHPVVKRIPRGARISVARKLSDIISNVVKENSECAWESLLRFSYETLHVNDRVRKQSTLTQGIKNNCINPPLFTETLKKFHVNSRYKKVENKISDGDIRGAAQLLFSSDDIAPDSPETLAILQSKHPPASAATSLPQAPQPGDPQIRVLGKDVLAAIMSFKNGTAGGVDGLSPQHLKDLLCGTTGQAGETLLSNITSLVNLMLAGKVNWEISSILYGANLYALKKKDGGIRPIAVGTTFRRLVSKLCCRHIAPKLTEYLQPTQLGFGSKGGCEAAVHALHTYIEQNGGEVVLKVDIQNAFNAVDRGALLKEVKEVIPEIFPYLWQCYSQSSKLLYQDHLLLSSVGCQQGDPLGPAIFSLAIHKIITSMHSNLNMWYLDDGTLGGDSKTVLNDLRDLSEKFRLIGLELNSSKCEIFITDTVPDTQKTSIYDDFNSLAPNIKILDKCSLRLLGAPILKDSMPQFLDNEKSKFFDTIPHLTKINSHMAFQIIRYCLFVPCFTFVLRSSPMFKLKNLLSTVDSLIQVALTQVLNLPITDRCWLQASLPIRFGGLGIRKVSDVALPAFLSSIHSTETLYKKLIQPSLVDIEVSCCDEAKQAWSVACPCEDVPDNFSSQRQWDEPCCKLQQKKLLASSRNITERARLLAVAEHESGLWLHALPSTNIGTLLDDRSFTTAVGLRIGASLTEPHHCPCGASVCRAGLHGLSCQRSAGRLSRHAALNDVIRRAPVSVGAPATLEPPGVVRDDGKRPDGMTLIPWKHGRPLVWDATCVDTLAPSHVSMSSRAAGSVAAAAELSKGRKYAAIGSSYMFTPFGVETMGTWGPEARQFIKDLSVKLIDTSGDRRAGSYLGQRISLAIQRGNAASILGTLPQGSDLEAIFFL

SEQ ID NO: 1836 - protein, 966 aa, Ypsolopha scabrella
MSQTAGPSTGPGPGVYNNNPSPDFLTCPECPPDRTFKGKRGLNIHITKSHKPSQLSPQISQTVTDQEPDAGTQRGDEPFHQILTKFKNFHPIVKRIPRGARISVARKLSDIISNVVKENSECAWESLLRFSYETLHVNDRVRKQSSLTQGIKNNCINPPLFTETLKKFHVNSRYKKVENKISDGDLRGAAQLLFSSDDIAPDSPETLAILQSKHPPASAATSLPQAPQPGDPQIQVLGKDVLAAIMSFKNGTAGGVDGLSPQHLKDLLCGTTGQAGETLLSNITSLVNLMLAGKVNWEISSILYGANLYALKKKDGGIRPIAVGTTFRRLVSKLCCRHITPKLTEYLQPTQLGFGSKGGCEAAVHALRTYIEQNGGEVVLKVDIQNAFNAVDRGALLKEVKEVIPEIFPYLWQCYSQSSKLLYQDHLLLSSVGCQQGDPLGPAIFSLAIHKIITSMHSNLNMWYLDDGTLGGDSKTVLNDLRDLSEKFRLIGLELNSSKCEIFITDTVPDTQKTSIYDDFNSLAPNIKILDKCSLRLLGAPILKDSMPQFLDNEKSKFFDTIPHLTKINSHMAFQIIRYCLFVPCFTFVLRSSPMFKLKNLLSTVDSLIQVALTRVLNLPITARCWLQASLPIRFGGLGIRKVSDVALPAFLSSIHSTETLYKKLIQPSLVDIEVSCCDEAKQAWSVACPCEDVPDNFSSQRQWDEPCCKLQQKKLLASSRNITERARLLAVAEHESGLWLHALPSANIGTLLDDRSFTTAVGLRIGASLTEPHHCPCGASVCRAGLHGLSCQRSAGRLSRHAALNDVIRRALVSVGAPATLEPPGVVRDDGKRPDGMTLIPWKHGRPLVWDATCVDTLAPSHVSMSSRAAGSAAAAAELSKGRKYAAIGSSYMFTPFGVETMGTWGPEARQFIKDLSVKLIDTSGDRRAGSYLGQRISLAIQRGNAASILGTLPQGSDLEAIFFL

SEQ ID NO: 1837 - protein, 966 aa, Ypsolopha scabrella
MSQTAGPSTGPGPGVYNNDPSPDFLTCPECPPDRTFKGKRGLNIHITKSHKLSQLSPQISQTVTDQVPDAGTQRGDEPFHQILTKFKNFHPIVKRIPRGARISVARKLSDIISNVVKENSECAWESLLRFSYETLHVNDRVRKQSTLTQGIKNNCINPPLFTETLKKFHVNSRYKKVENKISDGDIRGAAQLLFSSDDIAPDSPETLAILQSKHPPASAATSLPQAPQPGDPQIQVLGKDVLAAIMSFKNGTAGGVDGLSPQHLKDLLCGTTGQAGETLLSNITSLVNLMLAGKVNWEISSILYGANLYALKKKDGGIRPIAVGTTFRRLVSKLCCRHIAPKLTEYLQPTQLGFGSKGGCEAAVHALRTYIEQNGGEVVLKVDIQNAFNAVDRGALLKEVKEVIPEIFPYLWQCYSQSSKLLYQDHLLLSSVGCQQGDPLGPAIFSLAIHKIITSMHSNLNMWYLDDGTLGGDSKTVLNDLRDLSEKFRLIGLELNSSKCEIFITDTVPDTQKTSIYDDFNSLAPNIKILDKCSLRLLGAPILKDSMPQFLDNEKSKFFDTIPHLTKINSHMAFQIIRYCLFVPCFTFVLRSSPMFKLKNLLSTVDSLIQVALTRVLSIPITDRCWLQASLPIRFGGLGIRKVSDVALPAFLSSIHSTETLYKKLIQPSLVDIEVSCCDEAKQAWSVACPCEDVPDNFSSQRQWDEPCCKLQQKKLLASSRNITERARLLAVAEHESGLWLHALPSTNIGTLLDDRSFTTAVGLRIGASLTEPHHCPCGASVCRAGLHGLSCQRSAGRLSRHAALNDVIRRALVSVGAPATLEPPGVVRDDGKRPDGMTLIPWKHGRPLVWDATCVDTLAPSHVSMSSRAAGSAAAAAELSKGRKYAAIGSSYMFTPFGVETMGTWGPEARQFIKDLSVKLIDTSGDRRAGSYLGQRISLAIQRGNAASILGTLPQGSDLEAIFFL

SEQ ID NO: 1838 - protein, 966 aa, Ypsolopha scabrella
MSQTAGPSTGPGPGVYNNDPSPDFLTCPECPPDRTFKGKRGLNIHITKSHKPSQLSPQISQTVTDQEPDAGTQRGDEPFHQILTKFKNFHPIVKRIPRGARISVARKLSDIISNVVKENSECAWESLLRFSYETLHVNDRVRKQSSLTQGTKNNCINPPLFTETLKKFHVNSRYKKVENKISDGDIRGAAQLLFSSDDIAPDSPETLAILQSKHPPASAATSLPQAPQPGDPQIQVLGKDVLAAIMSFKNGTAGGVDGLSPQHLKDLLCGTTGQAGETLLSNITSLVNLMLAGKVNWEISSILYGANLYALKKKDGGIRPIAVGTTFRRLVSKLCCRHITPKLTEYLQPTQLGFGSKGGCEAAVHALRTYIEQNGGEVVLKVDIQNAFNAVDRGSLLKEVKEVIPEIFPYLWQCYSQSSKLLYQDHLLLSSVGCQQGDPLGPAIFSLAIHKIITSMHSNLNMWYLDDGTLGGDSKTVLNDLRDLSEKFRLIGLELNSSKCEIFITDTVPDTQKTSIYDDFNSLAPNIKILDKCSLRLLGAPILKDSMPQFLDNEKSKFFDTIPHLTKINSHMAFQIIRYCLFVPCFTFVLRSSPMFKLKNLLSTVDSLIQVALTRVLNLPITDRCWLQASLPIRFGGLGIRKVSDVALPAFLSSIHSTETLYKKLIQPSLVDIEVSCCDEAKQAWSVACPCEDVPDNFSSQRQWDEPCCKLQQKKLLASSRNITERARLLAVAEHESGLWLHALPSANIGTLLDDRSFTTAVGLRIGASLTEPHHCPCGASVCRAGLHGLSCQRSAGRLSRHAALNDVIRRALVSVGAPATLEPPGVVRDDGKRPDGMTLIPWKHGRPLVWDATCVDTLAPSHVSMSSRAAGLAAAAAELSKGRKYAAIGSSYMFTPFGVETMGTWGPEARQFIKDLSVKLIDTSGDRRAGSYLGQRISLAIQRGNAASILGTLPQGSDLEAIFFL

SEQ ID NO: 1839 - protein, 966 aa, Ypsolopha scabrella
MSQTAGPSTGPGPGVYNNDPSPDFLTCPECPPDRTFKGKRGLNIHITKSHKPSQLSPQISQTVTDQEPDAGTQRGDEPFHQILTKFKNFHPIVKRIPRGARISVARKLSDIISNVVKENSECAWESFLRFSYETLHVNDRVRKQSSLTQGIKNNCINPPLFTETLKKFHVNSRYKKVENKISDGDIRGAAQLLFSSDDIAPDSPETLAILQSKHPPASAATSLPQAPQPGDPQIQVLGKDVLAAIMSFKNGTAGGVDGLSPQHLKDLLCGTTGQAGETLLSNITSLVNLMLAGKVNWEISSILYGANLYALKKKDGGIRPIAVGTTFRRLVSKLCCRHITPKLTEYLQPTQLGFGSKGGCEAAVHALRTYIEQNGGEVVLKVDIQNAFNAVDRGALLKEVKEVIPEIFPYLWQCYSQSSKLLYQDHLLLSSVGCQQGDPLGPAIFSLAIHKIITSMHSNLNMWYLDDGTLGGDSKTVLNDLRDLSEKFRLIGLELNSSKCEIFITDTVPDTQKTSIYDDFNSLAPNIKILDKCSLRLLGAPILKDSMPQFLDNEKSKFFDTIPHLTKINSHMAFQIIRYCLFVPCFTFVLRSSPMFKLKNLLSTVDSLIQVALTRVLNLPITDRCWLQASLPIRFGGLGIRKVSDVALPAFLSSIHSTETLYKKLIQPSLVDIEVSCCDEAKQAWSVACPCEDVPDNFSSQRQWDEPCCKLQQKKLLASSRNITERARLLAVAEHESGLWLHALPSANIRTLLDDRSFTTAVGLRIGASLTEPHHCPCGASVCRAGLHGLYCQRSAGRLSRHAALNDVIRRALVSVGAPATLEPPGVVRDDGKRPDGMTLIPWKHGRPLVWDATCVDTLAPSHVSMSSRAAGSAAAAAELSKGRKYSAIGSSYMFTPFGVETMGTWGPEARQFIKDLSVKLIDTSGDRRAGSYLGQRISLAIQRGNAASILGTLPQGSDLEAIFFL

SEQ ID NO: 1840 - protein, 966 aa, Ypsolopha scabrella
MSQTAGPSTGPGPGVYNNDPSPDFLTCPECPPDRTFKGKRGLNIHITKSHKPSQLSPQISQTVTDQEPDAGTQRGDEPFHQILTKFKNFHPIVKRIPRGARISVARKLSDIISNVVKENSECAWESLLRFSYETLHVNDRVRKQSSLTQGIKNNCINPPLFTETLKKFHVNSRYKKVENKISDGDIRGAAQLLFSSDDIAPDSPETLAILQSKHPPASAATSLPQAPQPGDPQIQVLGKDNLTAIMSFKNGTAGGVDGLSPQHLKDLLCDTTGQAGETLLSNITSLVNLMLAGKVNWEISSILYGANLYALKKKDGGIRPIAVGTTFRRLVSKLCCRHITPKLTEYLQPTQLGFGSKGGCEAAVHALRTYIEQNGGEVVLKVDIQNAFNAVDRGALLKEVKEVIPEIFPYLWQCYSQSSKLLYQDHLLLSSVGCQQGDPLGPAIFSLAIHKIITSMHSNLNMWYLDDGTLGGDSKTVLNDLRDLSEKFRLIGLELNSSKCEIFITDTVPDTQKTSIYDDFNSLAPNIKILDKCSLRLLGAPILKDSMPQFLDNEKSKFFDTIPHLTKINSHMAFQIIRYCLFVPCFTFVLRSSPMFKLKNLLSTVDSLIQVALTRVLNLPITDRCWLQASLPIRFGGLGIRKVSDVALPAFLSSIHSTETLYKKLIQPSLVDIEVSCCDEAKQAWSVACPCEDVPDNFSSQRQWDEPCCKLQQKKLLASSRNITERARLLAVAEHESGLWLHALPSANIGTLLDDRSFTTAVGLRIGASLTEPHHCPCGASVCRAGLHGLSCQRSAGRLSRHAALNDVIRRALVSVGAPATLEPPGVVRDDGKRPDGMTLIPWKHGRPLVWDATCVDTLAPSHVSMSSRAAGSAAAAAELSKGRKYAAIGSSYMFTPFGVETMGTWGPEARQFIKDLSVKLIDTSGDRRAGSYLGQRISLAIQRGNAASILGTFPQGSDLEAIFFL

SEQ ID NO: 1841 - protein, 966 aa, Ypsolopha scabrella
MSQTAGPSTGPGPGVYNNDPSPDFLTCPECPPDRTFKGKRGLNIHITKSHKPSQLSPQISQTVTDQEPDAGTQRGDEPFHQILTKFKNFHPIVKRIPRGARISVARKLSDIISNVVKENSECAWESLLRFSYETLHVNDRVRKQSSLTQGIKNNCINPPLFTETLKKFHVNSRYKKVENKISDGDIRGAAQLLFSSDDIAPDSPETLAILQSKHPPASAVTSLPQAPQPGDPQIQVLGKDVLAAIMSFKNGTAGGVDGLSPQHLKDLLCGTTGQAGETLLSNITSLVNLMLAGKVNWEISSILYGANLYALKKKDGGIRPIAVGTTFRRLVSKLCCRHITPKLTEYLQPTQLGFGSKGGCEAAVHALRTYIEQNGGEVVLKVDIQNAFNAVDRGALLKEVKEVIPEIFPYLWQCYSQSSKLLYQDHLLLSSVGCQQGDPLGPAIFSLAIHKIITSMHSNLNMWYLDDGTLGGDSKTVLNDLRDLSEKFRLIGLELNSSKCEIFITDTVPDTQKTSIYDDFNSLAPNIKILDKCSLRLLGAPILKDSMPQFLDNEKSKFFDTIPHLTKINSHMAFQIIRYCLFVPCFTFVLRSSPMFKLKNLLSTVDSLIQVALTRVLNLPITDRCWLQASLPIRFGGLGIRKVSDVALPAFLSSIHSTETLYKKLIQPSLVDIEVSCCDEAKQAWSVACPCEDVPDNFSSQRQWDEPCCKLQQKKLLASSRNITERARLLAVAEHKSGLWLHALPSANIGTLLDDRSFTTAVGLRIGASLTEPHHCPCGASVCRAGLHGLSCQRSAGRLSRHAALNDVIRRALVSVGAPATLEPPGVVRDDGKRPDGMTLIPWKHGRPLVWDATCVDTLAPSHVSMSSRAAGSAAAAAELSKGRKYAAIGSSYMFTPFGVETMGTWGPEARQFIKDLSVKLIDTSGDRRAGSYLGQRISLAIQRGNAASILGTLPQGSDLEAFFFL

SEQ ID NO: 1842 - protein, 721 aa, Ypsolopha scabrella
MSFKNDTAGGVDGLSPQHLKDLLCGTTGQAGETLLSNITSLVNLMLAGKVNWEISSILYGANLYALKKKDGGIRPIAVGTTFRRLVSKLCCRHITPKLTEYLQPTQLGFGSKGGCEAAVHALRTYIEQNGGEVVLKVDIQNAFNAVDRGALLKEVKEVIPEIFPYLWQCYSQSSKLLYQDHLLLSSVGCQQGDPLGPAIFSLAIHKIITSMHSNLNMWYLDDGTLGGDSKTVLNDLRDLSEKFRQIGLELNSSKCEIFITDTVPDTQKTSIYDDFNSLAPNIKILDKCSLRLLGAPILKDSMPQFLDNEKSKFFDTIPHLTKINSHMAFQIIRYCLFVPCFTFVLRSSPMFKLKNLLSTVDSLIQVALTRVLNLPITDRCWLQASLPIRFGGLGIRKVSDVALPAFLSSIHSTETLYKKLIQPSLVDIEVSCCGEAKQAWSVACPCEDVPDNFSSQRQWDEPCCKLQQKKLLASSRNITERARLLAVAEHESGLWLHALPSANIGTLLDDRSFTTAVGLRIGASLTEPHHCPCGASVCRAGLHGLSCQRSAGRLSRHAALNDVIRRALVSVGAPATLEPPGVVRDDGKRPDGMTLIPWKHGRPLVWDATCVDTLAPSHVSMSSRAAGSAAAAAELSKGRKYAAIGSSYMFTPFGVETMGTWGPEARQFIKDLSVKLIDTSGDRRAGSYLGQRISLAIQRGNAASILGTLPQGSDLEAIFFL

SEQ ID NO: 1843 - protein, 966 aa, Ypsolopha scabrella
MSQTAGPSTGPGPGVYNNDPSPDFLTCPECPPDRTFKGKSGLNIHITKSHKPSQLSPQISQTVTDQEPDAGTQRGDEPFHQILTKFKNFHPIVKRIPRGARISVARKLSDIISNVVKENSECAWESLLRFSYETLHVNDRVRKQSSLTQGIKNNCINPPLFTETLKKFHVISRYKKVENKISDGDIRGAAQLLFSSDDIAPDSPETLAILQSKHPPASAATSLPQAPQPGDPQIQVLGKDVLAAIMSFKNGTAGGVDGLSPQHLKDLLCGTTGQAGETLLSNITSLVNLMLAGKVNWEISSILYGANLYALKKKDGGIRPIAVGTTFRRLVSKLCCRHITPKLTEYLQPTQLGFGSKGGCEAAVHALRTYIEQNGGEVVLKVDIQNAFNAVDRGALLKEVKEVIPEIFPYLWQCYSQSSKLLYQDHLLLSSVGCQQGDPLGPAIFSLSIHKIITSMHSNLNMWYLDDGTLGGDSKTVLNDLRDLSEKFRLIGLELNSSKCEIFITDTVPDTQKTSIYDDFNSLAPNIKILDKCSLRLLGAPILKDSMPQFLDNEKSKFFDTIPHLTKINSHMAFQIIRYCLFVPCFTFVLRSSPMFKLKNLLSTVDSLIQVALTRVLNFPITDRCWLQASLPIRFGGLGIRKVSDVALPAFLSSIHSTETLYKKLIQPSLVDIEVSCCDEAKQAWSVACPCEDVPDNFSSQRQWDEPCCKLQQKKLLASSRNITERARLLAVAEHESGLWLHALPSANIGTLLDDRSFTTAVGLRIGASLTEPHHCPCGASVCRAGLHGLSCQRSAGRLSRHAALNDVIRRALVSVGAPATLEPPGVVRDDGKRPDGMTLIPWKHGRPLVWDATCVDTLAPSHVSMSSRAAGSAAAAAELSKGRKYAAIGSSYMFTPFGVETMGTWGPEARQFIKDLSVKLIDTSGDRRAGSYLGQRISLAIQRGNAASILGTLPQGSDLEAIFFL

SEQ ID NO: 1844 - protein, 721 aa, Ypsolopha scabrella
MSFKNGTAGGVDGLSPQHLKDLLCGTTGQAGETLLSNITSLVNLMLAGKVNWEISSILYGANLYALKKKDGGIRPIAVGTTFRRLVSKLCCRHITPKLTEYLQPTQLGFGSKGGCKAAVHALRTYIEQNGGEVVLKVDIQNAFNAPDRGALLKEVKEVIPEIFPYLWQCYSQSSKLLYQDHLLLSSVGCQQGDPLGPAIFSLAIHKIITSMHSNLNMWYLDDGTLGGDSKTVLNDLRDLSEKFRLIGLELNSSKCEIFITDTIPDTQKTSIYDDFNSLAPNIKILDKCSLRLLGAPILKDSMPQFLDNEKSKFFDTIPHLTKINSHMAFQIIRYCLFVPCFTFVLRSSPMFKLKNLLSTIDSLIQVALTRVLNLPITDRCWLQASLPIRFGGLGIRKVSDVALPAFLSSIHSTETLYKKLIQPSLVDIEVSCCDEAKQAWSVACPCEDVPDNFSSQRQWDEPCCKLQQKKLLASSRNITERARLLAVAEHESGLWLHALPSANIGTLLDDRSFTTAVGLRIGASLTEPHHCPCGASVCRAGLHGLSCQRSAGRLSRHAALNDVIRRALVSVGAPATLEPPGVVRDDGKRPDGMTLIPWKHGRPLVWDATCVDTLAPSHVSMSSRAAGSAAAAAELSKGRKYAAIGSSYMFTPFGVETMGTWGPEARQFIKDLSVKLIDTSGDRRAGSYLGQRISLAIQRGNAASILGTLPQGSDLEAIFFL

SEQ ID NO: 1845 - protein, 966 aa, Ypsolopha scabrella
MSQTAGPSTGPGPGVYNNDPSPDFLTCPECPPDRTFKGKRGLNIHITKSHKLSQLSPQISQTVTDQVPDAGTQRGDEPFHQILTKFKNFHPIVKRIPRGARISVARKLSDIISNVVKENSECAWESLLRFSYETLHVNDRVRKQSTLTQGIKNSCINPPLFTETLKKFHVNSRYKKVENKISDGDIRGAAQLLFSSDDIAPDSPETLAILQSKHPPASAATSLPQAPQPGDPQIQVLGKDVLAAIMSFKNGTAGGVDGLSPQHLKDLLCGTTGQAGETLLSNITSLVNLMLAGKVNWEISSILYGANLYALKKKDGGIRPIAVGTTFRRLVSKLCCQHIAPKLTEYLQPTQLGFGSKGGCEAAVHALRTYIEQNGGEVVLKVDIQNAFNAVDRGALLKEVKEVIPDIFPYLWQCYSQSSKLLYQDHLLLSSVGCQQGDPLGPAIFSLAIHKIITSMHSNLNMWYLDDGTLGGDSKTVLNDLRDLSEKFRLIGLELNSSKCEIFITDTVPDTQKTSIYDDFNSLAPNIKILDKCSLRLLGAPILKDSMPQFLDNEKSKFFDTIPHLTKINSHMAFQIIRYCLFVPCFTFVLRSSPMFKLKNLLSTVDSLIQVALTRVLNLPITDRCWLQASLPIRFGGLGIRKVSDVALPAFLSSIHSTETLYKKLIQPSLVDIEVSCCDEAKQAWSVACPCEDVPDNFSSQRQWDEPCCKLQQKKLLASSRNITERARLLAVAEHESGLWLHALPSTNIGTLLDDRSFTTAVGLRIGASLTEPHHCPCGASVCRAGLHGLSCQRSAGRLSRHAALNDVIRRALVSVGAPATLEPPGVVRDDGKRPDGMTLIPWKHGRPLVWDATCVDTLAPSHVSMSSRAAGSAAAAAELSKGRKYAAIGSSYMFTPFGVETMGTWGPEAQQFIKDLSVKLIDTSGDRRAGSYLGQRISLAIQRGNAASILGTLPQGSDLEAIFFL

SEQ ID NO: 1846 - protein, 966 aa, Ypsolopha scabrella
MSQTAGPSTGPGPGVYNNDPSPDFLTCPECPPDRTFKGKRGLNIHITKSHKLSQLSPQISQTVTDQLPDAGTQRGDEPFHQILTKFKNFHPIVKRIPRGARISVARKLSDIISNVVKENSECAWESLLRFSFETLHVNDRVKKQSTLTQGIKNNCINPPLFTETLKKFHVNSRYKKVENKISDGDIRGAAQLLFSSDDIAPDSPETLAILQSKHPPASAATSLPQAPQPGDPQIQVLGKDVLAAIMSFKNGTAGGVDGLSPQHLKDLLCGTTGQAGETLLSNITSLVNLMLAGKVNWEISSILYGANLYALKKKDGGIRPIAVGTTFRRLVSKLCCRHIAPKLTEYLQPTQLGFGSKGGCEAAVHALRTYIEQNGGEVVLKVDIQNAFNAVDRGALLKEVKEVIPEIFPYLWQCYSQSSKLLYQDHLLLSSVGCQQGDPLGPAIFSLAIHKIITSMHSNLKMWYLDDGTLGGDSKTVLNDLRDLSEKFRLIGLELNSSKCEIFITDTVPDTQKTSIYDDFNSLAPNIKILDKCSLRLLGAPILKDSMPQFLDNEQSKFFDTIPHLTKINSHMAFQIIRYCLFVPCFNFVLRSSPMFKLKNLLSTVDSLIQVALTRVLNLPITDRCWLQASLPIRFGGLGIRKVSDVALPAFLSSIHSTETLYKKLIQPSLVDIEVSCCDEAKQAWSVACPCEDVPDNFSSQRQWDEPCCKLQQKKLLASSRNITERARLLAVAEHESGLWLHALPSTNIGTLLDDRSFTTAVGLRIGASLTEPHHCPCGASVCRAGLHGLSCQRSAGRLSRHAALNDVIRRALVSVGAPATLEPPGVVRDDGKRPDGMTLIPWKHGRPLVWDATCVDTLAPSHVSMSSRAAGSAAAAAELSKGRKYAAIGSSYMFTPFGVETMGTWGPEARQFIKDLSVKLIDTSGDRRAGSYLGQRISLAIQRGNAASILGTLPQGSDLEAIFFL

SEQ ID NO: 1847 - protein, 966 aa, Ypsolopha scabrella
MSQTAGPSTGPGPGVYNNDPSPDFLTCPECPPDRTFKGKRGLNIHITKSHKPSQLSPQISQTVTDQEPDAGTQRGDEPFHQILTKFKNFHPIVKRIPRGARISVARKLSDIISNVVKENSECAWESLLRFSYETLHVNDRVRKQSSLTQGIKNNCINPPLFTETLKKFHVNSRYKKVENKISDGDIRGAAQLLFSSDDIAPDSPETLAILQSKHPPASAATALPQAPQPGDPQIQVLGKDVLAAIMSFKNGTAGGVDGLSPQHLKDLLCGTTGQAGETLLSNITSLVNLMLAGKVNWEISSILYGANLYALKKKDGGIRPIAVGTTFRRLVSKLCCRHITPKLTEYLQPTQLGFGSKGGCEAAVHALRTYIEQNGGEVVLKVDIQNAFNAVDRGALLKEVKEVIPEIFPYLWQCYSQSSKLLYQDHLLLSSVGCQQGDPLGPAIFSLAIHKIITSMHSNLNMWYLDDGTLGGDSKTVLNDLRDLSEKFRLIGLELNSSKCEIFITDTVPDTQKTSIYDDFNSLAPNIKILDKCSLRLLGAPILKDSMPQFLDNEKSKFFDTIPHLTKINSHMAFQIIRYCLFVPCFTFVLRSSPMFKLKNLLSTVDSLIQVALTRVLNLPITDRCWLQASLPIRFGGLGIRKVSDVALPAFLSSIHSTETLYKKLIQPSLVDIEVSCCDEAKQAWSVACPCEDVPDNFSSQRQWDEPCCKLQQKKLLASSRNITERARLLAVAEHESGLWLHALPSANIGTLLDDRSFTTAVGLRIGASLTEPHHCPCGASVCRAGLHGLSCQRSAGRLSRHAALNDVIRRALVSVGAPATLEPPGVVRDDGKRPDGMTLIPWKHGRPLVWDATCVDTLAPSHVSMSSRAAGSAAAAAELSKGRKYAAIGSSYMFTPFGVETMGTWGPEARQFIKDLSVKLIDTSGDRRAGSYLGQRISLAIQRGNAASILGTLPQGSDLEAIFFL

SEQ ID NO: 1848 - protein, 966 aa, Ypsolopha scabrella
MSQTAGPSTGPGPGVYNNDPSPDFLTCPECPPDRTFKGKRGLNIHITKSHKPSQLSPQISQTVTDQEPDAGTQRGDEPFHQILTKFKNFHPIVKRIPRGARISVARKLSDIISNVVKENSECAWESLLRFSYETLHVNDRVRKQSSLTQGIKNNCINPPLFTETLKKFHVNSRYKKVENKISDGDIRGAAQLLFSSDDIAPDSPESLAILQSKHPPASAATSLPQAPQPGDPQIQVLGKDVLAAIMSFKNGTAGGVDGLSPQHLKDLLCGTTGQAGETLLSNITSLVNLMLAGKVNWEISSILYGANLYALKKKDGGIRPIAVGTTFRRLVSKLCCRHITPKLTEYLQPTQLGFGSKGGCEAAVHALRTYIEQNGGEVVLKVDIQNAFNAVDRGALLKEVKEVIPEIFPYLWQCYSQSSKLLYQDHLLLSSVGCQQGDPLGPAIFSLAIHKIITSMHSNLNMWYLDDGTLGGDSKTVLNDLRDLSEKFRLIGLELNSSKCEIFITDTVPDTQKTSIYDDFNSLAPNIKILDKCSLRLLGAPILKDSMPQFLDNEKSKFFDTIPHLTKINSHMAFQIIRYCLFVPCFTFVLRSSPMFKLKNLLSTVDSLIQVALTRVLNLPITDRCWLQASLPIRFGGLGIRKVSDVALPAFLSSIHSTETLYKKLIQPSLVDIEVSCCDEAKQAWSVACPCEDVPDNFSSQRQWDEPCCILQQKKLLASSRNITERARLLAVAEHESGLWLHALPSANIGTLLDDRSFTTAVGLRIGASLTEPHYCPCGASVCRAGLHGLSCQRSAGRLSRHAALNDVIRRALVSVGAPATLEPPGVVRDDGKRPDGMTLIPWKHGRPLVWDATCVDTLAPSHVSMSSRAAGSAAAAAELSKGRKYAAIGSSYMFTPFGVETMGTWGPEARQFIKDLSVKLIDTSGDRRAGSYLGQRISLAIQRGNAASILGTLPQGSDLEAIFFL

SEQ ID NO: 1849 - protein, 966 aa, Ypsolopha scabrella
MSQTAGPSTGPGPGVYNNDPSPDFLTCPECPPDRTFKGKRGLNIHITKSHKPSQLSPQISQTVTDQEPDAGTQRGDEPFHQILTKFKNFHPIVKRIPRGARISVARKLSDIISNVVKENSECAWESLLRFSYETLHVNDRVRKQSSLTQGIKNNCINPPLFTETLKKFHVNSRYKKVENKISDGDIRGAAQLLFSSDDIAPDSPETLAILQSKHPPASAATSLPQAPQPGDPQIQVLGKDVLAAIMSFKNGTAGGVDGLSPQHLKDLLCGTTGQAGETLLSNITSLVNLMLAGKVNWEISSILYGANLYALKKKDGGIRPIAVGTTFRRLVSKLCCRHITPKLTEYLQPTQLGFGSKGGCEAAVHALRTYIEQNGGEVVLKVDIQNAFNAVDRGALLKEVKEVIPEIFPYLWQCYSQSSKLLYQDHLLLSSVGCQQGDPLGPAIFSLAIHKIITSIHSNLNMWYLDDGTLGGDSKTVLNDLRDLSEKFRLIGLELNSSKCEIFITDTVPDTQKNSIYDDFNSLAPNIKILDKCSLRLLGAPILKDSMPQFLDNEKSKFFDTIPHLTKINSHMAFQIIRYCLFVPCFTFVLRSSPMFKLKNLLSTVDSLIQVALTRVLNLPITDRCWLQASLPIRFGGLGIRKVSDVALPAFLSSIHSTETLYKKLIQPSLVDIEVSCCDEAKQAWSVACPCEDVPDNFSSQRQWDEPCCKLQQKKLLASSRNITERARLLAVAEHESGLWLHALPSANIGTLLDDRSFTTAVGLRIGASLTEPHHCPCGASVCRAGLHGLSCQRSAGRLSRHAALNDVIRRALVSVGAPATLEPPGVVRDDGKRPDGMTLIPWKHGRPLIWDATCVDTLAPSHVSMSSRAAGSAAAAAELSKGRKYAAIGSSYMFTPFGVETMGTWGPEARQFIKDLSVKLIDTSGDRRAGSYLGQRISLAIQRGNAASILGTLPQGSDLEAIFFL

SEQ ID NO: 1850 - protein, 966 aa, Ypsolopha scabrella
MSQTAGPSTGPGPGVYNNDPSHDFLTCPECPPDRTFKGKRGLNIHITKSHKLSQLSPQISQTVTDQVPDAGTQRGDEPFHQILTKFKNFHPIVKRIPRGARISVARKLSDIISNVVKENSECAWESLLRFSYETLHVNDRVRKQSSLTQGIKNNCINPPLFTETLKKFHVNSRYKKVENKISDGDIRGDAQLLFSSDDIAPDSPETLAILQSKHLPASAATSLPQAPQPGDPQIQVLGKDVLAAIMSFKNGTAGGVDGLSPQHLKDLLCGTTGQAGETLLSNITSLVNLMLAGKVNWEISSILYGANLYALKKKDGGIRPIAVGTTFRRLVSKLCCRHIAPKLTEYLQPTQLGFGSKGGCEAAVHALRTYIAQNGGEVVLKVDIQNAFNAVDRGALLKEVKEVIPEIFPYLWQCYSQSSKLLYQDHLLLSSVGCQQGDPLGPAIFSLAIHKIITSMHSSLNTWYLDDGTLGGDSKTVLNDLRDLSEKFRLIGLELNRSKCEIFITDTVPDTQKTSIYDDFNSLAPNIKILDKCSLRLLGAPILKDSMPQFLDNEKSKFFDTIPHLTKINSHMAVQIIRYCLFVTCFTFVLRSSPMFKLKNLLSTVDSLIQVALTRVLNLPITDRCWLQASLPIRFGGLGIRKVSDVALPAFLSSIHSTETLYKKLIQPSLVDIEVSCCDEAKQAWSVACPCEDFPDNFSSQRQWDEPCCKLQQKKLLASSRNITERARLLAVAEHESGLWLHALPSANIGTLLDDRSFTTAVGLRIGASLTEPHHCPCGASVCRAGLHGLSCQRSAGRLSRHAALNDVIRRALVSVGAPATLEPPGVVRDDGKRPDGMTLIPWKHGRPLVWDATCVDTLAPSHVSMSSRAAGSAAATAELSKGRKYAAIGSSYMFTPFGVETMGTWGPEARQFIKDLSVKLIDTSGDRRAGSYLGQRISIAIQRDNAASILGTLPQGSDLEAIFFL

SEQ ID NO: 1851 - protein, 966 aa, Ypsolopha scabrella
MSQTAGPSTGPGPGVYNNDPSPDFLTCPECPPDRTFKGKRGLNIHITKSHKPSQLSPQISQTVTDQEPDAGTQRGDEPFHQILTKFKNFHPIVKRIPRGARISVARKLSDIISNVVKENSECAWESLLRFSYETLHVNDRVRKQSSLTQGIKNNCINPPLFTETLKKFHVNSRYKKVENKISDGDIRGAAQLLFSSDDIAPDSPETLAILQSKHPPASAATSLPQAPQPGDPQIQVLGKDVLAAIISFKNGTAGGVDGLSPQHLKDLLCGTTGQAGETLLSNITSLVNLMLAGKVNWEISFILYGANLYALKKKDGGIRPIAVGTTFRRLVSKLCCRHITPKLTEYLQPTQLGFGSKGGCEAAVHALRTYIEQNGGEVVLKVDIQNAFNAVDRGALLKEVKEVIPEIFPYLWQCYSQSSKLLYQDHLLLSSVGCQQGDPLGPAIFSLEIHKIITSMHSNLNMWYLDDGTLGGDSKTVLNDLRDLSEKFRLIGLELNSSKCEIFITDTVPDTQKTSIYDDFNSLAPNIKILDKCSLRLLGAPILKDSMPRFLDNEKSKFFDTIPHLTKINSHMAFQIIRYCLFVPCFTFVLRSSPMFKLKNLLSTVDSLIQVALTRVLNLPITDRCWLQASLPIRFGGLGIRKVSVVALPAFLSSIHSTETLYKKLIQPSLVDIEVSCCDEAKQAWSVACPCEDVPDNFSSQRQWDEPCCKLQQKKLLASSRNITERARLLAVAEHESGLWLHALPSANIGTLLDDRSFTTAVGLRIGASLTEPHHCPCGASVCRAGLHGLSCQRSAGRLSRHAALNDVIRRALVSVGAPATLEPPGVVRDDGKRPDGMTLIPWKHGRPLVWDATCVDTLAPSHVSMSSRAAGSAAAAAELSKGRKYAAIGSSYMFTPFGVETMGTWGPEARQFIKDLSVKLIDTSGDRRAGSYLGQRISLAIQRGNAASILGTLPQGSDLEAIFFL

SEQ ID NO: 1852 - protein, 966 aa, Ypsolopha scabrella
MSQTAGPSTGPGPGVYNNDPSPDFLTCPECPPDRTFKGKRGLNIHITKSHKPSQLSPQISQTVTDQEPDAGTQRGDEPFHQILTKFKNFHPIVKRIPRGARISVARKLSDIISNVVKENSECAWESLLRFSYETLHVNDRVRKQSSLTQGIKNNCINPPLFTETLKKFHVNSRYKKVENKISDGDIRGAAQLLFSSDDIAPDSPETLAILQSKHPPASAATSLPQAPQPGDPQIQVLGKDVLAAIMSFKNGTAGGVDGLSPQHLKDLLCGTTGQAGETLLSNITSLVNLMLAGKVNWEISSILYGANLYALKKKDGGIRPIAVGTTFRRLVSKLCCRHITPKLTEYLQPTQLGFGSKGGCEAAVHALRTYIEQNGGEVVLKVDIQNAFNAVDRGALLKEVKEVIPEIFPYLWQCYSQSSKLLYQDHLLLSSVGCQQGDPLGPAIFSLAIHKIITSMHSNLNMWYLDDGTLGGDSKTVLNDLRDLSEKFRLIGLELNSSKCEIFITDTVPDTQKTSIYDDFNSLAPNIKILDKCSLRLLGAPILKDSMPQFLDNEKSKFFDTIPHLTKINSHMAFQIIRYCLFVPCFTFVLRSSPMFKLKNLLSTVDSLIQVALTRVLNLPITDRCWLQASLPIRFGGLGIRKVSDVALPAFLSSIHSTETLYKKLIQPSLVDIEVSCCDEAKQAWSVACPCEDVPDNFSSQRQWDEPCCKLQQKKLLASSRNITERARLLAVAEHESGLWLHALPSANIGTLLDDRSFTTAVGLRIGASLTEPHHCPCGASVCRAGLHGLSCQRSAGRLSRHAALNDVIRRALVSVGAPATLEPPGVVRDDGKRPDGMTLIPWKHGRPLVWDATCVDTLAPSHVSMSSRAAGSAAAAAELSKGRKYAAIGSSYMFTPFGVETMGTWGPEARQFIKDLSVKLIDTSGDRRAGSYLGQRISLAIQRGNAASILGTFPQGSDLEAIFFL

SEQ ID NO: 1853 - protein, 966 aa, Ypsolopha scabrella
MSQTAGPSTGPGPGVYNNDPSPDFLTCPECPPDRTFKGKRGLNIHITKSHKPSQLSPQISQTVTDQEPDAGTQRGDEPFHQILTKFKNFHPIVKRIPRGARISVARKLSDIISNVVKENSECAWESLLRFSYETLHVNDRVRKQSSLTQGIKNNCINPPLFTETLKKFHVNSRYKKVENKISDGDIRGAAQLLFSSDDIAPDSPETLAILQSKHPPASAATSLPQAPQPGDPQIQVLGKDVLAAIMSFKNGTAGGVDGLSPQHLKDLLCGTTGQAGETLLSNITSLVNLMLAGKVNWEISSILYGANLYALKKKDGGIRPIAVGTTFRRLVSKLCCRHITPKLTEYLQPTQLGFGSKGGCEAAVHALRTYIEQNGGEVVLKVDIQNAFNAVDRGALLKEVKEVIPEIFPYLWQCYSQSSKLLYQDHLLLSSVGCQQGDPLGPAIFSLAIHKIITSMHSNLNMWYLDDGTLGGDSKTVLNDLRDLSEKFRLIGLELNSSKCEIFITDTVPDTQKTSIYDDFNSLAPNIKILDKCSLRLLGAPILKDSMPQFLDNEKSKFFDTIPHLTKINSHMAFQIIRYCLFVPCFTFVLRSSPMFKLKNLLSTVDSLIQVALTRVLNLPITDRCWLQASLPIRFGGLGIRKVSDVALPAFLSSIHSTETLYKKLIQPSLVDIEVSCCDEAKQAWSVACPCEDVPDNFSSQRQWDEPCCKLQQKKLLASSRNITERARLLAVAEHESGLWLHALPSTNIGTLLDDRSFTTAVGLRIGASLTEPHHCPCGASVCRAGLHGLSCQRSAGRLSRHAALNDVIRRALVSVGAPATLEPPGVVRDDGKRPDGMTLIPWKHGRPLVWDATCVDTLAPSHVSMSSRAAGSAAAAAELSKGRKYAAIGSSYMFTPFGVETMGTWGPEARQFIKDLSVKLIDTSGDRRAGSYLGQRISLAIQRGNAASILGTLPQGSDLEAIFFL

SEQ ID NO: 1854 - protein, 995 aa, Ypsolopha scabrella
MSQTAGPSTGPGPGVYNNDPSPDFLTCPECPPDRTFKGKRGLNIHITKSHKPSQLSPQISQTVTDQEPDAGTQRGDEPFHQILTKFKNFHPIVKRIPRGARISVARKLSDIISNVVKENSECAWESLLRFSYETLHVNDRVRKQSSLTQGIKNNCINPPLFTETLKKFHVNSRNKKVENKISDGDLRGAAQLLFSSDDIAPDSPETLAILQSKHPPASAATSLPQAPQPGDPQIQVLGKDVLAAIMSFKNDTAGGVDGLSPQHLKDLLCGTTGQAGETLLSNITSLVNLMLAGKVNWEISSILYGANLYALKKKDGGIRPIAVGTTFRRLVSKLCCRHITPKLTEYLQPTQLGFGSKGGCEAAVHALRTYIEQNGGEVVLKVDIQNAFNAVDRGALLKEVKEVIPEIFPYLWQCYSQSSKLLYQDHLLLSSVGCQQGDPLGPAIFSLAIHKIITSMHSNLNMWYLDDGTLGGDSKTVLNDLRDLSEKFRLIGLELNSSKCEIFITDTVPDTQKTSIYDDFNSLAPNIKILDKCSLRLLGAPILKDSMPQFLDNEKSKFFDTIPHLTKINLHMAFQIIRYCLFVPCFTFVLRSSPMFKLKNLLSTVDSLIQVTLTRVLNLPITDRCWLQASLPIRFGGLGIRKVSDVALPAFLSSIHSTETLYKKLIQPSLVDIEVSCCDEAKQAWSVACPCEDVPDNFSSQRQWDEPCCKLQQKNLLASSRNITERARLLAVAEHESGLWLHALPSANIGTLLDDRSFTTAVGLRIGASLTEPHHCPCGASVCRAGLHGLSCQRSAGRLSRHAALNDVIRRALVSVGAPATLEPPGVVRDDGKRPDGMTLIPWKHGRPLVWDATCVDTLAPSHVSMSSRAAGSAAAAAELSKGRKYAAIGSSYMFTPFGVETMGTWGPEARQFIKDLSVKLIDTSGDRRAGSYLGQRISLAIQRGNAASILGTLPQGSDLEAIFFFVIVMCVQVCVFFFLGLFSFCYYIFCFIYS

SEQ ID NO: 1855 - protein, 966 aa, Ypsolopha scabrella
MSQTAGPSTGPGPGVYNNDPSPDFLTCPECPPDRTFKGKRGLNIHITKSHKPSQLSPQISQTVTHQEPDAGTQRGDEPFHQILTKFKNFHPIVKRIPRGARISVARKLSDIISNVVKENSECAWESLLRFSYETLHVNDRVRKQSSLTQGIKNNCINPPLFTETLKKFHVNSRFKKVENKISDGDIRGAAQLLFSSDDIAPDSPETLAILQSKHPPASAATSLPQAPQPGDPQIQVLGKDVLAAIMSFKNGTAGGVDGLSPQHLKDLLCGTTGQAGETLLSNITSLVNLMLAGKVNWEISSILYGANLYALKKKDGGIRPIAVGTTFRRLVSKLCCRHITPKLTEYLQPTQLGFGSKGGCEAAVHALRTYIEQNGGEVVLKVDIQNAFNAVDRGALLKEVKEVIPEIFPYLWQCYSQSSKLLYQDHLLLSSVGCQQGDPLGPAIFSLAIHKIITSMHSNLNMWYLDDGTLGGDSKTVLNDLRDLSEKFRLIGLELNSSKCEIFITDTVPDTQKTSIYDDFNSLAPNIKILDKCSLRLLGAPILKDSMPQFLDNEKSKFFDTIPHLTKINSHMAFQIIRYCLFVPCFTFVLRSSPMFKLKNLLSTVDSLIQVALTRVLNLPITDRCWLQASFPIRFGGLGIRKVSDVALPAFLSSIHSTETLYKKLIQPSLVDIEVSCCDEAKQAWSVACPCEDVPDNFSSQRQWDEPCCKLQQKKLLASSRNITERARLLAVSEHESGLWLHALPSANIGTLLDDRSFTTAVGLRIGASLTEPHHCPCGASVCRAGLHGLSCQRSAGRLSRHAALNDVIRRALVSVGAPATLEPPGVVRDDGKRPDGMTLIPWKHGRPLVWDATCVDTLAPSHVSMSSRAAGSAAAAAELSKGRKYAAIGSSYMFTPFGVETMGTWGPEARQFIKDLSVKLIDTSGDRRAGSYLGQRISLAIQRGNAASILGTLPQGSDLEAIFFL

SEQ ID NO: 1856 - protein, 964 aa, Ypsolopha scabrella
MSQTAGPSTGPGPGVYNNDPSPDFLTCPECPPDRTFKGKRGLNIHITKSHKPSQLSPQISQTVTDQEPDAGTQRGDEPFHQILTKFKNFHPIVKRIPRGARISVARKLSDIISNVVKENSECAWESLLRFSYETLHVNDRVRKQSSLTQGIKNNCINPPLFTETLKKFHVNSRYKKVENKISDGDIRGAAQLLFSSDDIAPDSPETLAILQSKHPPASAATSLPQAPQPGDPQIQVLGKDVLAAIMSFKNGTAGGVDGLSPQHLKDLLCGTTGQASLLSNITSLVNLMLAGKVNWEISSILYGANLYALKKKDGGIRPIAVGTTFRRLVSKLCCRHITPKLTEYLQPTQLGFGSKGGCEAAVHALRTYIEQNGGEVVLKVDIQNAFNAVDRGALLKEVKEVIPEIFPYLWQCYSQSSKLLYQDHLLLSSVGCQQGDPLGPAIFSLAIHKIITSMHSNLNMWYLDDGTLGGDSKTVLNDLRDLSDKFRLIGLELNSSKCEIFITDTVPDTQKTSIYDDFNSLAPNIKILDKCSLRLLGAPILKDSMPQFLDNEKSKFFDTIPHLTKINSHMAFQIIRYCLFVPCFTFVLRSSPMFKLKNLLSTVDSLIQVALTRVLNLPITDRCWLQASLPIRFGGLGIRKVSDVALPAFLSSIHSTETLYKKLIQPSLVDIEVSCCDEAKQAWSVACPCEDVPDNFSSQRQWDEPCCKLQQKKLLASSRNITERARLLAVAEHESGLWLHALPSANIGTLLDDRSFTTAVGLRIGASLTEPHHCPCGASVCRAGLHGLSCQRSAGRLSRHAALNDVIRRALVSVGAPATLEPPGVVRDDGKRPDGMTLIPWKHGRPLVWDATCVDTLAPSHVSMSSRAAGSAAAAAELSKGRKYAAIGSSYMFTPFGVETMGTWGPEARQFIKDLSVKLIDTSGDRRAGSYLGQRISLAIQRGNAASILGTLPQGSDLEAFFFL

SEQ ID NO: 1857 - protein, 721 aa, Ypsolopha scabrella
MSFKNGTAGGVDGLSPQHLKDLLCGTTGQAGETLLSNITSLVNLMLAGKVNWEISSILYGANLYALKKKDGGIRPIAVGTTFRRLVSKLCCRHIAPKLTEYLQPTQLGFGSKGGCEAAVHALRTYIEQNGGEVVLKVDIQNAFNAVDRGALLKEVKEVIPEIFPYLWQCYSQSSKLLYQDHLLLSSVGCQQGDPLGPAIFSLAIHKIITSMHSNLNMWYLDDGTLGGDSKTVLNDLRDLSEKFRLIGLELNSSKCEIFITDTVPDTQKTSIYDDFNSLAPNIKILDKCSLRLLGAPILKDSMPQFLDNEKSKFFDTIPHLTKINSHMAFQIIRYCLFVPCFTFVLRSSPMFKLKNLLSTVDSLIQVALTRVLNLPITDRCWLQASLPIRFGGLGIRKVSDVALPAFLSSIYSTETLYKKLIQPSLVDIEVSCCDEAKQAWSVACPCEDVPDNFSSQRQWDEPCCKLQQKKLLASSRNITERARLLAVAEHESGLWLHALPSANIGTLLDDRSFTTAVGLRIGASLTEPHHCPCGASVCRAGLHGLSCQRSAGRLSRHAALNDVIRRALVSVGAPATLEPPGVVRDDGKRPDGMTLIPWKHGRPLVWDATCVDTLAPSHVSMSSRAAGSAAAAAELSKGRKYAAIGSSYMFTPFGVETMGTWGPEARQFIKDLSVKLIDTSGDRRAGSYLGQRISLAIQRGNAASILGTLPQGSDLEAIFFL

SEQ ID NO: 1858 - protein, 966 aa, Ypsolopha scabrella
MSQTAGPSTGPGPGVYNNDPSPDFLTCPECPPDRTFKGKRGLNIHITKSHKLSQLSPQISQTVTDQVPDAGTQRGDEPFHQILTKFKNFHPIVKRIPRGARISVARKLSDIISNVVKENSECAWESLLRFSYETLHVNDRVRKQSTLTQGIKNNCINPPLFTETLKKFHVNSRYKKVENKISDGDIRGAAQLLFSSDDIAPDSPETLAILQSKHPPASAATSLPQAPQPGDPQIQVLGKDVLAAIMSFKNGTAGGVDGLSPQHLKDLLCGTTGQAGETLLSNITSLVNLMLAGKVNWEISSILYGANLYALKKKDGGIRPIAVGTTFRRLVSKLCCRHIAPKLTEYLQPTQLGFGSKGGCEAAVHALRTYIEQNGGEVVLKVDIQNAFNAVDRGALLKEVKEVIPEIFPYLWQCYSQSSKLLYQDHLLLSSVGCQQGDPLGPAIFSLAIHKIITSMHSNLNMWYLDDGTLGGDSKTVLNDLRDLSEKFRLIGLELNSSKCEIFITDTVPDTQKTSIYDDFNSLAPNIKILDKCSLRLLGAPILKDSMPQFLDNEKSKFFDTIPHLTKINSHMAFQIIRYCLFVPCFTFVLRSSPMFKLKNLLSTVDSLIQVALTRVLNLPITDRCWLQASLPIRFGGLGIRKVSDVALPAFLSSIHSTETLYKKLIQPSLVDIEVSCCDEAKQAWSVACPCEDVPDNFSSQRQWDEPCCKLQQKKLLASSRNITERARLLAVAEHESGLWLHALPSTNIGTLLDDRSFTTAVGLRIGASLTEPHHCPCGASVCRAGLHGLSCQRSAGRLSRHAALNDVIRRALVSVGAPATLEPPGVVRDDGKRPDGMTLIPWKHGRPLVWDATCVDTLAPSHVSMSSRAAGSAAAAAELSKGRKYAAIGSSYMFTPFGVETMGTWGPEARQCIKDLSVKLIDTSGDRRAGSYLGQRISLAIQRGNAASILGTLPQGSDLEAIFFL

SEQ ID NO: 1859 - protein, 1159 aa, Andrena haemorrhoa
MRWTRSVLLHPENKISYKMSSSNEDEASDTETHGPGISVADLSASREGTTDNLGEEQVNETRQTIALPRVSPIKCAGCLRSNRDMQFLTEKDFIKHVDEQHDGLEVWWRCGRCSKAWAKLHALRCHIPKCKGLASDLELDFRCAECGSSYNSQRGLSTHERHRHPDIRNEKRKGTEGAAPRAAKKKGAKASVWSEEEVRLLKELDLTYRGRTRINALIREHLPNKTAKQISDKRRQLIPPIEVITIEDSESSSDYQSAEEERAQPSLLVARSAPETDGSWKITLKEAIATSESDVPAWNLILGDIKRIAEDSTSEGEEIDQIVENLVKILTKEDGERESKTPRIRRKGGRTADNGRRISDRTRRAKYQYQRYQDAFRKCPSKLANLAMEGKLMGNDEEGIVYPDKEKIKELYTSLWGTSGPQNVGVLGTRNETPDVPISEVWTPIVTEEIVSRMARMKAGTAAGVDGLKKAHLKAKGAIPMLAVLFNLLLLKEYYPKHFRENRTTLIPKPGKDASDPKNWRPITIGSLLGRLFSNMIDTRLRMHIRQSVRQKGFVSENGCVHNVAILRGILANMKKHKGGILTIVDVSKAFDTVPHAALDPALALTGMPEPVRKYIKEMYKQCQTSIKVKDANEIKITLQRGVKQGDPLSPLLFNIILDPVIRSINGTTEGVLANDGNVAVLAFADDIVLIGKDKKEATKQINKLSTYLRSLGMELSIPKCATVEIVAKGKTWFLQNPELEVGSEKIPTIKPEENVKYLGTTLDPWFGLRTTKENVQTVIRAANTVKKMKLKAYQKIELIRNQLLPKIIYQLVANPPANKTLKELDQEVKQAVKAILKLHPSTTDGLFYTDRSHGGLGLQRMETIVKLAVIRSGIKMMNSPDDAVQKALDELQVTLSKYTESIGLNWPATMDQVEEARMRIKKEETTKWRQLISQGKGVGDFAHDKIGNAWLYNPSLLKQSRYLDALRLRTNTFGAKAVLGRAKKELDITCRRCRAQIETLGHIIGNCLHTKPSRIRRHDEIKNLIRDHAAKRCTVFDEPSVNVIGDLRKPDLVIKDQEWLYVVDVTVRFEDKDNLKQAFIEKCSKYKDTLEYIRIKTNSLRAKVIPIVVGARGAMPRETRTNLKTLGMRKSDMLTISLMALRSSVEMANAFIDYDYMR

SEQ ID NO: 1860 - protein, 1159 aa, Andrena haemorrhoa
MRWTRSVLLHPENKISYKMSSSNEDEASDTETHGPGISVADLSASREGTTDNLGEEQVNETRQTIALPRVSPIKCAGCLRSNRDMQFLTEKDFIKHVDEQHDGLEVWWRCGRCSKAWAKLHALRCHIPKCKGLASDLELDFRCAECGSSYNSQRGLSTHERHRHPDIRNEKRKGTEGAAPRAAKKKGAKASVWSEEEVRLLKELDLTYRGRTRINALIREHLPNKTAKQISDKRRQLIPPIEVITIEDSESSSDYQSAEEERAQPSPLVARSAPETDGSWKITLKEAIATSESDVPAWNLILGDIKRIAEDSTSEGEEIDQIVENLVKILTKEDGERESKTPRIRRKGGRTADNGRRISDRTRRAKYQYQRYQDAFRKCPSKLANLAMEGKLMGNDEEGIVYPDKEKIKELYTSLWGTSGPQNVGVLGTRNETPDVPISEVWTPIVTEEIVSRMARMKAGTAAGVDGLKKAHLKAKGAIPMLAVLFNLLLLKEYYPKHFRENRTTLIPKPGKDASDPKNWRPITIGSLLGRLFSNMIDTRLRMHIRQSVRQKGFVSENGCVHNVAILRGILANMKKHKGGILTIVDVSKAFDTVPHAALDPALALTGMPEPVRKYIKEMYKQCQTSIKVKDANEIKITLQRGVKQGDPLSPLLFNIILDPVIRSINGTTEGVLANDGNVAVLAFADDIVLIGKDKKEATKQINKLSTYLRSLGMELSIPKCATVEIVAKSKTWFLQNPELEVGSEKIPTIKPEENVKYLGTTLDPWFGLRTTKENVQTVIRAANTVKKMKLKAYQKIELIRNHLLPKIIYQLVANPPANKTLKELDQEVKQAVKAILKLHPSTTDGLFYTDRSHGGLGLQRMETIVKLAVIRSGIKMMNSPDDAVQKALDELQVTLSKYTESIGLNWPATMDQVEEARMRIKKEETTKWRQLISQGKGVGDFAHDKIGNAWLYNPSLLKQSRYLDALRLRTNTFGAKAVLGRAKKELDITCRRCRAQIETLGHIIGNCLHTKPSRIRRHDEIKNLIRDHAAKRCTVFDEPSVNVIGDLRKPDLVIKDQEWLYVVDVTVRFEDKDNLKQAFIEKCSKYKDTLEYIRIKTNSLRAKVIPIVVGARGAMPRETRTNLKTLGMRKSDMLTISLMALRSSVEMANAFIDYDYMR

SEQ ID NO: 1861 - protein, 1159 aa, Andrena haemorrhoa
MRWTRSVLLHPENKISYKMSSSNEDEASDTETHGPGISVADLSASREGTTDNLGEEQVNETRQTIALPRVSPIKCAGCLRSNRDMQFLTEKDFIKHVDEQHDGLEVWWRCGRCSKAWAKLHALRCHIPKCKGLASDLELDFRCAECGSSYNSQRGLSTHERHRHPDIRNEKRKGTEGAAPRAAKKKGAKASVWSEEEVRLLKELDLTYRGRTRINALIREHLPNKTAKQISDKRRQLIPPIEVITIEDSESSSDYQSAEEERAQPSPLVARSAPETDGSWKITLKEAIATSESDVPAWNLILGDIKRIAEDSTSEGEEIDQIVENLVKILTKEDGERESKTPRIRRKGGRTADNGRRISDRTRRAKYQYQRYQDAFRKCPSKLANLAMDGKLMGNDEEGIVYPDKEKIKELYTSLWGTSGPQNVGVLGTRNETPDVPISEVWTPIVTEEIVSRMARMKAGTAAGVDGLKKAHLKAKGAIPMLAVLFNLLLLKEYYPKHFRENRTTLIPKPGKDASDPKNWRPITIGSLLGRLFSNMIDTRLRMHIRQSVRQKGFVSENGCVHNVAILRGILANMKKHKGGILTIVDVSKAFDTVPHAALDPALALTGMPEPVRKYIKEMYKQCQTSIKVKDANEIKITLQRGVKQGDPLSPLLFNIILDPVIRSINGTTEGVLANDGNVAVLAFADDIVLIGKDKKEATKQINKLSTYLRSLGMELSIPKCATVEIVAKGKTWFLQNPELEVGSEKIPTIKPEENVKYLGTTLDPWFGLRTTKENVQTVIRAANTVKKMKLKAYQKIELIRNHLLPKIIYQLVANPPANKTLKELDQEVKQAVKAILKLHPSTTDGLFYTDRSHGGLGLQRMETIVKLAVIRSGIKMMNSPDDAVQKALDELQVTLSKYTESIGLNWPATMDQVEEARMRIKKEETTKWRQLISQGKGVGDFAHDKIGNAWLYNPSLLKQSRYLDALRLRTNTFGAKAVLGRAKKELDITCRRCRAQIETLGHIIGNCLHTKPSRIRRHDEIKNLIRDHAAKRCTVFDEPSVNVIGDLRKPDLVIKDQEWLYVVDVTVRFEDKDNLKQAFIEKCSKYKDTLEYIRIKTNSLRAKVIPIVVGARGAMPRETRTNLKTLGMRKSDMLTISLMALRSSVEMANAFIDYDYMR

SEQ ID NO: 1862 - protein, 1159 aa, Andrena haemorrhoa
MRWTRSVLLHPENKISYKMSSSNEDEASDTETHGPGISVADLSASREGTTDNLGEEQVNETRQTIALPRVSPIKCAGCLRSNRDMQFLTEKDFIKHVDEQHDGLEVWWRCGRCSKAWAKLHALRCHIPKCKGLASDLELDFRCAECGSSYNSQRGLSTHERHRHPDIRNEKRKGTEGAAPRAAKKKGAKASVWSEEEVRLLKELDLTYRGRTRINALIREHLPNKTAKQISDKRRQLIPPIEVITIEDSESSSDYQSAEEERAQPSPLVARSAPETDGSWKITLKEAIATSESDVPAWNLILGDIKRIAEDSTSEGEEIDQIVENLVKILTKEDGERESKTPRIRRKGGRTADNGRRISDRTRRAKYQYQRYQDAFRKCPSKLANLAMEGKLMGNDEEGIVYPDKEKIKELYTSLWGTSGPQNVGVLGTRNETPDVPISEMWTPIVTEEIVSRMARMKAGTAAGVDGLKKAHLKAKGAIPMLAVLFNLLLLKEYYPKHFRENRTTLIPKPGKDASDPKNWRPITIGSLLGRLFSNMIDTRLRMHIRQSVRQKGFVSENGCVHNVAILRGILANMKKHKGGILTIVDVSKAFDTVPHAALDPALALTGMPEPVRKYIKEMYKQCQTSIKVKDANEIKITLQRGVKQGDPLSPLLFNIILDPVIRSINGTTEGVLANDGNVAVLAFADDIVLIGKDKKEATKQINKLSTYLRSLGMELSIPKCATVEIVAKGKTWFLQNPELEVGSEKIPTIKPEENVKYLGTTLDPWFGLRTTKENVQTVIRAANTVKKMKLKAYQKIELIRNHLLPKIIYQLVANPPANKTLKELDQEVKQAVKAILKLHPSTTDGLFYTDRSHGGLGLQRMETIVKLAVIRSGIKMMNSPDDAVQKALDELQVTLSKYTESIGLNWPATMDQVEEARMRIKKEETTKWRQLISQGKGVGDFAHDKIGNAWLYNPSLLKQSRYLDALRLRTNTFGAKAVLGRAKKELDITCRRCRAQIETLGHIIGNCLHTKPSRIRRHDEIKNLIRDHAAKRCTVFDEPSVNVIGDLRKPDLVIKDQEWLYVVDVTVRFEDKDNLKQAFIEKCSKYKDTLEYIRIKTNSLRAKVIPIVVGARGAMPRETRTNLKTLGMRKSDMLTISLMALRSSVEMANAFIDYDYMR

SEQ ID NO: 1863 - protein, 1096 aa, Harmonia axyridis
MRWSEEENILLMRVHFIALEMQELTGRTYRQISTETWNEIYPERRSYPNLLANRVRWILQNGKFSSMELDSIMQSVSPLGAEVQEEMGSTENGTQVETRVSFRQTGTERRFSRNLQLFSGMGPEKRPKLPRMKGSVRLLQTVRKIDDVLNTCMRNSKNIEEILDMVYAAAVTVCEEVGIHLGNNQPTHRKDKTPPWKIRLEKKIDENRRKIGVIHTYLHADSPSRKLLKKTLRVASEYRVRSRSWHLREELVTICDRLKQKVKTLGNRLKRYNERVKRYRNNELYYKNPQQFFRSLEEGVEAAGEESLSLKKMYREWNEIWGDAKTHDDGAYWIKEAERKAETYDMEELEIKEEDIRMVLRRARNWSAPGSDGLHNYWWKNFQSTHKHLARMFQEALHNPSVIPESLTLGVTHMIPKGDKTSDPKNYRPITCLPSIYKILTGVLTTTIWRHVDNYGIMAPEQNGCRKNIRGCKEALIVDHLVTKQARKKLRNISVAWIDYKKAFDSMPHSWLLKILRLYGVSESVVKLLEHLMKSWRTQLLVTTQGKTTATPEIKIRRGIFQGDKLSPLWFCLALNFLSKLLRDDKYGYIIERRRNTKINHQLHIDDLKLYASSEGEMKRMLKIVASFSETVRMEMGLSKCAVVHVQRGKLVEGDEMQVQDSISIRRMGLDETYKYLGVQQGLEINLAESKATFKEKFFGRLRKVLASKLNSRSMFTAINTWAVPCIAYSFGVVRWSTTELQSMDTRVRVLLTKYGIHHPHASVSRLYVPRKDGGRGLQSLEIIPNNVVKDLRGYFQTKNSPLFKVICQEDENITALNLSDRRNPTEAPTIGTLTERWHGMTLHGRYPEALKNNNVNKEQSLEYITAGYLYPETEGRLVAIQDQVVPTRAYIKNITKRYLPSNKCRKCSQGLETIQHVTSSCSILAPKEYTDRHNAMAKVYHQAIAIRTGLILTSRKPYEYVPKAVMENENYRLYWDTLMETDRPVAHNRPDIVIFDKVKKGANIIDVTVPADDSISRAYTEKITKYEDLAFEQKEIYDLRKVYIIPLIITTNGLVETHLGENTALLGLDQDIISTAQKEVVLWTTRIVRKFLVNG

SEQ ID NO: 1864 - protein, 784 aa, Coccinella septempunctata
MYREWNKIWGDAKTHDDGAYWIKEAERKAETYDMEELEIKEEDIRMVLRRAKNWSAPGSDGLHNYWWRNFQSTHKHLARMFQEALHNPSVIPESLTLGVTHMIPKGDKTSDPKNYRPITCLPSIYKILTGVLTTAIWRHVDNYGIMAPEQNGCRKNIRGCKEALIIDHLVTKQARKKMRNISVAWIDYKKAFDSMPHSWLLKTLRLYGVSESVVKLLEHLMKSWRTQLLVTTQGKTTATPEIKIRRGIFQGDKLSPLWFCLALNFLSKLLRDDKYGYIIERRRNTKINHQLYIDDLKLYASSEEEMKRMLKIVASFSETVRMDMGLSKCAVVHVRRGKLVEGDEMQVQDSISIRRMGLDETYKYLGVQQGLEINLAESKATFKEKFFGRLKKVLASKLNSRSMFTAINTWAVPCIAYSFGVVRWSTTELQSMDTRVRVLLTKYGIHHPHASVSRLYVPRKEGGRGLQSLEIIHNKVVKDLREYFQTKNSPLFKIICQEDENITALNLADRRTLTEATTIGTLTERWHGMTLHGRYPEALKNNNVNKEQSLKYITAGYLYPETEGRLVAIQDQVVPTRAYIKNITKRYLPSDRCRKCSQGLETIQHVTSSCSILAPKEYTDRHNAMAKVYHQAIAIRTGLILTSRKPYEYMPKAVMENEEYRLYWDTLMETDRPVAHNRPDIVIFDKVKKEANIIDVTVPADDNVSRAYTEKLTKYEDLAFELKEIYNLRKVYITPLIITTNGLVETHLGENTALLGLDQDIISTAQKEVVLWTTRIVRKFLVNG

SEQ ID NO: 1865 - protein, 1113 aa, Coccinella septempunctata
MASSTQASGRRDGRTRWSEDDNMLIMRVHFIALEMQEDTGRTYRELLTETWNEINPERRSYPNLLSNRVKWLLRNNKFSAVDLDLIQRSVRPRGAEPEMEVEIETTESLRQTVARRSLRTCGMERRFCRNLLMYSGIAADKRPKLPRLKCTSRLLQIVQKIDGILNKFIPDCTGLKEMVDAVYAAAITVCEETGQCLENNQPTERRNITPPWKERLEKKITGIRKKIGVIDTYLNMPDPTRKLIKKTLRIAAEFHVKGRSRQFREELVITCDRLKQKIKALGNRLQRYNERVKRYKNNQLYYKNPQQFFRSLEEETRPRSAESPSLEEMYREWYKIWGEEKLHDDGVFWIREAEKKTELFDMEDIKIREEDIQKVLKKTNNWSAPGPDGLHTYWWKNFKSTHKDLARMFQEALSDPSLIPESFTLGVTHMIPKGKNTTDPKNYRPITCLPSIYKILTGILTTNIWKHVNKYGIMTGEQKGCRKDVRGCKETLTIDHLVTKQARKKLRNMSIAWIDYKKAFDSMPHTWLLKTLRLYGVSETIVNLLEHLMKTWRTKLMMNTEGEISLTSEIKIKRGIFQGDKLSPLWFCLALNFLSNLLSESQYGYVIDRQKKTKINHQLYMDDLKLYAANEEEMKRMLNIVASFSDTVGMELGIDKCAVVHMKRGRLIEGDDMRMQNSMSIRRIGTDETYKYLGIQQGLELNVAESKAGFENKFFGRLRKVLASKLNAKSMFTAINTWAIPCIAYSFGVVKWSRTELKAIDTKVRVLLTKYGIHHPHASVNRLYVPRKEGGRGLHSIEIIHNNNTKEMKEYFWSKSSPFFKMICKEDDNITALNLASERRTNEEPTIESLTDQWHSKTLHGRYPEALKNSKINTQMSLGYMTAGYLYPETEGRLVAIQDQVVPTRSYVKNITKRYLPSDRCRKCSLSPESIQHVTSACPILAPREYTDRHNAMAKVYHQAIAIKTGLILTSKKPYEYSPKSVMENEKYRLYWDTFLETDRPVVHNRPDIVIFDKENHVANIIDITVPADDNVSRAYSEKITKYEDLAFQLKEMYRLKTVYVTPLVISTNGLVEVHLKENTSQLGLDENDVISAAQREVILWTTRIVRKFLASG

SEQ ID NO: 1866 - protein, 1085 aa, Coccinella septempunctata
MRVHFIALEMQEITGRTYRQILTETWNEIYPERRSYPNLLANRVRWILRNNKFSSMELDSIMQSVSPLGAEVQEEVESTGNGTQMENRVSFRQTGMERRFSRNLQLFSGMGPESRPKLPRMKGSVRLLQTVRKIDDVLNTCMRNSNDLKEVLDMVYAGAVTVCEEVGLHLENNQPTHRKDKTPPWKIRLEKKIVENRKKIGVLHTYLHTENPSRKLLKKTLRVASEYRVRRRSWQLREELVTICDRLKQKVKALGNRLKRYNERVKRYRNNQLYYKNPQQFFRSLEEGVEATEGESPSVTEMYREWNKIWGDAKTHDDGAYWIKEAERKAETYDMEELEIKEEDIRMVLRRAKNWSAPGSDGLHNYWWRNFQSTHKHLARMFQEALHNPSVIPESLTLGVTHMIPKGDKTSDPKNYRPITCLPSIYKILTGVLTTAIWRHVDNYGIMAPEQNGCRKNIRGCKEALLIDHLVTKQARKKMRNISVAWIDYKKAFDSMPHSWLLKTLRLYGVSEPVVKLLEHLMKSWRTQLLVTTQGKTTATPEIKIRRGIFQGDKLSPLWFCLALNFLSKLLRDDKYGYIIERRRNTKINHQLYIDDLKLYASSEEEMKRMLKIVASFSETVRMDMGLSKCAVVHVRRGKLVEGDEMQVQDSISIRRMGLDETYKYLGVQQGLEINLAESKATFKEKFFGRLKKVLASKLNSRSMFTAINTWAVPCIAYSFGVVRWSTTELQSMDTRVRVLLTKYGIHHPHASVSRLYVPRKEGGRGLQSLEIIHNKVVKDLREYFQTKNSPLFKIICQEDENITALNLADRRTLTEATTIGTLTERWHGMTLHGRYPEALKNNNVNKEQSLKYITAGYLYPETEGRLVAIQDQVVPTRAYIKNITKRYLPSDRCRKCSQGLETIQHVTSSCSILAPKEYTDRHNAMAKVYHQAIAIRTGLILTSRKPYEYMPKAVMENEEYRLYWDTLMETDRPVAHNRPDIVIFDKVKKEANIIDVTVPADDNVSRAYTEKLTKYEDLAFELKEIYNLRKVYITPLIITTNGLVETHLGENTALLGLDQDIISTAQKEVVLWTTRIVRKFLVNG

SEQ ID NO: 1867 - protein, 1113 aa, Coccinella septempunctata
MASPTQASGRRDGRTRWSEDDNMLIMRVHFIALEMQEDTGRTYRELLTETWNEINPERRSYPNLLSNRVKWLLRNNKFSAVDLDLIQRSVRPRGAEPEMEVEIETTESLRQTVARRSLRTCGMERRFCRNLLMYSGIAADKRPKLPRLKCTSRLLQIVQKIDGILNKFIPDCTGLKEMVDAVYAAAITVCEETGQCLENNQPTERRNITPPWKERLEKKITGIRKKIGVIDTYLNMPDPTRKLIKKTLRIAAEFHVKGRSRQFREELVITCDRLKQKIKALGNRLQRYNERVKRYKNNQLYYKNPQQFFRSLEEDTRPRSAESPSLEEMYREWYKIWGEEKLHDDGVFWIREAEKKTELFDMEDIKIREEDIQKVLKKTNNWSAPGPDGLHTYWWKNFKSTHKDLARMFQEALSDPSLIPESFTLGVTHMIPKGKNTTDPKNYRPITCLPSIYKILTGILTTNIWKHVNKYGIMTGEQKGCRKDVRGCKETLTIDHLVTKQARKKLRNMSIAWIDYKKAFDSMPHTWLLKTLRLYGVSETIVNLLEHLMKTWRTKLMMNTEGEISLTSEIKLKRGIFQGDKLSPLWFCLALNFLSNLLSESQYGYVIDRQKKTKINHQLYMDDLKLYAANEEEMKRMLNIVASFSDTVGMELGIDKCAVVHMKRGRLIEGDDMRMQNNMSIRRMGTDETYKYLGIQQGLELNVAESKAGFENKFFGRLRKVLASKLNAKSMFTAINTWAIPCIAYSFGVVKWSRTELKAIDTKVRVLLTKYGIHHPHASVNRLYVPRKEGGRGLHSIEIIHNNITKEMKEYFWSKSSPFFKMICKEDDNITALNLASERRTNEEPTIESLTDQWHSKTLHGRYPEALKNSKINTQMSLGYMTAGYLYPETEGRLVAIQDQVVPTRSYVKNITKRYLPSDRCRKCSLSSESIQHVTSACPILAPREYTDRHNAMAKVYHQAIAIKTGLILTSKKPYEYSPKSVMENEKYRLYWDTFLETDRPVAHNRPDIVIFDKENNVANIIDITVPADDNVSRAYSEKITKYEDLAFQLKEMYRLKTVYVTPLVISTNGLVEVHLKENTSQLGLDENDVISAAQREVILWTTRIVRKFLASG

SEQ ID NO: 1868 - protein, 1085 aa, Coccinella septempunctata
MRVHFIALEMQEITGRTYRQILTETWNEIYPERRSYPNLLANRVRWIFRNNKFSSMELDSIMQSVSPLGAEVQEEVESTGNGTQMENRVSFRQTGMERRFSRNLQLFSGMGPERRPKLPRMKGSVRLLQTVRKIDDVLNTCMRNSNDLKEILDMVYAGAVTVCEEVGLHLENNQPTHRKDKTPPWKIRLEKKIVENRKKIGVLHTYLHTENPSRKLLKKTLRVASEYRVRRRSWQLREELVTICDRLKQKVKALGNRLKRYNERVKRYRNNQLYYKNPQQFFRSLEKGVEATEGESPSVTEMYREWNKIWGDAKTHDDGAYWIKEAERKAETYDMEELEIKEEDIRMVLRRAKNWSAPGSDGLHNYWWRNFQSTHKHLARMFQEALHNPSVIPESLTLGVTHMIPKGDKTSDPKNYRPITCLPSIYKILTGVLTTAIWRHVDNYGIMAPEQNGCRKNIRGCKEALIIDHLVTKQARKKMRNISVAWIDYKKAFDSMPHSWLLKTLRLYGVSESVVKLLEHLMKSWRTQLLVTTQGKTTSTPEIKIRRGIFQGDKLSPLWFCLALNFLSKLLRDDKYGYIIERRRNTKINHQLYIDDLKLYASSEEEMKRMLKIVASFSETVRMDMGLSKCAVVHVRRGKLVEGDEMQVQDSISIRRMGLDETYKYLGVQQGLEINLAESKATFKEKFFGRLKKVLASKLNSRSMFTAINTWAVPCIAYSFGVVRWSTTELQSMDTRVRVLLTKYGIHHPHASVSRLYVPRKEGGRGLQSLEIIHNKVVKDLREYFQTKNSPLFKIICQEDENITALNLADRRTLTEATTIGTLTERWHGMTLHGRYPEALKNNNVNKEQSLKYITAGYLYPETEGRLVAIQDQVVPTRAYIKNITKRYLPSDRCRKCSQGLETIQHVTSSCSILAPKEYTDRHNAMAKVYHQAIAIRTGLILTSRKPYEYMPKAVMENEEYRLYWDTLMETDRPVAHNRPDIVIFDKVKKEANIIDVTVPADDNVSRAYTEKLTKYEDLAFELKEIYNLRKVYITPLIITTNGLVETHLGENTALLGLDQDIISTAQKEVVLWTTRIVRKFLVNG

SEQ ID NO: 1869 - protein, 1118 aa, Adalia bipunctata
MNDAQARSTVAPGRRDGRTRWSEEDNILIMRVHYIALDLQQRTGQTYRGLLTQTWNDINPEKQSYPNLLSNRVRWLLQNNKFTTVELDSIEQSIRPLGAVHEMSTEAGEEHLLETSTRLSLRLSLKPNRIERSFSRNFQLYDGIGPDRRPKIPRMKGSRKMLESVQAVDSILGDCMRSTTTLKDMVDLVYAGAVTVCEEVGVKLTETNPIHRRDRTPPWRSRLEKKITDIRKKIGVLHTYLHTEAPTRKLRKKVLKVASEFQVKSRSEQLQKELEVVCDRLKQKVKALGNRIKRYNERVKRYKNNQLFYKNQQQFFRSLEGEKTTRGEPPTAEKMYEVWTGIWENEGVHDEQAFWVREAEEESRKYNMDLLEITEEDVRVVLKRTKNWSAPGSDGLQNYWWKNFRSTHKNLAKRFQEALKDPSLIPESFTLGVTHMIPKGNNTSDPNNYRPITCLPAIYKVLTGILTTHIWKHVSRYSIMAPEQNGCKKDVRGCKELLTIDHLVTKQARKKLRNISVAWIDYRKAFDSVPHSWLLKTLRLYGVSEPIVSLLKHMMGTWRTKLLINAEHETRITPEIRIKRGIFQGDKLSPLWFCMAINFLSKLLRQNDNGYVIEKTHNTKISHQLYVDDLKLYAANEDQMKRQLGIVTSFSKTIRMEMGLDKCAVVHVKRGRITVRDEMRIQDEIAIRGLGSDESYKYLGIQQGLEIQHSEAKASFQNRFFGRLKKVLASRLNSGAMFTAINTWAIPSISYSFGILKWSNTELKAIDTRVRVLLTKYGIHHPHASANRLYIPRQDGGRGLQNIEIVHHKIVKDMRVYFHSKHSPFFKVVCREDDNITALNLASRNHPTEGPSIEILSRQWHEKVLHGRYPEALKSNKIIKERSVNYLKAGYLYPETEGRLVAIQDQVVPTRAYIKNITGRYLPSDRCRKCSQALETIQHVTSSCSILAPREYTERHNAMAKVYHQAIAIKTGLILTSKTPFAYTPREVMENDRFRLYWDTLMVTDRPIPHNRPDIVVFDKDREMAHIIDVTVPADDNIGRAYTEKLTKYQDLAIELKEIYRLKSVFVMPLIISTNGLVECHLLENTTRLGLEENLISVAQKEVVLGTTRIVRGFLATG

SEQ ID NO: 1870 - protein, 1096 aa, Harmonia axyridis
MRWSEEENILLMRVHFIALEMQELTGRTYRQILTETWNEIYPEKRSYPNLLANRVRWILQNGKFSSMELDSIMQSVSPLGAEVQEEMGSTGNGTQVETRVSFRQTGTERRFSRNLQLFSGMGPEKRPKLPRMKGSVRLLQTVRKIDDVLNTCMRNSKNIEEILDMVYAAAVTFCEEVGIHLGNNQPTHRKDKTPPWKIRLEKKIDENRRKIGVIHTYLHAESPSRKLLKKTLRVASEYRVRSRGWHLREELVTICDRLKQKVKTLGNRLKRYNERVKRYRNNELYYKNPQQFFRSLEEGVEAAGEESPSLKEMYREWNEIWGDAKTHDDGAYWIKEAERKAETYDMEELEIKEEDIRMVLRRARNWSAPGSDGLHNYWWKNFQSTHKHLARMFQEALHNPSVIPESLTLGVTHMIPKGDKTSDPKNYGPITCLPSIYKILTGVLTTTIWRHVDNYGIMAPEQNGCRKNIRGCKEALIVDHLVMKQARKKLRNISVAWIDYKKAFDCMPHSWLLKTLRLYGVSESVVKLLEHLMKSWRTQLLVTTQGKTTATPEIKIRRGIFQGDKLSPLWFCLALNFLSKLLRDDKYGYIIERRRNTKINHQLYIDDLKLYASSEGEMKRMLKIVASFSETVRMEMGLSKCAVVHVQRGKLVEGDEMQVQDSISIRRMGLDETYKYLGVQQGLEINLAESKATFKEKFFGRLRKVLASKLNSRSMFTAINTWAVPCIAYSFGVVRWSTTELQSMDTRVRVLLTKYGIHHPHASVSRLYVPRKDGGRGLQSLEIIHNNVVKDLRGYFQTKNSPLFKVICQEDENITALNLSDRRNPTEAPTIGTLTERWHGMTLHGRYPEALKNNNVNKEQSLKYITAGYLYPETEGRLVAIQDQVVPTRAYIKNITKRYLPSDRCRKCSQGLETIQHVTSSCSILAPKEYTDRHNAMAKVYHQAIAIRTGLILTSRKPYEYVPKAVMENENYRLYWDTLMETDRLVAHNRPDIVIFDKVKKEANIIDVTVPADDNISRAYTEKNTKYEDLAFELKEIYNLRKVYIIPLIITTNGLVETHLGENTALLGLDQDIISTAQKEVVLWTTRIVRKFLVNG

SEQ ID NO: 1871 - protein, 1043 aa, Harmonia axyridis
MPPPPQTPAGFTCICQNGKIYVTARALGQHKRLYCRGAPDEDSGKCPCCGRNFESYAGMRQHLRLAHAEVYNEELQSAANNARKPWSEEEVRELAAAEIDYNGDNIIAYLSGLSGRSSEAIKKRRRTAEWANAMVRHRECREIEERERKEEEAIQLRRELDIILEEEQAEPEIVEEQLAAPPELPENFRPVVNDPVMQYILDLVSTIEEREDIQFAANVCDGTDKDGALDAYAEKLTNYGIKRKYQPITIQETSHTSSKRKERAANYRNVQRRWSKNKKQLATEIIDGVNNNQANSKPSKEEIIQAYSSIFSTVSEQDEWPCIANTPEIQLYRPITYDNLEKIIKSLKQGAAGPDGITLRQFRLIPRHKLLLLYNAMLLLRRVPTVLKKSRTTLIPKKKEELNKVKNWRPITVSSLLLRACNKIIAGRLMEVPLHEHQRGFVNVDGVFANNISLHSTIKMKRRQRKGYAIITLDIRKAFDTLSHSSIERALKRKGVDVNTIQYIMANFMDATTVISCAGEEIGTLQVKRGTKQGDPMSPILFNIMMDELIEELEGLPGISVEDEKISCLAYADDLILLADDVKVARKLLAKSQDFFDRRHMELSVEKSHAISVGRAPGRRLFVHSTRQFFIHGMPIKQLDVGESMEYLGGKFTSMGITKCSINNLRTQIDRILKAPLKPAQKFEVIKVHLIPRYIHALQSPQVHIKTLKAADRAIRWAVKCSLHLPSHVSNHVIHAPQKEGGLGVFSFMDKIPIIIGNRLDRLKGRSPALDAVLRTSEPWLKRIKKMIKPPNSTTTMKDSARARDLHSSFHGGGLGEMKHHRASNAYIDFPPRYWSGEDYVRAIQLRSNVLPTAGLPYNRGPEARCRAGCARRETLSHVLQKCPVTHWERITRHNYVATRVKNIAAKKGWQVTEEPHIRDSAGILLKPDLLLIKDEELIISDVSVNWEAPEPLGTAYRMKKAIYSGPAFLEAVMERFPGKTIRVCPVVVGARGGWCPDNNELVRLIGMSNSDIADIVHTAIRGGCVIHKRFNQMIWRRSRRVN

SEQ ID NO: 1872 - protein, 1127 aa, Adalia bipunctata
MPPPPQPPVGLLCVCGNGQRYPSAKALAQHQRLYCRGAPEEHQNRCPECGRDFDSYRGMRLHLKQAHPVQYNEELQEAARMARRPWSEEEYEELTAKEAAYLGTNIAAYLSGLSGRTEEAIKMQRKTTKWKNLVENHKREHRPLEAMLRITEGQEAPVRGAVARGGLAWSEDEVHTLASAEAIYKGEDLIQYLSGISGRSEEAIKKRRRTVEWRNAVEREKECQQIIERERVEEDAEQLRRELDRIVEEAQTEPEIIEEVLIGPPDRTQEFRPVVTDPVMQFILDIAPSLDEVEDITFAAEICTGQTKEAALNNYAANLIAKYGQKKKPKRSATNEEDLQTTSRRKQRAINFRNTQRKWTKNKKQLATEIIDGIDILKSSSRPSKEEITAEYRKILSGESKSDNWDPNTAVEPNFLYKPITQEQLEATIKATKQGAAGPDGITLRQLKQIPRHKLLLLYNSMLLVRQVPQCLKKSRTTLIPKKNDHLEKVKNWRPITVSSLLLRVCNKEMAGRLMEIPLHDHQRGFVRVDGVFANSISLHSAIKIKRKNRQGYSMIALDIQKAFDTLSHASIERALKRKGVDEATRQYIMANFQGAETTISCAGEEICDIKINRGTKQGDPMSPALFNLVMDELIEELEQMPGITVEHQKISCLAFADDLIIMADNVKDARKLLNRCQEFFDCRHLELNTEKSHAIAVGRAPGRRLFSYTTSQFFIHGKPIRNVEVKESMEYLGNRFSYMGITKCTIDNLRKQIDRILKAPLKPYQKLNLLKTHLIPRYIHALQSPQVHIKTLKSADRAIRWAVKRALHLPTHVSDPIIHAPQKEGGLGIFSFTDKIPIIMTNRLNRLQGKSAVLDAVIKISEHWVTRIQKMIRPPHSTSALKDQQRAMELHSSFHGGGLGEMKHHRASNQFIDTPPRYWSGEDYVRAIQLRSNTLPTAGLPYNHGPEAKCRAGCERRETLCHVLQKCPIMHWERINRHNFVASRLKNQATKTGWSVLEEPHIRDSDGRLLKPDLLMIKGDLLVISDISVSWEAPEPLCTAYENKKAIYSTPKFLEAVELRFPEKTIQVCPLIVGARGGWCPKNDQIARQLNLTSHNIADIVHTAMRGSIIIHKRFNQMIWRRSRRV

SEQ ID NO: 1873 - protein, 1043 aa, Harmonia axyridis
MPPPPQTPAGFTCICQNGKIYVTARALGQHKRLYCRGAPDEDSGKCPCCGRNFESYAGMRQHLRLAHAEVYNEELQSAANNARKPWSEEEVRELAAAEIDYNGDNIIAYLSGLSGRSSEAIKKRRRTAEWANAMVRHRECREIEERERKEEEAIQLRRELDIILEEEQAEPEIVEEQLAAPPELPENFRPVVNDPVMQYILDLVGTIEEREDIQFAANVCDGTDKDGALDAYAEKLTNYGIKRKYQPITIQETSHTSSKRKERAANYRNVQRRWSKNKKQLATEIIDGVNNNQANSKPSKEEIIQAYSSIFSTVSEQDEWPCIANTPEIQLYRPITYDNLEEIIKSLKQGAAGPDGITLRQFRLIPRHKLLLLYNAMLLLRRVPTVLKKSRTTLIPKKKEELNKVKNWRPITVSSLLLRACNKIIAGRLMEVPLHEHQRGFVNVDGVFANNISLHSTIKMKRRQRKGYAIITLDIRKAFDTLSHSSIERALKRKGVDVNTIQYIMANFMDATTVISCAGEEIGTLQVKRGTKQGDPMSPILFNIMMDELIEELEGLPGISVEDQKISCLAYADDLILLADDVKVARKLLAKSQDFFDRRHMELSVEKSHAISVGRAPGRRLFVHSTRQFFIHGVPIKQLDVGESMEYLGGKFTSMGITKCSINNLRTQIDRILKAPLKPAQKFEVIKVHLIPRYIYALQSPQVHIKTLKAADRAIRWAVKCSLHLPSHVSNHVIHAPQKEGGLGVFSFMDKIPIIIGNRLDRLKGRSPALDAVLRTSEPWLKRIKKMIKPPNSTTTMKDSARARDLHSSFHGGGLGEMKHHRASNAYIDLPPRYWSGEDYVRAIQLRSNVLPTAGLPYNRGPEARCRAGCARRETLSHVLQKCPVTHWERITRHNYVATRVKNIAAKKGWQVTEEPHIRDSAGILLKPDLLLIKDEELIISDVSVNWEAPEPLGTAYRMKKAIYSGPAFLEAVMERFPGKTVRVCPVVVGARGGWCPDNNELVRLIGMSNSDIADIVHTAIRGGCVIHKRFNQMIWRRSRRVN

SEQ ID NO: 1874 - protein, 1044 aa, Harmonia axyridis
MLPSPQPPAGLLCICQNNKIYANAKALSQHQRLYCRGAPDDHPGKCPLCQRNFSTYMGMRQHLRQAHPQSYNEELETAANNARKPWTEDEVRELTAAEYEYTGNNIMAYLSGLSGRSEEAIRKRRRTAEWTNAMIRHRQYKEIEERERAEEAAQTLRRELDAIIEEAHADPEIVEEELIAPPPLPENFRPIVQDEVMQYILDIAPLLVEEEDERFAAKICSGENKNFTLDEYANMIAGKYGTRQKATVTSNTEVALPSSRRKRRAAQFRATQRKYNKNKKQLATEIIDDVDPAISSIRPSNEEIKEEYEKIFSSSSKPDRWISAQEPDEITLYQPITEEKIIATIAALKPSAAGPDGITLRHLQQIPMQKLVLLYNAMLMIRKVPDCMKNSRTTLIPKKQDQLQYVNSWRPITVSSLLLRVCNKIIAERLATVPIHGHQRGFVRMDGVFANNISLHTAVKYRRENRQAYSIVTLDIKKAFDTLSHSTIERALKRKGLDKATSEYIMNNYDNAKTTISCSGEEVCTIPLNRGTKQGDPMSSAIFNLIMDELIEELEELPGMSIDDQKISCLAYADDILLMANDVKAARKLLSVCQSFFDSRHLELSVEKSHAISVGRAPGRRLFTHTTSQFFIHGKPIKQITVRESMDYLGGRFTATGITKCTIQNLRAQVERILKAPLKPAQKLNLIKAHLIPRYIHALQSPQIHMKTLKSADRAIRWGVKRALHLPIHVSDSVIHAPQKQGGLGVFSFSDKIPIIVSRRLQRLHGASPTIDAVLRCSETWLHRITRMIKPPGSSAAMMDGARAENLHSSFHGGGLGEMKHHRASNGYIDVPPRYWSGQDYVRAIQLRANVLPTAGLPYNNGEDARCRAGCERRETLCHVLQKCPLMHWERIKRHDYVVKRLKNIATKKGWQVTEEPNIRDLSGRLLKPDLLMTKESSIVISDVSVSWEAPEPLGTAYRTKKAIYSEPAFLESVRSRYPGMEIKVCPLIVGARGGWCPENGEIVQLLGMADSNIAELVHTAIRGGVIIHQQFNRLIWRRGRRAN

SEQ ID NO: 1875 - protein, 1127 aa, Adalia bipunctata
MPPPPQPPVGLLCVCGNGQRYPSAKALAQHQRLYCRGAPEEHQNRCPECGRDFDSYRGMRLHLKQAHPVQYNEELQEAARMARRPWSEEEYEELTAKEAAYLGTNIAAYLSGLSGRTEEAIKMQRKTTKWKNLVENHKREHRPLEAMLRITEGQEAPVRGAVARGGLAWSEDEVHTLASAEAIYKGEDLIQYLSGISGRSEEAIKKRRRTVEWRNAVEREKECQQIIERERVEEDAEQLRRELDRIVEEAQTEPEIIEEVLIGPPDRTQEFRPVVTDPVMQFILDIAPSLDEVEDITFAAEICTGQTKEAALNNYAANLIAKYGQKKKPKRSATNEEDLQTTSRRKQRAINFRNTQRKWTKNKKQLATEIIDGIDILKSSSRPSKEEITAEYRKILSGESKSDNWDPNTAVEPNFLYKPITQEQLEATIKATKQGAAGPDGITLRQLKQIPRHKLLLLYNSMLLVRQVPQCLKKSRTTLIPKKNDHLEKVKNWRPITVSSLLLRVCNKEMAGRLMEIPLHDHQRGFVRVDGVFANSISLHSAIKIKRKNRQGYSMIALDIQKAFDTLSHASIERALKRKGVDEATRQYIMANFQGAETTISCAGEEICDIKINRGTKQGDPMSPALFNLVMDELIEELEQMPGITVEHQKISCLAFADDLIIMADNVKDARKLLNRCQEFFDCRHLELNTEKSHAIAVGRAPGRRLFSYTTSQFFIHGKPIRNVEVKESMEYLGNRFSYMGITKCTIDNLRKQIDRILKAPLKPYQKLNLLKTHLIPRYIHALQSPQVHIKTLKSADRAIRWAVKRALHLPTHVSDPIIHAPQKEGGLGIFSFTDKIPIIMTNRLNRLQGKSAVLDAVIKIPEHWVTRIQKVIRPPHSTSALKDQQRAMELHSSFHGGGLGEMKHHRASNQFIDTPPRYWSGEDYVRAIQLRSNTLPTAGLPYNHGPEAKCRAGCERRETLCHVLQKCPIMHWERINRHNFVASRLKNQATKTGWSVLEEPHIRDSDGRLLKPDLLMIKGDLLVVSDISVSWEAPEPLCTAYENKKAIYSTPKFLEAVELRFPEKTIQVCPLIVGARGGWCPKNDQIARQLNLTSHNIADIVHTAMRGSIIIHKRFNQMIWRRSRRV

SEQ ID NO: 1876 - protein, 1118 aa, Harmonia axyridis
MHPCICGKTYVTERGLKDHQRKYCRGPPNVECPDSLCQYCGLNFKNYMAMRKHLSMAHPQEYNQELYVEVESSSRRLFWTDGEIEEMARLEATYQGDGLLDYLASRIDRPKEGIRKKRYGMQYRNTLERIKREIENEVIITREDLLSAGPSRPNTRSRAYSNPVGTRPLFAPRDRALSERAESVSLAPYEDDAGPPLEVGTEPEEFVYDPPEIRLPVPALVVDVVEPDEALRSPLSTQTVSESGAPGPIEPVLRESVSDEIPREAEDPVLRHLLEMCVAFEDARMIEVCRLVCMKMDGCREAFDEWMAEICRKYGRQSGGGALRTTETSAQEGGRRRRRALLFKQMQHKFRTNRKQLAREVLDGEHSGSQADTPRGEDILHEYRRIFETRTPVDSARITDAKVDQCKIYSPIVSTTILETIKEFGNTSAGPDGIDSARLRRIPVPILEFLFNLMLLSGYVPKMLRTSRTVLIPKGDQDRKNVNNWRPIAVTSILLRTINKIMAKRLSGAVGLDECQRGFTSVDGCFANNITLQTIIKGRRKSGKPATLITLDLRKAFDSVSHSSILRALRRFGVDEGTSRYIMANFEDQKTTIFCAGMEVGSVNICRGVKQGDPLSPILFNMVLDELMTSLKIRKGIQIGETNLSVLGYADDLLLMAENTKDAQFLLRYACRFFDDRSLTLNPEKCTSLTLAVVPSKKKLYLHPTPKFYVDGKPIPPIKSVTETFKYLGHHYTHAGATPCNLTALDDQLSRVMSAPLKPQQKVILIKQYLIPRYIHSLQSPSINIKILKKADRMVRRCFKKILKLPTHIIDESLYTPVSMGGLGLFSFARKIPIIMLGRLNKTRNTCPLFRRLLETDDSCLIKIMRMMPGNASTKREIDRSNADRLEQSFYGGGTKQAENNSAANFFIDNPPPMWSGRDFIAAIKLRTNTLPTKGLPYGPREAKMCRAGCGRVESLCHILQKCPLGHTKRINRHDFVVRRIVNMARSKDWTVEEEPHIRDTRGILNKPDMLCIKEDLLIVADVGVSWESPRLLSETYQLKRAIYNQPEFLAALSQRYPEKRIEVLPFVIGARGFWCRESDSLLNSLSINTQRNRRELVTTTMRGSWSIHMDVSRRTWD

SEQ ID NO: 1877 - protein, 1118 aa, Harmonia axyridis
MHPCICGKTYVTERGLKDHQRKYCRGPPNVECPDSLCQYCGLNFKNYMAMRKHLSMAHPQEYNQELYVEVESSSRRLFWTDGEIEEMARLEATYQGDGLLDYLASRIDRPKEGIRKKRYGMQYRNTLERIKREMENEVIITREDLLSAGPSRPNTRSRAYSNPVGARPLFAPRDRALSERAESVSLAPYEDDAGPPLEVGTEPEEFVYDPPDIRLPVPALVVDVVEPDEALRSPLSTQTVSESGAPGPIEPVLRESVSDEIPREAEDPVLRHLLEMCVAFEDARMIEVCRLVCMKMDGCREAFDEWMDEICRKYGRQSSGGALRTTETSAQEVGRRRRRALQFKQMQHKFRTNRKQLAREVLDGEHSGSQADTPRGEDILHEYRRIFETRPPVDSARITDAKVDQCKIYSPIVSATILETIKEFGNTSAGPDGIDSARLRRIPVPILEFLFNLMLLSGYVPKMLRTSRTVLIPKGDQDRKNVNNWRPIAVTSILLRTINKIMAKRLSGAVGLDECQRGFTSVDGCFANNITLQTIIKGRRKSGKPATLITLDLRKAFDSVSHSSILRALRRFGVDEGTSRYIMANFEDQKTTIFCAGMEVGSVNICRGVKQGDPLSPILFNMVLDELMTSLKIRKGIQIGETNLSVLGYADDLLLMAENTKDAQFLLRYACRFFDDRSLTLNPEKCTSLTLAVVPSKKKLYLHPTPKFYVDGKPIPPIKSVTETFKYLGHHYTHAGATPCNLTALDDQLSRVMSAPLKPQQKVILIKQYLVPRYIHSLQSPSINIKILKKADRMVRRCFKKILKLPTHIIDESLYTPVSMGGLGLFSFARKIPIIMLGRLNKTRNTCPLFRRLLETDDSCQIKIMRMMPGNASTKREIDRNNADRLEQSFYGGGTKQAENNSAANFFIDNPPPMWSGRDFIAAIKLRTNTLPTRGLPYGPREAKMCRAGCGRVESLCHILQKCPLGHTKRINRHDFVVRRIVNMARSKDWTVEEEPHIRDTRGILNKPDMLCTKEDLLIVADVGVSWESPRLLSETYQLKRAIYNQPEFLAALSQRYPEKRIEVLPFVIGARGFWCRESDSLLNSLSINTQRNRRELVTTTMRGSWSIHMDVSRRTWD

SEQ ID NO: 1878 - protein, 1118 aa, Harmonia axyridis
MHPCICGKTYVTERGLKDHQRKYCRGPPNVECPDSLCQYCGLNFKNYMAMRKHLSMAHPQEYNQELYVEVESSSRRLFWTDGEIEEMARLEATYQGDGLLDYLASRIDRPKEGIRKKRYGMQYRNTLERIKREIENEVIITREDLLSAGPSRPNTRSRAYSNPVGTRPLFAPRDRALSERAESVSLAPYEDDAGPSLEVGTEPEEFVYDPPEIRLPVPALVVDVVEPDEALRSPLSTRTVSVSGAPGPIEPVLRESVSDEIPREAEDPVLRHLLEMCVAFEDARMIEVCRLVCMKMDGCREAFDEWMDEICRKYGRQSGGGALRTTETSAQEVGRRRRRALQFKQMQHKFRTNRKQLAREVLDGEHSGSQADTPRGEDILHEYRRIFETRPPVDSARITDAKVDQCKIYSPIVSTTILETIKEFGNTSAGPDGIDSARLRRIPVPILEFLFNLMLLSGYVPKMLRTSRTVLIPKGDQDRKNVNNWRPIAVTSILLRTINKIMAKRLSGAVGLDECQRGFTSVDGCFANNITLQTIIKGRRKSGKPATLITLDLRKAFDSVSHSSILRALRRFGVDGGTSRYIMANFEDQKTTIFCAGMEVGSVNICRGVKQGDPLSPILFNMVLDELMTSLKIRKGIQIGETNLSVLGYADDLLLMAENTKDAQFLLRYACRFFDDRSLTLNPEKCTSLTLAVVPSKKKLYLHPTPKFYVDGKPIPPIKSVTETFKYLGHHYTHAGATPCNLTALDDQLSRVMSAPLKPQQKVILIKQYLIPRYIHSLQSPSINIKILKKADRMVRRCFKKILKLPTHIIDESLYTPVSMGGLGLFSFARKIPIIMLGRLNKTRNTCPLFRRLLETDDSCLIKIMRMMPGNASTKREIDRSNADRLEQSFYGGGTKQAENNSAANFFIDNPPPMWSGRDFIAAIKLRTNTLPTRGLPYGPREAKMCRAGCGRVESLCHILQKCPLGHTKRINRHDFVVRRIVNMARSKDWTVEEEPHIRDTRGILNKPDMLCIKEDLLIVADVGVSWESPRLLSETYQLKRAIYNQPEFLAALSQRYPEKRIEVLPFVIGARGFWCRESDSLLNSLSINTQRNRRELVTTTMRGSWSIHMDVSRRTWD

SEQ ID NO: 1879 - protein, 1118 aa, Harmonia axyridis
MHPCICGKTYVTERGLKDHQRKYCRGPPNVECPDSLCQYCGLNFKNYMAMRKHLSMAHPQEYNQELYVEVESSSRRLFWTDGEIEEMARLEATYQGDGLLDYLASRIDRPKEGIRKKRYGMQYRNTLERIKREIENEVIITREDLLSAGPSRPNTRSRAYSNPVGTRPLFAPRDRALSERAESVSLAPYEDDAGPPLEVGTEPEEFVYDPPEIRLPVPALVVDVVEPDEALRSPLSTQTVSESGAPGPIEPVLRESVSDEIPREAEDPVLRHLLEMCVAFEDARMIEVCRLVCMKMDGCREAFDEWMAEICRKYGRQSGGGALRTTETSAQEGGRRRRRALLFKQMQHKFRTNRKQLAREVLDGEHSGSQADTPRGEDILHEYRRIFETRTPVDSARITDAKVDQCKIYSPIVSTTILETIKEFGNTSAGPDGIDSARLRRIPVPILEFLFNLMLLSGYVPKMLRTSRTVLIPKGDQDRKNVNNWRPIAVTSILLRTINKIMAKRLSGAVGLDECQRGFTSVDGCFANNITLQTIIKGRRKSGKPATLITLDLRKAFDSVSHSSILRALRRFGVDEGTSRYIMANFEDQKTTIFCAGMEVGSVNICRGVKQGDPLSPILFNMVLDELMTSLKIRKGIQIGETNLSVLGYADDLLLMAENTKDAQFLLRYACRFFDDRSLTLNPEKCTSLTLAVVPSKKKLYLHPTPKFYVDGKPIPPIKSVTETFKYLGHHYTHAGATPCNLTALDDQLSRVMSAPLKPQQKVILIKQYLIPRYIHSLQSPSINIKILKKADRMVRRCFKKILKLPTHIIDESLYTPVSMGGLGLFSFARKIPIIMLGRLNKTRNTCPLFRRLLETDNSCLIKIMRMMPGNASTKREIDRSNADRLEQSFYGGGTKQAENNSAANFFIDNPPPMWSGRDFIAAIKLRTNTLPTKGLPYGPREAKMCRAGCGRVESLCHILQKCPLGHTKRINRHDFVVRRIVNMARSKDWTVEEEPHIRDTRGILNKPDMLCIKEDLLIVADVGVSWESPRLLSETYQLKRAIYNQPEFLAALSQRYPEKRIEVLPFVIGARGFWCRESDSLLNSLSINTQRNRRELVTTTMRGSWSIHMDVSRRTWD

SEQ ID NO: 1880 - protein, 1118 aa, Harmonia axyridis
MHPCICGKTYVTERGLKDHQRKYCRGPPNVECPDSLCQYCGLNFKNYMAMRKHLSMAHPQEYNQELYVEVESSSRRLFWTDGEIEEMARLEATYQGDGLLDYLASGIDRPKEGIRKKRYGMQYRNTLERIKREIENEVIITREDLLSAGPSRPNTRSRAYSNPVGTRPLFAPRDRALSERAESVSLAPYEDDAGPPLEVGTEPEEFVYDPPEIRLPVPALVVDVVEPDEALRSPLSTQTVSESGAPGPIEPVLRESVSDEIPREAEDPVLRHLLEMCVAFEDARMIEVCRLVCMKMDGCREAFDEWMAEICRKYGRQSGGGALRTTETSAQEGGRRRRRALLFKQMQHKFRTNRKQLAREVLDGEHSGSQADTPRGEDILHEYRRIFETRTPVDSARITDAKVDQCKIYSPIVSTTILETIKEFGNTSAGPDGIDSARLRRIPVPILEFLFNLMLLSGYVPKMLRTSRTVLIPKGDQDRKNVNNWRPIAVTSILLRTINKIMAKRLSGAVGLDECQRGFSSVDGCFANNITLQTIIKGRRKSGKPATLITLDLRKAFDSVSHSSILRALRRFGVDEGTSRYIMANFEDQKTTIFCAGMEVGSVNICRGVKQGDPLSPILFNMVLDELMTSLKIRKGIQIGETNLSVLGYADDLLLMAENTKDAQFLLRYACRFFDDRSLTLNPEKCTSLTLAVVPSKKKLYLHPTPKFYVDGKPIPPIRSVTETFKYLGHHYTHAGATPCNLTALDDQLSRVMSAPLKPQQKVTLIKQYLIPRYIHSLQSPSINIKILKKADRMVRRCFKKILKLPTHIIDESLYTPVSMGGLGLFSFARKIPIIMLGRLNKTRNTCPLFRRLLETDDSCLIKIMRMMPGNASTKREIDRSNADRLEQSFYGGGTKQAENNSAANFFIDNPPPMWSGRDFIAAIKLRTNTLPTKGLPYGPREAKMCRAGCGRVESLCHILQKCPLGHTKRINRHDFVVRRIVNMARSKDWTVEEEPHIRDTRGILNKPDMLCIKEDLLIVADVGVSWESPRLLSETYQLKRAIYNQPEFLAALSQRYPEKRIEVLPFVIGARGFWCRESDSLLNSLSINTQRNRRELVTTTMRGSWSIHMDVSRRTWD

SEQ ID NO: 1881 - protein, 1118 aa, Harmonia axyridis
MHPCICGKTYVTERGLKDHQRKYCRGPPNVECPDSLCQYCGLNFKNYMAMRKHLSMAHPQEYNQELYVEVESSSRRLFWTDGEIEEMARLEATYQGDGLLDYLASRIDRPKEGIRKKRYGMQYRNTLERIKREMENEVIITREDLLSAGPSRPNTRSRAYSNPVGARPLFAPRDRALSERAESVSLAPYEDDAGPPLEVGTEPEEFVYDPPDIRLPVPALVVDVVEPDEALRSPLSTQNLSESGAPGPIEPVLRESVSDEIPREAEDPVLRHLLEMCVAFEDARMIEVCRLVCMKMDGCREAFDEWMGEICRKYGRQSGGGALRTTETSAQEVGRRRRRALQFKQMQHKFRTNRKQLAREVLDGEHSGSQADTPRGEDILHEYRRIFETRPPVDSARITDAKVDQCKIYSPIVSATILETIKEFGNTSAGPDGIDSARLRRIPVPILEFLFNLMLLSGYVPKMLRTSRTVLIPKGDQDRKNVNNWRPIAVTSILLRTINKIMAKRLSGAVGLDECQRGFTSVDGCFANNITLQTIIKGRRKSGKPATLITLDLRKAFDSVSHSSILRALRRFGVDEGTSRYIMANFEDQKTTIFCAGMEVGSVNICRGVKQGDPLSPILFNMVLDELMTSLKIRKGIQIGETNLSVLGYADDLLLMAENTKDAQFLLRYACRFFDDRSLTLNPEKCTSLTLAVVPSKKKLYLHPTPKFYVDGKPIPPIKSVTETFKYLGHHYTHAGATPCNLTALDDQLSRVMSAPLKPQQKVILIKQYLVPRYIHSLQSPSINIKILKKADRMVRRCFKKILKLPTHIIDESLYTPVSMGGLGLFSFARKIPIIMLGRLNKTRNTCPLFRRLLETDDSCQIKIMRMMPGNASTKREIDRNNADRLEQSFYGGGTKQAENNSAANFFIDNPPPMWSGRDFIAAIKLRTNTLPTRGLPYGPREAKMCRAGCGRVESLCHILQKCPLGHTKRINRHDFVVRRIVNMARSKDWTVEEEPHIRDTRGILNKPDILCTKEDLLIVADVGVSWESPRLLSETYQLKRAIYNQPEFLAALSQRYPEKRIEVLPFVIGARGFWCRESDSLLNSLSINTQRNRRELVTTTMRGSWSIHMDVSRRTWD

SEQ ID NO: 1882 - protein, 1118 aa, Harmonia axyridis
MHPCICGKTYVTERGLKDHQRKYCRGPPNVECPDSLCQYCGLNFKNYMAMRKHLSMAHPQEYNQELYVEVESSSRRLFWTDGEIEEMARLEATYQGDGLLDYLASRIDRPKEGIRKKRYGMQYRNTLERIKREMENEVIITREDLLSAGPSRPNTRSRAYSNPVGARPLFAPRDRALSERAESVSLAPYEDDAGPPLEVGTEPEEFVYDPPDIRLPVPALVVDVVEPDEALRSPLSTQTVSESGAPGPIEPVLRESVSDEIPREAEDPVLRHLLEMCVAFEDARMIEVCRLVCMKMDGCREAFDEWMDEICRKYGRQSGGGALRTTETSAQEVGRRRRRALQFKQMQHKFRTNRKQLAREVLDGEHSGSQADTPRGEDILHEYRRIFETRPPVDSARITDAKVDQCKIYSPIVSATILETIKEFGNTSAGPDGIDSARLRRIPVPILEFLFNLMLLSGYVPKMLRTSRTVLIPKGDQDQKNVNNWRPIAVTSILLRTINKIMAKRLSGAVGLDECQRGFTSVDGCFANNITLQTIIKGRRKSGKPATLITLDLRKAFDSVSHSSILRALRRFGVDEGTSRYIMANFEDQKTTIFCAGMEVGSVNICRGVKQGDPLSPILFNMVLDELMTSLKIRKGIQIGETNLSVLGYADDLLLMAENTKDAQFLLRYACRFFDDRSLTLNPEKCTSLTLAVVPSKKKLYLHPTPKFYVDGKPIPPIKSVTETFKYLGHHYTHAGATPCNLTALDDQLSRVMSAPLKPQQKVILIKQYLVPRYVHSLQSPSINIKILKKADRMVRRCFKKILKLPTHIIDESLYTPVSMGGLGLFSFARKIPIIMLGRLNKTRNTCPLFRRLLETDDSCQIKIMRMMPGNASTKREIDRNNADRLEQSFYGGGTKQAENNSAANFFIDNPPPMWSGRDFIAAIKLRTNTLPTRGLPYGPREAKMCRAGCGRVESLCHILQKCPLGHTKRINRHDFVVRRIVNMARSKDWTVEEEPHIRDTRGILNKPDMLCIKEDLLIVADVGVSWESPRLLSETYQLKRAIYNQPEFLAALSQRYPEKRIEVLPFVIGARGFWCRESDSLLNSLSINTQRNRRELVTTTMRGSWSIHMDVSRRTWD

SEQ ID NO: 1883 - protein, 1118 aa, Harmonia axyridis
MHPCICGKTYVTERGLKDHQRKYCRGPPNVECPDSLCQYCGLNFKNYMAMRKHLSMAHPQEYNQELYVEVESSSRRLFWTDGEIEEMARLEATYQGDGLLDYLASRIDRPKEGIRKKRYGMQYRNTLERIKREMENEVIITREDLLSAGPSRPNTRSRAYSNPVGARPLFAPRDRALSERAESVSLAPYEDDAGPPLEVGTEPEEFVYDPPDIRLPAPALVVDVVEPDEALRSPLSTQTVSESGAPGPIEPVLRESVSDEIPREAEDPVLRHLLEMCVAFEDARMIEVCRLVCMKMDGCREAFDEWMDEICRKYGRQSGGGALRTTETSAQEVGRRRRRALQFKQMQHKFRTNRKQLAREVLDGEHSGSQADTPRGEDILHEYRRIFETRPPVDSARITDAKVDQCKIYSPIVSATILETIKEFGNTSAGPDGIDSARLRRIPVPILEFLFNLMLLSGYVPKMLRTSRTVLIPKGDQDRKNVNNWRPIAVTSILLRTINKIMAKRLSGAVGLDECQRGFTSVDGCFANNITLQTIIKGRRKSGKPATLITLDLRKAFDSVSHSSILRALRRFGVDEGTSRYIMANFEDQKTTIFCAGMEVGSVNICRGVKQGDPLSPILFNMVLDELMTSLKIRKGIQIGETNLSVLGYADDLLLMAENTKDAQFLLRYACRFFDDRSLTLNPEKCTSLTLAVVPSKKKLYLHPTPKFYVDGKPIPPIKSVTETFKYLGHHYTHAGATPCNLTALDDQLSRVMSAPLKPQQKVILIKQYLVPRYIHSLQSPSINIKILKKADRMVRRCFKKILKLPTHIIDESLYTPVSMGGLGLFSFARKIPIIMLGRLNKTRNTCPLFRRLLETDDSCQIKIMRMMPGNASTKREIDRNNADRLEQSFYGGGTKQAENNSAANFFIDNPPPMWSGRDFIAAIKLRTNTLPTRGLPYGPREAKMCRAGCGRVESLCHILQKCPLGHTKRINRHDFVVRRIVNMARSKDWTVEEEPHIRDTRGILNKPDMLCTKEDLLIVADVGVSWESPRLLSETYQLKRAIYNQPEFLAALSQRYPEKRIEVLPFVIGARGFWCRESDSLLNSLSINTQRNRRELVTTTMRGSWSIHMDVSRRTWD

SEQ ID NO: 1884 - protein, 1118 aa, Harmonia axyridis
MHPCICGKTYVTERGLKDHQRKYCRGPPNVECPDSLCQYCGLNFKNYMAMRKHLSMAHPQEYNQELYVEVESSSRRLFWTDGEIEEMARLEATYQGDGLLDYLASRIDRPKEGIRKKRYGMQYRNTLERIKREMENEVIITREDLLSAGPSRPNTRSRAYSNPVGARPLFAPRDRALSERAESVSLAPYEDDAGPPLGVGTEPEEFVYDPPDIRLPVPALVVDVVEPDEALRSPLSTQTVSESGAPGPIEPVLRESVSDEIPREAEDPVLRHLLEMCVAFEDARMIEVCRLVCMKMDGCREAFDEWMDEICRKYGRQSGGGALRTTETSAQEVGRRRRRALQFKQMQHKFRTNRKQLAREVLDGEHSGSQADTPRGEDILHEYRRIFETRPPVDSARITDAKVDQCKIYSPIVSATILETIKEFGNTSAGPDGIDSARLRRIPVPILEFLFNLMLLSGYVPKMLRTSRTVLIPKGDQDRNNVNNWRPIAVTSILLRTINKIMAKRLSGAVGLDECQRGFTSVDGCFANNITLQTIIKGRRKSGKPATLITLDLRKAFDSVSHSSILRALRRFGVDEGTSRYIMANFEDQKTTIFCAGMEVGSVNICRGVKQGDPLSPILFNMVLDELMTSLKIRKGIQIGETNLSVLGYADDLLLMAENTKDAQFLLRYACRFFDDRSLTLNPEKCTSLTLAVVPSKKKLYLHPTPKFYVDGKPIPPIKSVTETFKYLGHHYTHAGATPCNLTALDDQLSRVMSAPLKPQQKVILIKQYLVPRYIHSLQSPSINIKILKKADRMVRRCFKKILKLPTHIIDESLYTPVSMGGLGLFSFARKIPIIMLGRLNKTRNTCPLFRRLLETDDSCQIKIMRMMPGNASTKREIDRNNADRLEQSFYGGGTKQAENNSAANFFIDNPPPMWSGRDFIAAIKLRTNTLPTRGLPYGPREAKMCRAGCGRVESLCHILQKCPLGHTKRINRHDFVVRRIVNMARSKDWTVEEEPHIRDTRGILNKPDMLCTKEDLLIVADVGVSWESPRLLSETYQLKRAIYNQPEFLAALSQRYPEKRIEVLPFVIGARGFWCRESDSLLNSLSINTQRNRRELVTTTMRGSWSIHMDVSRRTWD

SEQ ID NO: 1885 - protein, 1094 aa, Membranipora membranacea
MMGNPPLATSSYMEKCPQGLPGNEGEDERPTGTRLTVITNSEMPWTCVCQRGFKTERGMKIHRTKKGCEVVLENRSVDNSAPKTDGTLPQVENHSGQTTISQTPTEHHGSGCERQEVEWPKMSSVKTWRELDEYAVVALNSALTGSGEKKAKQLPAILFSICEEKFGLVAKRGGTQCTKIPNRRQYEKGKLRTQQRALRERMRNCAESERHGLSVLLNDVKDRIRRLARAEALRKKRKLKRKNLNNFMKNPYGFAKKLFEQSKSGELKASQAEVEAHLAKVYGNKSEVNTDIAGLKRPTSPGFSFEMGDIKLGEVAHVVTKARAKSAPGINGISYKLYKKCPGILEILTKVLNQIWKSGKIPDEWCCANGVYIPKEDKAEDLGQFRPISLLNVEGKIFFSVLAKRLTDYLMNNGFIDPSVQKAGIPGFPGCLEHVSMIWSAIKSAKQAKSNLEVIWLDLANAYGSVPHSIIDLALSHFWVPDRLRVMVERYYKKFKMRFTTKNFTTSWQELAVGIPMGCAISPLLFVMVMEIVIRNSQGSVNGIQVANNQILPPMRAFMDDITIISPDKAQVVASIDRLHELIERCAMRFKPSKSRSLSLCKGKPVPNTYFIGTERIPTLAEQPVKSLGRWYSLPITDRFRGNEVKKQLITGLDAIEKCGLSGKYKAWILNFALMPRILWPLTVYDIPLTPVERMEQMINKHMRKWLGVPRSFNTNALYASSFTLSLPMKSLVEEYKTSKARLDMMLNESPDQVIRECAPTLDTGKKWSVTETVRDAKSRLEISEIVGAVTTARHGIGWEANRWFSKESPKVRREMVVDEVRKMEEERRQTQAVGQAQQGRWTCWESVEQRQLKWTELWSMEPQRISFLVGAAYDQLPTPANLERWNLTENSKCAECSAKGTLRHILSNCQQSLGRYTYRHNQVLKVLCKYVTEKCEYANAGGEAREKILRKKGLMNSGEWQVRCDLTEQLSMPQHIVITNQRPDLIVWSDKEKALILMELTVPWEENLSYAHERKLTRYEDLVTQCQDKGWNCELFAVEVGCRGFMARSATKFLTRVGLSGRALKQATKSIVHEAESASAWIWQQHCVKTKAK

SEQ ID NO: 1886 - protein, 1093 aa, Membranipora membranacea
MGNPPLATSSYMEKCPQGLPGNEGEDERPTGTRLTVITNSEMPWTCVCQRGFKTERGMKIHRTKKGCEVVLENRSVDNSAPKTDGTLPQVENHSGQTTNSQTPTEHHGSGCERQEVEWPKMSSVKTWRELDEYAVVALNSALTGSGEKKAKQLPAILFSICEEKFGLVAKRGGTQCTKIPNRRQYEKGKLRTQQRALRERMRNCAESERHGLSVLLNDVKERIRRLARAEALRKKRKLKRKNLNNFMKNPYGFAKKLFEPSKSGELKASQAEVEAHLAKVYGNKSEVNTDIAGLKRPTSPGFSFEMGDIKLGEVAHVVTKARAKSAPGNNGISYKLYKKCPGILEILTKVLNQIWKSGKIPDEWCCANGVYIPKEDKAEDLGQFRPISLLNVEGKIFFSVLAKRLTDYLMNNGFIDPSVQKAGIPGFPGCLEHVSMIWSAIKSAKQAKSNLEVIWLDLANAYGSVPHSIIDLALSHFWVPDRLRVMVERYYKKFKMRFTTKNFTTSWQELAVGIPMGCAISPLLFVMVMEIVIRNSQGSVNGIQVANNQILPPMRAFMDDITIISPDKAQVVASIDRLHELIERCAMRFKPSKNRSLSLCKGKPVPNTYFIGTERIPTLAEQPVKSLGRWYSLPITDRFRGNEVKKQLITGLDAIEKCGLSGKYKAWILNFALMPRILWPLTVYDIPITPVERMEQMINKHMRKWLGVPRSFNTNAPYASSFTLSLPMKSLVEEYKTSKARLDMMLNESPDQVIRECAPTLDTGKKWSVTETVRDAKSRLEISEIVGAVTTARHGIGWEANRWFSKESPKVRREMVVDEVRKMEEERRQTQAVGQAQQGRWTCWESVEQRQLKWTELWSMEPQRISFLVGAAYDQLPTPANLERWNLTENSKCAECSAKGTLRHILSNCQQSLGRYTYRHNQVLKVLCKYVTEKCEYANAGGEAREKILRKKGLMNSGEWQVRCDLTEQLSMPQHIVITNQRPDLIVWSDKEKALILMELTVPWEENLSYAHERKLTRYEDLVTQCQDKGWNCELFAVEVGCRGFMARSATKFLTRVGLSGRALKQATKSIVHEAESASAWIWQQHCVKTKAK

SEQ ID NO: 1887 - protein, 1093 aa, Membranipora membranacea
MGNPPLATSSYMEKCPQGLPGNEGEDERPTGTRLTVITNSEMPWTCVCQRGFKTERGMKIHRTKKGCEVVLENRSVDNSAPKTDGTLPQVENHSGQTTNSQTPTEHHGSGCERQEVEWPKMSSVKTWRELDEYAVVALNSALTGSGEKKAKQLSAILFSICEEKFGLVAKRGGTQCTKISNRRQYEKGKLRTQQRALRERMRNCAESERHGLSVLLNDVKERIRRLARAEALRKKRKLKRKNLNNFMKNPYGFAKKLFEQSKSGELKASQAEVEAHLAKVYGNKSEVNTDIAGLKCPTSPGFSFEMGDIKLGEVAHVVTKARAKSAPGINGISYKLYKKCPGILEILTKVLNQIWKSGKIPDEWCCANGVYIPKEDKAEYLGQFRPISLLNVEGKIFFSVLAKRLTDYLMNNGFIDPSVQKAGIPGFPGCLEHVSMIWSAIKSAKQAKSNLEVIWLDLANAYGSVPHSIIDLALSHFWVPDRLRVMVERYYKKFKMRFTTKNFTTSWQELAVGIPMGCAISPLLFVMVMEIVIRNSQGSVNGIQVANNQILPPMRAFMDDITIISPDKAQVVASIDRLHELIERCAMRFKPSKSRSLSLCKGKPVPNTYFIGTERIPTLAEQPVKSLGRWYSLPITDRFRGNEVKKQLITGLDAIEKCGLSGKYKAWILNFALMPRILWPLTVYDIPLTPVERMEQMINKHMRKWLGVPRSFNTNALYASSFTLSLPMKSLVEEYKTSKARLDMMLNESPDQVIRECAPTLDTGKKWSVTETVRDAKSRLEISEIVGAVTTARHGIGWEANRWFSKESPKVRREMVVDEVRKMEEERRQTQAVGQAQQGRWTCWESVEQRQLKWTELWSMEPQRISFLVGAAYDQLPTPANLERWNLTENSKCAECSAKGTLRHILSNCQQSLGRYTYRHNQVLKVLCKYVTEKCEYANAGGEAREKILRKKGLMNSGEWQVRCDLTEQLSMPQHIVITNQRPDLIVWSDKEKALILMELTVPWEENLSYAHERKLTRYEDLVTQCQDKGWNCELFAVEVGCRGFMARSATKFLTRVGLSGRALKQATKSIVHEAESASAWIWQQHCVKTKAK

SEQ ID NO: 1888 - protein, 1093 aa, Membranipora membranacea
MGNPPLATSSYMEKCPQGLSGNEGEDERPTGTRLTVITNSEMPWTCVCHRGFKTERGMKIHRTKKGCEVVLENRSVDNAAPKTDGTLPQVENHSAQTTNSQTPTEHHGSGCERQEVEWSKMSSVKTWRELDEYAVVALNSALTGSGEKKAKQLPAILFSICEEKFGLVAKRGGTQCTKIPNRRQYEKGKLRTQQRALRERMRNCAESERHGLSVLLNDVKEGIRRLARAEALRKKRKLKRKNLNNFMKNPYGFAKKLFEQSKSGELKASQAEVEAHLAKVYGNKSEVNTDIAGLKRPTSPGFSFEMGDIKLGEVAHVVTKARAKSAPGINGISYKLYKKCPGILEILTKVLNQIWKSGKIPDEWCCANGVYIPKEDKAEDLGQFRPISLLNVEGKIFFSVLAKRLTDYLMNNGFIDPSVQKAGIPGFPGCLEHVSMIWSAIKSAKQAKSNLEVIWLDLANAYGSVPHSIIDLALSHFWVPDRLRVMVERYYKKFKMRFTTKNFTTSWQELAVGIPMGCAISPLLFVMVMEIVIRNSQGSVNGIQVANNQILPPMRAFMDDITIISPDKAQVVASIDRLHELIERCAMRFKPSKSRSLSLCKGKPVPNTYFIGTERIPTLAEQPVKSLGRWYSLPITDRFRGNEVKKQLITGLDAIEKCGLSGKYKAWILNFALMPRILWPLTVYDIPLTPVERMEQMINKHMRKWLGVPRSFNTNALYASSFTLSLPMKSLVEEYKTSKARLDMMLNESPDQVIRECAPTLDTGKKWSVTETVRDAKSRLEISEIVGAVTTARHGIGWEANRWFSKESPKVRREMVVDEVRKMEEERRQTQAVGQAQQGRWTCWESVEQRQLKWTELWSMEPQRISFLVGAAYDQLPTPANLERWNLTENSKCAECSAKGTLRHILSNCQQSLGRYTYRHNQVLKVLCKYVTEKCEYANAGGEAREKILRKKGLMNSGEWQVRCDLTEQLSMPQHIVITNQRPDLIVWSDKEKALILMELTVPLEENLSYAHERKLTRYEDLVTQCQDKGWNCELFAVEVGCRGFMARSATKFLTRVGLSGRALKQATKSIVHEAESASAWIWQQHCVKTKAK

SEQ ID NO: 1889 - protein, 1082 aa, Membranipora membranacea
MQHSYYLTHSIIGEDERPTGTRLTVITNSEMPWTCVCQRGFKTERGMKIHRTKKGCEVVLENRSVDNSAPKTDGTLPQVENHSGQTTNSQTPTEHHGSGCERQEVEWPKMSSVKTWRELDEYAVVALNSALTGSGEKKAKQLPAILFSICEEKFGLVAKRGGTQCTKIPNRRQYEKGKLRTQQRALRERMRNCAESERHGLSVLLNDVKERIRRLARAEALRKKRKLKRKNLNNFMKNPYGFAKKLFEQSKSGELKASQAEVEAHLAKVYGNKSEVNTDIAGLKRPTSPGFSFEMGDIKLGEVAHVVTKARAKSAPGINGISYKLYKKCPGILEILTKVLNQIWKSGKIPDEWCCANGVYIPKEDKAEDLGQFRPISLLNVEGKIFFSVLAKRLTDYLMNNGFIDPSVQKAGIPGFPGCLEHVSMIWSAIKSAKQAKSNLEVIWLDLANAYGSVPHSIIDLALSHFWVPDRLRVMVERYYKKFKMRFTTKNFTTSWQELAVGIPMGCAISPLLFVMVMEIVIRNSQGSVNGIQVANNQILPPMRAFMDDITIISPDKAQVVASIDRLHELIERCAMRFKPSKSRSLSLCKGKPVPNTYFIGTERIPTLAEQPVKSLGRWYSLPITDRFRGNEVKKQLITGLDAIEKCGLSGKYKAWILNFALMPRILWPLTVYDIPLTPVERMEQMINKHMRKWLGVPRSFNTNALYASSFTLSLPMKSLVEEYKTSKARLDMMLNESPDQVIRECAPTLDTGKKWSVTETVRDAKSRLEISEIVGAVTTARHGIGWEANRWFSKESPKVRREMVVDEVRKMEEERRQTQAVGQAQQGRWTCWESVEQRQLKWTELWSMEPQRISFLVGAAYDQLPTPANLERWNLTENSKCAECSAKGTLRHILSNCQQSLGRYTYRHNQVLKVLCKYVTEKCEYANAGGEAREKILRKKGLMNSGEWQVRCDLTEQLSMPQHIVITNQRPDLIVWSDKEKALILMELTVPWEENLSYAHERKLTRYEDLVTQCQDKGWNCELFAVEVGCRGFMARSATKFLTRVGLSGRALKQATKSIVHEAESASAWIWQQHCVKTKAK

SEQ ID NO: 1890 - protein, 1093 aa, Membranipora membranacea
MGNPPLATSSYMEKCPQGLPGNEGEDERPTGTRLTVITNSEMPWTCVCQRGFKTERGMKIHRTKKGCEVVLENRSVDNSAPKTDGTLPQVENHSGQTTNSQTPTEHHGSGCERQEVEWPKMSSVKTWRELDEYAVVALNSALTGSGEKKAKQLPAILFSICEEKFGLVAKRGGTQCTKIPNRRQYEKGKLRTQQRALRERMRNCAESERHGLSVLLNDVKERIRRLARAEALRKKRKLKRKNLNNFMKNPYGFAKKLFEQSKSGELKASQAEVEAHLAKVYGNKSEVNTDIAGLKRPTSPGFSFEMGDIKLGEVAHVVTKARAKSAPGINGISYKLYKKCPGILEILTKVLNQIWKSGKIPDEWCCANGVYIPKEDKAEDLGQFRPISLLNVEGKIFFSVLAKRLTDYLMNNGFIDPSVQKAGIPGSPGCLEHVSMIWSAIKSAKQAKSNLEVIWLDLANAYGSVPHSIIDLALSHFWVPDRLRVMVERYYKKFKMRFTTKNFTTSWQELAVGIPMGCAISPLLFVMVMEIVIRNSQGSVNGIQVANNQILPPMRAFMDDITIISPDKAQVVASIDRLHELIERCAMRFKPSKSRSLSLCKGKPVPNTYFIGTERIPTLAEQPVKSLGRWYSLPITDRFRGNEVKKQLITGLDAIEKCGLSGKYKAWILNFALMPRILWPLTVYDIPLTPVERMEQMINKHMRKWLGVPRSFNTNALYASSFTLSLPMKSLVEEYKTSKARLDMMLNESPDQVIRECAPTLDTGKKWSVTETVRDAKSRLEISEIVGAVTTARHGIGWEANRWFSKESPKVRREMVVDEVRKMEEERRQTQAVGQAQQGRWTCWESVEQRQLKWTELWSMEPQRISFLVGAAYDQLPTPANLERWNLTENSKCAECSAKGTLRHILSNCQQSLGRYTYRHNQVLKVLCKYVTEKCEYANAGGEAREKILRKKGLMNSGEWQVRCDLTEQLSMPQHIVITNQRPDLIVWSDKEKALILMELTVPWEENLSYAHERKLTRYEDLVTQCQDKGWNCELFAVEVGCRGFMARSATKFLTRVGLSGRALKQATKSIVHEAESASAWIWQQHCVKTKAK

SEQ ID NO: 1891 - protein, 1052 aa, Membranipora membranacea
MPWTCVCQRGFKTERGMKIHRTKKGCEVVLENRSVDNSAPKTDGTLPQVENHSGQTTNSQTPTEHHGSGCERQEVEWPKMSSVKTWRELDEYAVVALNSALTGSGEKKAKQLPAILFSICEEKFGLVAKRGGTQCTKIPNRRQYEKGKLRTQQRALRERMRNCAESERHGLSVLLNDAKERIRRLARAEALRKKRKLKRKNLNNFMKNPYGFAKKLFEQSKSGELKASQAEVEAHLAKVYGNKSEVNTDIAGLKRPTSPGFSFEMGDIKLGEVAHVVTKARAKSAPGINGISYKLYKKCPGILEILTKVLDQIWKSGKIPDEWCCANGVYIPKEDKAEDLGQFRPISLLNVEGKIFFSVLAKRLTDYLMNNGFIDPSVQKAGIPGFPGCLEHVSMIWSAIKSAKQVKSNLEVIWLDLANAYGSVPHSIIDLALSHFWVPDRLRVMVERYYKKFKMRFTTKNFTTSWQELAVGIPMGCAISPLLFVMVMEIVIRNSQGSVNGIQVANNQILPPMRAFMDNITIISPDKAQVVASIDRLHELIERCAMRFKPSKSRSLSLCKGKPVPNTYFIGTERIPTLAEQPVKSLGRWYSLPITDRFRGNEVKKQLITGLDAIEKCGLSGKYKAWILNFALMPRILWPLTVYDIPLTPVERMEQMINKHMRKWLGVPRSFNTNALYASSFTLSLPIKSLVEEYKTSKARLDMMLNESPDQVIRECAPTLDTGKKWSVTETVRDAKSRLEISEIVGAVTTARHGIGWEANRWFSKESPKVRREMVVDEVRKMEEERRQTQAVGQAQQGRWTCWESVEQRQLKWTELWSMEPQRISFLVGAAYDQLPTPANLERWNLTENSKCAECSAKGTLRHILSNCQQSLGRYTYRHKQVLKVLCKYVTEKCEYANAGGEALEKILRKKGLMNSGEWQVRCDLTEQLSMPQHIVITNQRPDLIVWSDKEKALILMELTVPWEENLSYAHERKLTRYEDLVTQCQDKGWNCELFAVEVGCRGFMARSATKFLTRVGLSGRALKQATKNIVHEAESASAWIWQQHCVKTKAK

SEQ ID NO: 1892 - protein, 1093 aa, Membranipora membranacea
MGNPPLATSSYMEKCPQGLPGNEGEDERPTGTRLTVITNSEMPWTCVCQRGFKTERGMKIHRTKKGCEVVLENRSVDNSAPKTDGTLPQVENHSGQTTNSQTPTEHHGSGCERQEVEWPKMSSVKTWRELDEYAVVALNSALTGSGEKKAKQLPAILFSICEEKFGLVAKRGGTQCTKIPNRRQYEKGKLRNQQRALRERMRNCAESERHGLSVLLNDVKERLRRLARAEALRKKRKLKRKNLNNFMKNPYGFAKKLFEQSKSGELKASQAEVEAHLAKVYGNKSEVNTDIAGLKRPTSPGFSFEMGDIKLGEVAHVVTKARAKSAPGINGISYKLYKKCPGILEILTKVLNQIWKSGKIPDEWCCANGVYIPKEDKAEDLGQFRPISLLNVEGKIFFSVLAKRLTDYLMNNGFIDPSVQKAGIPGFPGCLEHVSMIWSAIKSAKQAKSNLEVIWLDLANAYGSVPHSIIDLALSHFWVPDRLRVMVERYYKKFKMRFTTKNFTTSWQELAVGIPMGCAISPLLFVMVMEIVIRNSQGSVNGIQVANNQILPPMRAFMDDITIISPDKAQVVASIDRLHELIERCAMRFKPSKSRSLSLCKGKPVPNTYFIGTERIPTLAEQPVKSLGRWYSLPITDRFRGNEVKKQLITGLDAIEKCGLSGKYKAWILNFALMPRILWPLTVYDIPLTPVERMEQMINKHMRKWLGVPRSFNTNALYASSFTLSLPMKSLVEEYKTSKARLDMMLNESPDQVIRECAPTLDTGKKWSVTETVRDAKSRLEISEIVGAVTTARHGIGWEANRWFSKESPKVRREMVVDEVRKMEEERRQTQAVGQAQQGRWTCWESVEQRQLKWTELWSMEPQRISFLVGAAYDQLPTPANLERWNLTENSKCAECSAKGTLRHILSNCQQSLGRYTYRHNQVLKVLCKYVTEKCEYANAGGEAREKILRKKGLMNSGEWQVRCDLTEQLSMPQHIVITNQRPDLIVWSDKEKALILMELTVPWEENLSYAHERKLTRYEDLVTQCQDKGWNCELFAVEVGCRGFMARSAIKFLTRVGLSGRALKQATKSIVHEAESASAWIWQQHCVKTKAK

SEQ ID NO: 1893 - protein, 893 aa, Membranipora membranacea
MRNCAESERHGLCVLLNDVKERIRRLARAEALRKKRKLKRKNLNNFMKNPYGFAKKLFEQSKSGELKASQAEVEAHLAKVYGNKSEVNTDIAGLKRPTSPGFSFEMGDIKLGEVAHVVTKARAKSAPGINGISYKLYKKCPGILEILTKVLNQIWKSGKIPDEWCFANGVYIPKEDKAEDLGQFRPISLLNVEGKIFFSVLAKHLTDYLMNNGFIDPSVQKAGIPGFPGCLEHVSMIWSAIKSAKQAKSNLEVIWLDLANAFGSVPHSIIDLALSHFWVPDRLRVMVERYYKKFKMRFTTKNFTTSWQELAVGIPMGCAISPLLFVMVMEIVIRNSQGSVNGIQVANNQILPPMRAFMDDITIISPDKAQVVASIDRLHELIERCAMRFKPSKSRSLSLCKGKPVPNTYFIGTERIPTLAEQPVKSLGRWYSLPITDRFRGNEVKKQLITGLDAIEKCGLSGKYKAWILNFALMPRILWPLTVYNIPLTPVERMEQMINKHMRKWLGVPRSFNTNALYASSFTLSLPMKSLVEEYKTSKARLDMMLNESPDQVIRECAPTLDTGKKWSVTETVRDAKSRLEISEIVGAVTTARHGIGWEANRWFSKESPKVRREMVVDEVRKMEEERRQTQAVGQAQQGRWTCWESVEQRQLKWTELWSMEPQRISFLVGAAYDQLPTPANLERWNLTENSKCAECSAKGTLQHILSNCQQSLGRYTYRHNQVLKVLCKYVTEKCEYANTGGEAREKILRKKGLMNSGEWQVRCDLTEQLSMPQHIVITNQRPDLIVWSDKERALILMELTVPWEENLSYAHDRKLTRYEDLVTQCQDKGWNCELFAVEVGCRGFMARSATKFLTRVGLSGRALKQATKSIVHEAESASAWIWQQHCVKTKAK

SEQ ID NO: 1894 - protein, 1093 aa, Membranipora membranacea
MGNPPLATSSYMEKCPQGLPGNEGEDERPTGTRLTVITNSEMPWTCVCQRGFKTERGMKIHRTKKGCEVVLENRSVDNSAPKTDGTLPQVENHSGQTTNSQTPTEHHGSGCERQEVEWPKMSSVKTWRELDEYAVVALNSALTGSGEKKAKQLPAILFSICEEKFGLVAKRGGTQCTKIPNRRQYEKGKLRTQQRALRERMRNCAESERHGLSVLLNDVKERIRRLARAEALRKKRKLKRKNLNNFMKNPYGFAKKLFEQSKSGELKASQAEVEAHLAKVYGNKSEVNTDIAGLKRPTSPGFSFEMGDIKLGEVAHVVTKARAKSAPGINGISYKLYKKCPGILEILTKVLNQIWKSGKIPDEWCCANGVYIPKEDKAEDLGQFRPISLLNVEGKIFFSVLAKRLTDYLMNNGFIDPSVQKAGIPGFPGCLEHVSMIWSAIKSAKQAKSNLEVIWLDLANAYGSVPHSIIDLALSHFWVPDRLRVMVERYYKKFKMRFTTKNFTTSWQELAVGIPMGCAISPLLFVMVMEIVIRNSQGSVNGIQVANNQILPPMRAFMDDITIISPDKAQVVASIDRLHELIERCAMRFKPSKSQSLSLCKGKPVPNTYFIGTERIPTLAEQPVKSLGRWYSLPITDRFRGNEVKKQLITGLDAIEKCGLSGKYKAWILNFALMPRILWPLTVYDIPLTPVERMEQMINKHMRKWLGVPRSFNTNALYASSFTLSLPMKSLVEEYKTSKARLDMMLNESPDQVIRECAPTLDTGKKWSVTETVRDAKSRLEISEIVGAVTTARHGIGWEANRWFSKESPKVRREMVVDEVRKMEEERRQTQAVGQAQQGRWTCWESAEQRQLKWTELWSMEPQRISFLVGAAYDQLPTPANLERWNLTENSKCAECSAKGTLRHILSNCQQSLGRYTYRHNQVLKVLCKYVTEKCEYANAGGEAREKILRKKGLMNSGEWQVRCDLTEQLSMPQHIVITNQRPDLLVWSDKEKALILMELTVPWEENLSYAHERKLTRYEDLVTQCQDKGWNCELFAVEVGCRGFMARSATKFLTRVGLSGRALKQATKSIVHEAESASAWIWQQHCVKTKAK

SEQ ID NO: 1895 - protein, 1039 aa, Membranipora membranacea
MPHSRVEGAWPDTLVSLVYLFVDNSAPKTDGTLPQVENHSGQTTNSQTPTEHHGSGCERQEVEWPKMSSVKTWRELDEYAVVALNSALTGSGEKKAKQLPAILFSICEEKFGLVAKRGGTQCTKIPNRRQYEKGKLRTQQRALRERMRNCAESERHGLSVLLNDVKERIRRLARAEALRRKKKLKRKNLNNFMKNPYGFAKKLFEQSKSGELKASQAEVEAHLAKVCGNKSEVNTDIAGLKRPTSPGFSFEMGDIKLGEVAHVVTKARAKSAPGINGISYKLYKKCPGILEILTKVLNQIWKSGKIPDEWCCANGVYIPKEDKAEDLGQFRPISLLNVEGKIFFSVLAKRLTDYLMNNGFIDPSVQKAGIPGFPGCLEHVSMIRSAIKSAKQAKSNLEVIWLDLANAYGSVPHSIIDLALSHFWVPDRLRVMVERYYKKFKMRFTTKNFTTSWQELAVGIPMGCAISPLLFIMVMEIVIRNSQGSVNGIQVANNQILPPMRAFMDDITIISPDKAQVVASIDRLHELIERCAMRFKPSKSRSLSLCKGKPVPNTYFIGTERIPTLAEQPVKSLGRWYSLPITDRFRGNEVKKQLITGLDAIEKCGLSGKYKAWILNFALMPRILWPLTVYDFPLTPVERMEQMINKHMRGWLGVPRSFNTNALYASSFTLSLPMKSLVEEYKTSKARLDMMLNESPDQVIRECAPTLDTGKKWSVTETVRDAKSRLEISEIVGAVTTARHGIGWEANRWFSKESPKVRREMVVDEVRKMEEERRQTQAVGQAQQGRWTCWESVEQRQLKWTELWSMEPQRISFLVGAAYDQLPTPANLERWNLTENSKCAECSAKGTLRHILSNCQQSLGRYTYRHNQVLKVLCKYVTEKCEYANAGGEAREKILRKKGLMNSEEWQVRCDLTEQLSMPQHIVITNQRPDLIVWSDKEKALILMELTVPWEENLSYAHERKLTRYEDLVTQCQDKGWNCELFAVEVGCRGFMARSATKFLTRVGFSGRALKQATKSIVHEAESASAWIWQQHCVKTKAK

SEQ ID NO: 1896 - protein, 1093 aa, Membranipora membranacea
MGNPPLATSSYMEKCPQGLPGNEGEDERPTGTRLTVITNSEMPWTCVCQRGFKTERGMKIHRTKKGCEVVLENRSVDNSAPKTDGTLPQVENHSGQTTNSQTPTEHHGSGCERQEVEWPKMSSVKTWRELDEYAVVALNSALTGSGEKKAKQLPAILFSICEEKFGLVAKRGGTQCTKIPNRRQYEKGKLRTQQRALRERMRNCAESERHGLSVLLNDVKERIRRLARAEALRKKRKLKRKNLNNFMKNPYGFAKKLFEQSKSGELKASQAEVEAHLAKVYGNKSEVNTDIAGLKRPTSPGFSFEMGDIKLGEVAHVVTKARAKSAPGINGISYKLYKKCPGILEILTKVLNQIWKSGKIPDEWCCANGVYIPKEDKAEDLGQFRPISLLNVEGKIFFSVLAKRLTDYLMNNGFIDPSVQKAGIPGFPGCLEHVSMIWSAIKSAKQAKSNLEVIWLDLANAYGSVPHSIIDLALSHFWVPDRLRVMVERYYKKFKMRFTTKNFTTSWQELAVGIPMGCAISPLLFVMVMEIVIRNSQGSVNGIQVANNQILPPMRAFMDDITIISPDKAQVVASIDRLHELIERCAMRFKPSKSRSLSLCKGKPVPNTYFIGTERIPTLAEQPVKSLGRWYSLPITDRFRGNEVKKQLITGLDAIEKCGLSGKYKAWILNFALMPRILWPLTVYDIPLTPVERMEQMINKHMRKWLGVPRSFNTNALYASSFTLSLPMKSLVEEYKTSKARLDMMLNESPDQVIRECAPTLDTGKKWSVTETVRDAKSRLEISEIVGAVTTARHGIGWEANRWFSKESPKVRREMVVDEVRKMEEERRQTQAVGQAQQGRWTCWESVEQRQLKWTELWSMEPQRISFLVGAAYDQLPTPANLERWNLTENSKCAECSAKGTLRHILSNCQQSLGRYTYRHNQVLKVLCKYVTEKCEYANAGGEAREKILRKKGLINSGEWQVRCDLTEQLSMPQHIVITNQRPDLIVWSDKEKALILMELTVPWEENLSYAHERKLTRYEDLVTQCQDKGWNCELFAVEVGCRGFMARSATKFLTRVGLSGRALKQATKSIVHEAESASAWIWQQHCVKTKAK

SEQ ID NO: 1897 - protein, 980 aa, Membranipora membranacea
MALNQLVEWPKMSSVKTWRELDEYAVVALNSALTGSGEKKAKQLPAILFSICEKFGLVAKRGGNQCTKIPNRRQYEKGKLRTQQRALRERMRNCAESERHGLSVLLNDVKERIRRQARAEALRKKRKLKRKNLNNFMKNPYGFAKKLFEQSKSGELKASQAEVEAHLAKVYGNKSEVNTDIAGLKRPTSPGFSFEMGDIKLGEVAHVVTKARAKSAPGINGISYKLYKKCPGILEILTKVLNQIWKSGKIPDEWCCANGVYIPKEDKAEDLGQFRPISLLNVEGKIFFSVLAKRLTDYLMNNGFIDPSVQKAGIPGYLEHVSMIWSAIKSAKQAKSNLEVIWLDLANAYGSVPHSIIDLALSHFWVPDRLRVMVERYYKKFKMRFTTKNFTTSWQELAVGIPMGCAISPLLFVMVMEIVIRNSQGSVNGIQVANNQILPPMRALMDDITIISPDKAQVVASIDRLHELIERCAMRFKPSKSRSLSLCKGKPVPNTYFIGTERIPTLAEQPVKSLGRWYSLPITDRFRGNEVKKQLITGLDAIEKCGLSGKYKAWILNFALMPRILWPLTVYDIPLTPVERMEQMINKHMRKWLGVPRSFNTNVLYASSFTLSLPMKSLVEEYKTSKAILDMMLNKSPDQVIRECAPTLDTGKKWSVTETVRDAKSRLEISEIVGAVTTARHGIGWEANRWSSKESPKVRREMVDDEVRKMEEEGRQTHAVGQAQQGRWTCWESVEQRQLKWTELWSMEPQRIRFLVGAAYDQLPTPANLERWNLTENSKCAECSAKGTLRHILSNCQQSLGRYTYRHNQVLKVLCKYVTEKCEYANAGGEAREKILRKKGLMNSGEWQVRCDLTEQLSMPQHIVITNQRPDLIVWSDKEKALILMELTVPWEENLSYAHERKLTRYEDLVTQCQDKGWNCELFAVEVGCRGYMARSATKFLTRVGLSGRALKQATKSIVHEAESASEWIWQQHCVKTKAK

SEQ ID NO: 1898 - protein, 1090 aa, Membranipora membranacea
MGNPPLATSSYMEKCPQGLSGNEGEDERPTGTRLTVITNSEMPWTCVCQRGFKTERGMKIHRTKKGCEVVLENRSVDNSAPKTDGTLPQVENHSGQTTNSQTPTEHHGSGCERQEVEWPKMSSVKTWRELDEYAVVALNSALTKSGEKKAKQLPAILFSICEEKFGLVAKRGGTQCTKIPNRRQYEKGKLRTQQRALRERMRNCAESERHGLSVLLNDVKERIRRLARAEALRKKRKLRRKNLNNFMKNPYGFAKKLFEQSKSGELKASQAEVEAHLAKVYGNKSEVNTDIAGLKRPTSPGFSFEMGDIKLGEVSHVVTKARAKSAPGINGISYKLYKKCPGILEILTKVLNQIWKSGKIPDEWCCANGVYIPKEDKAEDLGQFRPISLLNVEGKIFFSVLAKRLTDYLMNNGSIDPSVQKAGIPGFPGCLEHVSMIWSAIKSAKQAKSNLEVIWLDFANAYGSVPHSIIDLALSHFWVPDRLRVMVERYYKKFKMRFTTKNFTTSWQELAVGIPMGCAISPLLFVMVMEIVIRNSQGSVNGIQVANNQILPPMRAFMDDITIILPDKAQVVASIDRLHELIERCAMRFKPSKSRSLSLCKGKPVPNTYFIGTERIPTLAEQPVKSLGRWYSLPITDRFRGNEVKKQLITGLDAIEKCGLSGKYKAWILNFALMPRILWPLTVPLTPVERMEQMINKHMRKWLGVPRSFNTNALYASSFSLSLPMKSLVEEYKTSKARLDMMLNESPDQVIRECAPTLDTGKKWSVTEIVRDAKSRLEISEIVGAVSTARHGIGWEANRWFSKESPKVRREMVVDEVRKMEEERRQTQAVGQAQQGRWTCWESVEQRQLKWTELWSMEQLRISFLVGAAYDQLPTPANLERWNLTENSKCAECSAKGTLRHILSNCQQSLGRYTYRHNQVLKVLCKYVTEKCEYANAGGEAREKILRKKGLMNSGEWQVRCDLTEQLSMPQHIVITNQRPDLIVWSDKEKALILMELTVPWEENLSYAHERKLTRYEDLVTQCQDKGWNCELFAVEVGCRGFMARSATKFLTRVGLSGRALKQATKSIVHEAESASAWIWQQHCVKTKAK

SEQ ID NO: 1899 - protein, 1189 aa, Coremacera marginata
MFNKIIMNRRNTRASDNYINNFFGNDTTEISSPILQSGEASENPPTSGENRTNQHQSLMLEQAPQVAAPTGTGQGRHRRKWTREMNETLLRLYYQITENETNMTGYRYQLHTMFCARYTELNVTEQRLADQIRAIHRNNLVPELRREMIRIEINQPSEGNANEENTMETGNHQQDTNDGQAIPNNACDITNIFREYLAKFIGTNPIHRPMLPTIRTSVKACKIIQHLNETTLPEVLHTDDNNLEYLQTIIYCAAATTTHLLGKKIRDSEPTTARRPRRNTPWLDRINAKIDKIRRQIRQLKEFLNGNLSRRLKYRVRKILREHQTHSRREWNHEVPIRVLDTLQQKFTLEISKRKKYLLSECRKNNNKLFNSSEKGLYRQLKHPQPHNISDQNDTPSIERIEEYWASIWSISKQHNQDATWIEREEANYADIPTMEFTEISLGRLRESISRTQNWKSPGPDRVQNFWYKRFTAAHQKLAEELTNCIKYPEQFPKWLGEGVTYLLPKKGKFDKNPANGRPITCLCTLYKILTSCINDTVYEHLINNNILAEEQKGCIRGARGCKEQLTIDQVVLGQAVHNTRNLYCGYVDYQKAFDSVPHSWLLKIMEIYKINNTLIRFLSTTMLTWKTSIEVNNEQGRRKTKKIPIKRGIYQGDCLSALWFCVAINPLSKMLNDTRYGFNIKSQSQVLCRINHLLYMDDLKLYAATRDNLAHLIQIVAGFSQDIRMSFGIDKCNTISIIRGKVTPTDEPEICSIREMSENELYKYLGMAQNRRVDTKKVKEQIKTEFKGRIYKVIKSNLNGKNLIRAINSFAIPSLSYSFGIINWTTTELMTLQRFIRTTMTKYCMHHTQSCTERMLLPRRKGGRGLIDIHLLYENQIESLRKYFMQKQHTSTLIRSIIEADQNVTPLRLKDGYIERQSMTSTQKETQWERKMLHGRFYHSMHSDIVDAQLSNKWLLGGGIYSETEAFMIAIQDEVIRTKNYEKYILKSEDISDDKCRKCNRFSETIHHITSGCPQLAQTDYLKRHNNVVNIIHIALLQLLKVPIRDTRYYKYIPEPVVDSESFKLYYDRTIHTVQTREHNRPDITYIDKLNKTATLIDVTIPISRNIAKAYTEKINKYSELAEEIKNQWQLTNVRIIPIVISSEALIEKNVSRHLKELRLQANIIYKIQKSVILDTCHLVRKFFNYTC

SEQ ID NO: 1900 - protein, 947 aa, Deilephila porcellus
MSATPKSACPHCPSPSRHFSCHGLRIHIGRMHKDVARAARSGMNICASVSLSPLGSQRLHIDTLHILKKNVPVLRHIPKAARNLAANQLCGLINRSLESNSLDDWCSLLTFSYRSLRVPVESGEGNLTQKVKANLISENFPFSYEPFIRRKFCGRRGIEKYIESKVYEGDLGGAVRLLVSDESLAEASAETLSSLRLKHPSPSRTLSFPDAPDNSTQRLVVKSEEVAQALLSFRTGSAAGLDGVRPGHLKELISSSAGDSGMRLLESLTRLVNFLLGGELNPDVCPYLYGGSLCALNKREGGVRPIAVGSVFRRLTAKIACHSVREKMTEYLQPQQLGFGTQLGCEAAIHATRAFALDPTNCNKLIIKLDLKNAFNTLERDVMLREVKENIPAIYPFLYQAYSAPTKLYYGDTLIPSLVGAQQGDPLGPLIFSLSIKKVISDLKSPLNIWYLDDGTIGGMPEQVESDLLSLIPRFSEFGLSLNSTKCQLYSCGPGTHQLVSRFNAILPGLTELTAETFTLLGSPIFTEGVPAAVDQRRELLLAAQARLNNLTPHVALVLLRMCFAVPRITYLLRTAPTWLFPVEISNFDNVLKMSVETLLNVSLNEAQWDQAALPIRHGGLGIRRARDVGLPAFLASANGVADLVTSILSPNCDRMDIPFASDACEAWSVCNPGAELPKFLNRQRLWDDVGATRLRDQLIEGATGVDVARLKGVSTPESGAWLHALPSPHLGTLLDGDSLCVAVALRLGCNVCETHTCTCGSIVAANGHHALSCFRCSGRFARHHALNDIIRRALVSANVPCLLEPPGLIRTDGKRPDGLTLLPWLRGKCLVWDATCVSTFAVSHLGRTTRAAAAAAEVAAESKRAKYAPLLRNYFFVPFAVEVTGCWGSEAKMLVKDIGRRLRDLGRDYRSGWFLTQRIAIAIQRGNASCILGSFAPGMMTGGLFD

SEQ ID NO: 1901 - protein, 947 aa, Deilephila porcellus
MSATPKSACPHCPSPSRHFSCHGLRIHIGRMHKDVARAARSGMNICASVSLSPLGSQRLHIDTLHILKKNVPVLRHIPKAARNLAANQLCGLINRSLESNSLDDWCSLLTFSYRSLRVPVESGEGNLTQKVKANLISENFPFSYEPFIRRKFCGRRGIEKYIESKVYEGDLGGAVRLLVSDESLAEASAETLSSLRLKHPSPSRTLSFPDAPDNSTQRLVVKSEEVAQALLSFRTGSAAGLDGVRPGHLKELISSSAGDSGMRLLESLTRLVNFLLGGELNPDVCPYLYGGSLCALNKREGGVRPIAVGSVFRRLTAKIACHSVREKMTEYLQPQQLGFGTQLGCEAAIHATRAFALDPTNCNKLIIKLDLKNAFNTLERDVMLREVKENIPAIYPFLYQAYSAPTKLYYGDTLIPSLVGAQQGDPLGPLIFSLSIKKVISDLKSPLNIWYLDDGTIGGMPEQVESDLLSLIPRFSEFGLSLNSTKCQLYSCGPGTHQLVSRFNAILPGLTELTAETFTLLGSPIFTEGVPAAVDQRRELLLAAQARLNNLTPHVALVLLRMCFAVPRITYLLRTAPTWLFPVEISNFDNVLKMSVETLLNVSLNEAQWDQAALPIRHGGLGIRRARDVGLPAFLASANGVADLVTSILSPNCDRMDIPFASDACEAWSVCNPGAELPKFLNRQRLWDDVGATRLRDQLIEGATGVDVARLKGVSTPESGAWLHALPSPHLGTLLDRDSLCVAVALRLGCNVCETHTCTCGSIVAANGHHALSCFRCSGRFARHHALNDIIRRALVSANVPCLLEPPGLIRTDGKRPDGLTLLPWLRGKCLVWDATCVSTFAVSHLGQTTRAAAAAAEVAAESKRAKYAPLLRNYFFVPFAVEVTGCWGSEAKMLVKDIGRRLRDLGRDYRSGWFLTQRIAIAIQRGNASCILGSFAPGMMTGGLFD

SEQ ID NO: 1902 - protein, 947 aa, Deilephila porcellus
MSATPKSACPHCPSPSRHFSCHGLRIHIGRMHKDVARAARSGMNICASVSLSPLGSQRLHIDTLHILKKNVPVLRHIPKAARNLAANQLCGLINRSLESNSLDDWCSLLTFSYRSLSVPVESGEGNLTQKVKANLISENFPFSYEPFIRRKFCGRRGIEKYIESKVYEGDLGGAVRLLVSDESLAEASAETLSSLRLKHPSPSRTLSFPDAPDNSTQRLVVKSEEVAQALLSFRTGSAAGLDGVRPGHLKELISSSAGDSGMRLLESLTRLVNFLLGGELNPDVCPYLYGGSLCALNKREGGVRPIAVGSVFRRLTAKIACHSVREKMTEYLQPQQLGFGTQLGCEAAIHATRAFALDPTNCNKLIIKLDLKNAFNTLERDVMLREVKENIPAIYPFLYQAYSAPTKLYYGDTLIPSLVGAQQGDPLGPLIFSLSIKKVISDLKSPLNIWYLDDGTIGGMPEQVESDLLSLIPRFSEFGLSLNSTKCQLYSCGPGTHQLVSRFNAILPGLTELTAETFTLLGSPIFTEGVPAAVDQRRELLLAAQARLNNLTPHVALVLLRMCFAVPRITYLLRTAPTWLFPVEISNFDNVLKMSVETLLNVSLNEAQWDQAALPIRHGGLGIRRARDVGLPAFLASANGVADLVTSILSPNCDRMDIPFASDACEAWSVCNPGAELPKFLNRQRLWDDVGATRLRDQLIEGATGVDVARLKGVSTPESGAWLHALPSPHLGTLLDGDSLCVAVALRLGCNVCETHTCTCGSIVAANGHHALSCFRCSGRFARHHALNDIIRRALVSANVPCLLEPPGLIRTDGKRPDGLTLLPWLRGKCLVWDATCVSTFAVSHLGRTTRAAAAAAEVAAESKRAKYAPLLRNYFFVPFAVEVTGCWGSEAKMLVKDIGRRLRDLGRDYRSGWFLTQRIAIAIQRGNASCILGSFAPGMMTGGLFD

SEQ ID NO: 1903 - protein, 947 aa, Deilephila porcellus
MSATPKSACPHCPSPSRHFSCHGLRIHIGRMHKDVARAARSGMNICASVSLSPLGSQRLHIDTLHILKKNVPVLRHIPKAARNLAANQLCGLINRSLESNSLDDWCSLLTFSYRSLRVPVESGEGNLTQKVKANLISENFPFSYEPFIRRKFCGRRGIEKYIESKVYEGDLGGAVRLLVSDESLAEASAETLSSLRLKHPSPSRTLSFPDAPDNSTQRLVVKSEEVAQALLSFRTGSAAGLDGVRPGHLKELISSSAGDSGMRLLESLTRLVNFLLGGELNPDVCPYLYGGSLCALNKREGGVRPIAVGSVFRRLTAKIACHSVREKMTEYLQPQQLGFGTQLGCEAAIHATRAFALDPTNCNKLIIKLDLKNAFNTLERDVMLREVKENIPAIYPFLYQAYSAPTKLYYGDTLIPSLVGAQQGDPLGPLIFSLSIKKVISDLKSPLNIWYLDDGTIGGMPEQVESDLLSLIPRFSELGLSLNSTKCQLYSCGPGTHQLVSRFYAILPGLTELTAETFTLLGSPIFTEGVPAAVDQRRELLLAAQARLNNLTPHVALVLLRMCFAVPRITYLLRTAPTWLFPVEISNFDNVLKMSVETLLNVSLNDAQWDQAALPIRHGGLGIRRARDVGLPAFLASANGVADLVTSILSPNCDRMDIPFASDACEAWSVCNPGAELPKFLNKQRLWDDVGATRLRDQLIEGATGVDVARLKGVSTPESGAWLHALPSPHLGTLLDGDSLCVAVALRLGCNVCETHTCTCGSIVAANGHHALSCFRCSGRFARHHALNDIIRRALVSANVPCLLEPPGLIRTDGKRPDGLTLLPWLRGKCLVWDATCVSTFAVSHLGRTTRAAAAAAEVAAESKRAKYAPLLRNYFFVPFAVEVTGCWGSEAKMLVKDICRRLRDLGRDYRSGWFLTQRIAIAIQRGNASCILGSFAPGMMTGGLFD

SEQ ID NO: 1904 - protein, 947 aa, Deilephila porcellus
MSATPKSACPHCPSPSRHFSCHGLRIHIGRMHKDVARAARSGMNICASVSLSPLGSQRLHIDTLHILKKNVPVLRHIPKAARNLAANQLCGLINRSLESNSLDDWCSLLTFSYRSLRVPVESGEGNLTQKVKANLISENFPFSYEPFIRRKFCGRRGIEKYIESKVYEGDLGGAVRLLVSDESLAEASAETLLSLRLKHPSPSRTLSFPDAPDNSTQRLVVKSEEVAQALLSFRTGSAAGLDGVRPGHLKELISSSAGDSGMRLLESLTRLVNFLLGGELNPDVCPYLYGGSLCALNKREGGVRPIAVGSVFRRLTAKIACHSVREKMTEYLQPQQLGFGTQLGCEAAIHATRAFALDPTNCNKLIIKLDLKNAFNTLERDVMLREVKENIPAIYPFLYQAYSAPTKLYYGDTLIPSLVGAQQGDPLGPLIFSLSIKKVISDLKSPLNIWYLDDGTIGGMPEQVESDLLSLIPRFSEFGLSLNSTKCQLYSCGPGTHQLVSRFNAILPGLTELTAETFTLLGSPIFTEGVPAAVDQRRELLLAAQARLNNLTPHVALVLLRMCFAVPRITYLLRTAPTWLFPVEISNFDNVLKMSVETLLNVSLNEAQWDQAALPIRHGGLGIRRARDVGLPAFLASANGVADLVTSILSPNCDRMDIPFASDACEAWSVRNPGAELPKFLNRQRLWDDVGATRLRDQLIEGATGVDVARLKGVSTPESGAWLHALPSPHLGTLLDGDSLCVAVALRLGCNVCETHTCTCGSIVAANGHHALSCFRCSGRFARHHALNDIIRRALVSANVPCLLEPPGLIRTDGKRPDGLTLLPWLRGKCLVWDATCVSTFAVSHLGQTTRAAAAAAEVAAESKRAKYAPLLRNYFFVPFAVEVTGCWGSEAKMLVKDIGRRLRDLGRDYRSGWFLTQRIAIAIQRGNASCILGSFAPGMMTGGLFD

SEQ ID NO: 1905 - protein, 947 aa, Deilephila porcellus
MSATPKSPCPHCPSPSRHFSCHGLRIHIGRMHKDVARAARSGMNICASVSLSPLGSQRLHIDTLHILKKNVPVLRHIPKAARNLAANQLCGLINRSLESNSLDDWCSLLTFSYRSLRVPVESGEGNLTQKVKANLISENFPFSYEPFIRRKFCGRRGIEKYIESKVYEGDLGGAVRLLVSDESLAEASAETLSSLRLKHPSPSRTLSFPDAPDNSTQRLVVKSEEVAQALLSFRTGSAAGLDGVRPGHLKELISSSAGDSGMRLLESLTRLVNFLLGGELNPDVCPYLYGGSLCALNKREGGVRPIAVGSVFRRLTAKIACHSVREKMTEYLQPQQLGFGTQLGCEAAIHATRAFALDPTNCNKLIIKLDLKNAFNTLERDVMLREVKENIPAIYPFLYQAYSAPTKLYYGDTLIPSLVGAQQGDPLGPLIFSLSIKKVISDLKSPLNIWYLDDGTIGGMPEQVESDLLSLIPRFSEFGLSLNSTKCQLYSCGPGTHQLVSRFNAILPGLTELTAETFTLLGSPIFTEGVPAAVDQRRELLLAAQARLNNLTPHVALVLLRMCFAVPRITYLLRTAPTWLFPVEISNFDNVLKMSVETLLNVSLNEAQWDQAALPIRHGGLGIRRARDVGLPAFLASANGVADLVTSILSPNCDRMDIPFASDACEAWSVCNPGAELPKFLNRQRLWDDVGATRLRDQLIEGATGVDVARLKGVSTPESGAWLHALPSPHLGTLLDGDSLCVAVALRLGCNVCETHTCTCGSIVAANGHHALSCFRCSGRFARHHALNDIIRRALVSANVPCLLEPPGLIRTDGKRPDGLTLLPWLRGKCLVWDATCVSTFAVSHLGRTTRAAAAAAEVAAESKRAKYAPLLRNYFFVPFAVEVTGCWGSEAKMLVKDIGRRLRDLGRDYRSGWFLTQRIAIAIQRGNASCILGSFAPGMMTGGLFD

SEQ ID NO: 1906 - protein, 996 aa, Clostera curtula
MILLIIILLVITLVAISFYKNIRPMSQSAGPSYGLVLSSQSFGNDSNQTQCLLCPQPKFFKGSRGLNIHVSKCHKQPCVENLNTQQHPIPEPSTQSRQLDIVQSQNLCSLLYNLKSSTPVVKRIPRGARISVALKLSEVIKRILKDNSTDSWKSLFTFSYEILHADSISRKQSLTKTIKQNCMDKDFSICLNKTSQIHKCRQQINIYKIIEGKISDGDIKGASNLLFSTDILATDCPETLMALKDKHPCTSESPNLSAPINSVLTVENKAVLSAIMSFRNGSAGGLDGLSPQHFKDLLCVATADAGQKLLSDLTDLVNLMLSGKVNAQILNVLYGANLCALKKKDGGIRPIAVGNTIRRITSKVCCKYIYPKLRPEFQPIQLGVCSKGGCEAAVHSLRGYLQNSEEAVVIKVDIKNAFNSIDRRKLLSQCSDKVPEIYPFLWQCYNTPSHLVYRNNVIDSAVGCQQGDPLGPAIFSLGIHPIISSLTSKLNIWYLDDGTIAGDYISVLRDLNFLKGEFKKMGLLLNFSKCELYVSEKIHSETQALIRDKFNNLAPNIKLVDKYTLRLLGSPVLEESIPNFLYEQLDKFKNSSDHLEKINIHMAFQIIKFCLFVPKFTYFLRCSPIWKFPNILASFDTCILNILTEILNCQITDKAWQQASLPIRFGGIGIRKASAIALPAFLSSIHSTNRLVNKIISPSLGNIQFSFYREAIDAWKEASGMGSLPAILNSQRLWDEPLCRVNFQKLISTASDASERARLLAVATWESGLWLHALPSPNLGTFLDNTTFSIAVSLRLGLHTNHPHCCPCGAMVDRLGHHGLSCQRSAGRMSRHAALNDVVRRALVSINVPALLEPNGIARDDGKRPDGLTLVPWKGGRCLVWDATCVDTLAPSHLHATSEAAGAAASDAQTRKRRKYMSLSRDYIFLPFAVETLGSWGDETKHFFNVVSSRLIDHTGDRKAGAYFGQRISLAIQRGNVASILGTLPKGSSLDEVFYI

SEQ ID NO: 1907 - protein, 965 aa, Aricia agestis
MSQSAGSSSGSALLSQNGSIQCLLCSEPKFFKGSRGLSIHVSKCHKQSSNSNVHVPPPLPHTVQSLQAEDLCSLLSRLKASTPVIKRIPRGARVTVALKLSEVLKRVIKENSKDAWKNLFVFSYEIFHANSSSKKCSLTKIIKQNCVEKSFNIYSSSDFQRSNTYFKRQEPLCVNKIIEAKICDGDIKGASNLLFSSDVRATNSPDTLTALKEKHPYTSVTPNLPTPTGSGIVAESKMVLSAIMSFRNGSAGGLDGISPQHLKYLICSSTADAGKTLLSDLTDLVNLMLSGQVNSEVLNVLYGANLCALKKKDGGIRPIAVGSTFRRIVAKICCKSIHPKLIKEFKPIQLGFSCKGGCEAAVHSLRGFIHNCDDDVVLKVDIKNAFNSVDRRALLNQCLDKVPDIYPFIWQCYNTPTQLVYMGHLINSAVGCQQGDPLGPAIFSLAIHPIISTLTSKLNIWYLDDGTIAGPPSTVWNDLKCLISELEKIGLSINFSKCELFFSDKFTTQSKTVVVNNFNSLAPCIKVIDKYALRLLGAPILEESIPLFLEEQMLKFQNSCDRLEKINIHMAFQIIKFCLFVPKFTYFLRCSPVWKFTNSLASIDAAIRKILTHIFNCSLTDRAWCQASLPIRFGGIGIRKVSDVALPAFLSSVNSTSPLTRQILSPSFGNFDFPFYSDALEAWREASANGAVPANICLQRLWDEPLCRIVFDKLVNSSSDAAERARLLAAATWESGLWLQALPSPNLGTLLDNTTFSLAISLRLGLPTNHPHCCPCGSMVDRLGHHGLSCQRSAGRLSRHAALNDVVRRALVSINVPAILEPNGIARDDGKRPDGLTLVPWKSGRCLVWDATCVDTLAASYLHGTSVTAGAAASEAQTRKRRKYVSLSRDYIFLPLAFETLGPWGDDMKKFFNLISSRLIDRTGDQRAGAYFGQRLSLALQRGNVASILGTLPKGSSLDDNLFYI

SEQ ID NO: 1908 - protein, 967 aa, Aricia agestis
MSQSAGSSSGSALLSQNGSIQAQCLLCSEPKFFKGSRGLSIHVSKCHKQSSNSNVHVPPPLPHTVQSLQAEDLCSLLSRLKASTPVIKRLPRGARVTVALKLSEVLKRVIKENSKDALKNLFVFSYEIFHANSSSKKCSLTKIIKQNCVEKSFNIYSSSDFQRSNTYFKRQEPLCVNKIIEAKIYDGDIKGASNLLFSSDVRATNSPDTLTALKEKHPYASVAPNLPTPTGSGIVAESKMVLSAIMSFRNGSTGGLDGISPQHLKDLICSSTADAGKTLLSDLTDLVNLMLSGQVNSEVLNVLYGANLCALKKKDGGIRPIAVGSTFRRIVAKICCKSIHPKLIKEFKPIQLGFSCKGGCEAAVHSLRGFIHNCDDDVVLKVDIKNAFNSVDRRALLNQCLDKVPDIYPFIWQCYNTPTQLVYMGHLIDSAVGCQQGDPLGPAIFSLAIHPIISTLTSKLNIWYLDDGTIAGPPSTVWNDLKCLISELEKIGLSINFSKCELFFSDKFTTQSKTAVVNNFNSLAPCIKVIDKYALRLLGAPILEESIPLFLEEQMLKFQNSCDRLEKINIHMAFQIIKFCLFVPKFTYFLRCSPVWKFTNSLASFDAAIRKILTHIFNCSLTDRAWCQASLPIRFGGIGIRKVSDVALPAFLSSVNSTSPLTRQILSPSFGNFDFPFYSDALEAWREASANGAVPANICLQRLWDEPLCRVVFDKLVNSSSDAAERARLLAAATWESGLWLQALPSPNLGTLLDNTTFSLAISLRLGLPTNHPHCCPCGSMVDRLGHHGLSCQRSAGRLSRHAALNDVVRRALVSINVPAILEPNGIARDDGKRPDGLTLVPWKSGRCLVWDATCVDTLAASYLHGTSVTAGAAASEAQTRKRRKYVSLSRDYIFLPLAFETLGPWGDDMKKFFNLISSRLIDRTGDQRAGAYFGQRLSLALQRGNVASILGTLPKGSSLDDNLFYI

SEQ ID NO: 1909 - protein, 972 aa, Clostera curtula
MSQSAGPSYGLVLSSQSFGNDSNQTQCLLCPQPKFFKGSRGLNIHVSKCHKQPCVENSNTQQHPISEPSTQSRQLDIVQSQNLCSLLYNLKSSTPVVKRIPRGARVSVALKLSEVIKRILKDNSTDSWKSLFTFSYEILHADSISRKQSLTKTIKQNCINKDFSICLNKTSQIHKCRQPMNIYKIIEGKISDGDIKGASNLLFSTDILATDCPETLMALKDKHPCTSESPNLSAPINSVLTVENKAVLSAIMSFRNGSAGGLDGLSPQHFKDLLCVATADAGQKLLSDLTDLVNLMLSGKVNAQILNVLYGANLCALKKKDGGIRPIAVGNTIRRITSKVCCKYIYPKLRPEFQPIQLGVCSKGGCEAAVHSLRGYLENSEEAVVIKVDIKNAFNSIDRRKLLSQCSDKVPEIYPFLWQCYNTPSHLVYRNNVIDSAVGCQQGDPLGPAIFSLGIHPIISALTSKLNIWYLDDGTIAGDYISVLRDLNFLISEFKKMGLLLNFSKCELYVSEKIPSETQALIHDKFNNLAPNIKLVDKYTLRLLGSPVLEESIPNFLYEQLDKFKNSSDHLEKINIHMAFQIIKFCLFVPKFTYFLRCSPIWKFPNILASFDTCILNILTEILNCQITDKAWQQASLPIRFGGIGIRKASAIALPAFLSSIHSTNGLVNKIISPSLGNIQFSFYREAIDAWKEASGMGSLPAILNSQRLWDEPLCRVNFQKLISTASDASERARLLAVATWESGLWLHALPSPNLGTFLDNTTFSIAVSLRLGLHTNHPHCCPCGAMVDRLGHHGLSCQRSAGRMSRHAALNDVVRRALVSINVPALLEPNGIARDDGKRPDGLTLVPWKGGRCLVWDATCVDTLAPSHLHATSEAAGAAASDAQTRKRRKYMSLSRDYIFLPFAVETLGSWGDETKHFFNVVSSRLIDHTGDRKAGAYFGQRISLAIQRGNVASILGTLPKGSSLDEVFYI

SEQ ID NO: 1910 - protein, 967 aa, Aricia agestis
MSQSAGSSSGSALLSQNGSIQAQCLLCSEPKFFKGSRGLSIHVSKCHKQSSNSNVHVPPPLPHTVQSLQAEDLCSLLSRLKASTPVIKRIPRGARVTVALKLSEVLKRVIKENSKDAWKNLFVFSYEIFHANSSSKKCSLTKIIKQNCVEKSFNIYSSSDFQRSNTYFKRQEPLCVNKIIEAKICDGDIKGASNLLFSSDVRATNSPDTLTALKEKHPYTSVAPNLPTPTGSGIVAESKMVLSAIMSFRNGSAGGLDGISPQHLKDLICSSTADAGKTLLSDLTDLVNLMLSGQVNSEVLNVLYGANLCALKKKDGGIRPIAVGSTFRRIVAKICCKSIHPKLIKEFKPIQLGFSCKGGCEAAVHSLRGFIHNCDDDVVLKVDIKNAFNSVDRRALLNQCLDKVPDIYPFIWQCYNTPTQLVYMGHLIDSAVGCQQGDPLGPAIFSLAIHPIISTLTSKLNIWYLDDGTIAGPPSTVWNDLKCLISELEKIGLSINFSKCELFFSDKFTTQSKTAVVNNFNSLAPCIKVIDKYALRLLGAPILEESIPLFLEEQMLKFQNSCDRLEKINIHMAFQIIKFCLFVPKFTYFLRCSPVWKFTNSLASFDAAIRKILTHIFNCSLTDRAWCQASLPIRFGGIGIRKVSDVALPAFLSSVNSTSPLTRQILSPSFGNFDFPFYSDALEAWREASANGAVPANICLQRLWDEPLCRVVFDKLVNSSSDAAERARLLAAATWESGLWLQALPSPNLGTLLDNTTFSLAVSLRLGLPTNHPHCCPCGSMVDRLGHHGLSCQRSAGRLSRHAALNDVVRRALVSINVPAILEPNGIARDDGKRPDGLTLVPWKSGRCLVWDATCVDTLAASYLHGTSVTAGAAASEAQTRKRRKYVSLSRDYIFLPLAFETLGPWGDDMKNFFNLISSRLIDRTGDQRAGAYFGQRLSLALQRGNVASILGTLPKGSSLDDNLFYI

SEQ ID NO: 1911 - protein, 996 aa, Clostera curtula
MILLIIILLVITLVAISFYKNIKPMSQSAGPSYGLVLSSQSFGNDSNQTQCLLCPQPKFFKGSRGLNIHVSKCHKQPCVENSNTQQHPIPEPSTQSRQLDIVQSQNLCSLLYNLKSSTPVVKRIPRGARVSVALKLSEVIKRILKDNSTDSWKSLFTFSYEILHADSISRKQSLTKTIKQNCIDKDFSICLNKTSQIHKCRQPMNIYKIIEGKISDGDIKGASNLLFSTDILATDCPETLMALKDKHPCTSESPNLSAPINSVLTVENKAVLSAIMSFRNGSAGGLDGLSPQHFKDLLCVATADAGQKLLSDLTDLVNLMLSGKVNAQILNVLYGANLCALKKKDGGIRPIAVGNTIRRITSKVCCKYIYPKLRPEFQPIQLGVCSKGGCEAAVHSLRGYLENSEEAVVIKVDIKNAFNSIDRRKLLSQCSDKVPEIYPFLWQCYNTPSHLVYRNNVIDSAVGCQQGDPLGPAIFSLGIHPIISALTSKLNIWYLDDGTIAGDYISVLRDLNFLISEFKKMGLLLNFSKCELYVSEKIPSETQALIHDKFNNLAPNIKLVDKYTLRLLGSPVLEESIPNFLYEQLDKFKNSSDHLEKINIHMAFQIIKFCLFVPKFTYFLRCSPIWKFPNILASFDTCILNILTEILNCQITDKAWQQASLPIRFGGIGIRKASAIALPAFLSSIHSTNGLVNKIISPSLGNIQFSFYREAIDAWKEASGMGSLPAILNSQRLWDEPLCRVNFQKLINTASDASERARLLAVATWESGLWLHALPSPNLGTFLDNTTFSIAVSLRLGLHTNHPHCCPCGAMVDRLGHHGLSCQRSAGRMSRHAALNDVVRRALVSINVPALLEPNGIARDDGKRPDGLTLVPWKGGRCLVWDATCVDTLAPSHLHATSEAAGAAASDAQTRKRRKYMSLSRDYIFLPFAVETLGSWGDETKHFFNVVSSRLIDHTGDRKAGAYFGQRISLAIQRGNVASILGTLPKGSSLDEVFYI

SEQ ID NO: 1912 - protein, 728 aa, Aricia agestis
MVLSAIMSFRNGSAGGLDGISPQHLKDLICSSTADAGKTLLSDLTDLVNLMLSGQVNSEVLNVLYGANLCALKKKDGGIRPIAVGSTFRRIVAKICCKSIHPKLIKEFKPIQLGFSCKGGCEAAVHSLRGFIHNCDDDVVLKVDIKNAFNSVDRRALLNQCLDKVPDIYPFIWQCYNTPTQLVYMGHLIDSAVGCQQGDPLGPAIFSLAIHPIISTLTSKLNIWYLDDGTIAGPPSTVWNDLKCIISELEKIGLSINFSKCELFFSDKFTTQSKTAVVNNFNTLAPCIKVIDKYALRLLGAPILEESIPLFLEEQMLKFQNSCDRLEKINIHMAFQIIKFCLFVPKFTYFLRCSPVWKFTNSLASFDAAIRKILTHIFNCSLTDRAWCQASLPIRFGGIGIRKVSDVALPAFLSSVNSTSPLTRQILSPSFGNFDFPFYSDALEAWREASANGAVPANICLQRLWDEPLCRVVFDKLVNSSSDAAERARLLAAATWESGLWLQALPSPNLGTLLDNTTFSLAISLRLGLPTNHPHCCPCGSMVDRLGHHGLSCQRSAGRLSRHAALNDVVRRALVSINVPAILEPIGIARDDGKRPDGLTLVPWKSGRCLVWDATCVDTLAASYLHGTSVTAGAAASEAQTRKRRKYVSLSRGYIFLPLAFETLGPWGDDMKKFFNLISSRLIDRTGDQRAGAYFGQRLSLALQRGNVASILGTLPKGSSLDDNLFYI

SEQ ID NO: 1913 - protein, 965 aa, Aricia agestis
MSQSAGSSSGSALLSQNGSIQCLLCSEPKFFKGSRGLSIHVSKCHKQSSNSNVHVPPPLPHTVQSLQAEDLCSLLSRLKASTPVIKRIPRGARVTVALKLSEVLKRVIKENSKDAWKNLFVFSYEIFHANSSSKKCSLTKIIKQNCVEKSFNIYSSSDFQRSNTYFKRQEPLCVNKIIEAKICDGDIKGASNLLFSSDVRATNSPDTLTALKEKHPYTSVTPNLPTPTGSGIVAESKMVLSAIMSFRNGSAGGLDGISPQHLKDLICSSTADAGKTLLSDLTDLVNLMLSGQVNSEVLNVLYGANLCALKKKDGGIRPIAVGSTFRRIVAKICCKSIHPKLIKEFKPIQLGFSCKGGCEAAVHSLRGFIHNCDDDVVLKVDIKNAFNSVDRRALLNQCLDKVPDIYPFIWQCYNTPTQLVYMGHLIDSAVGCQQGDPLGPAIFSLAIHPIISTLTSKLNIWYLDDGTIAGPPSTVWNDLKCLISELEKIGLSINFSKCELFFSDKFTTQSKTAVVNNFNSLAPCIKVIDKYALRLLGAPILEESIPLFLEEQMLKFQNSCDRLEKINIHMAFQIIKFCLFVPKFTYFLRCSPVWKFTNSLASIDAAIRKILTHIFNCSLTDRAWCQASLPIRFGGIGIRKVSDVALPAFLSSVNSTSPLTRQILSPSFGNFDFPFYSDALEAWREASANGAVPANICLQRLWDEPLCRIVFDKLVNSSSDAAERARLLAAATWESGLWLQALPSPNLGTLLDNTTFSLAISLRLGLPTNHPHCCPCGSMVDRLGHHGLSCQRSAGRLSRHAALNDVVRRALVSINVPAILEPNGIARDDGKRPDGLTLVPWKSGRCLVWDATCVDTLAASYLHGTSVTAGAAASEAQTRKRRKYVSLSRDYIFLPLAFETLGPWGDDMKKFFNLISSRLIDRTGDQRAGAYFGQRLSLALQRGNVASILGTLPKGSSLDDNLFYI

SEQ ID NO: 1914 - protein, 996 aa, Clostera curtula
MILLIIILLVITLVAISFYKNIKPMSQSAGPSYGLVLSSQSFGNDSNQTQCLLCPQPKFFKGSRGLNIHVSKCHKQPCVENSNTQQHPIPVPSTQSRQLDIVQSQNLCSLLYNLKSSTPVVKRIPRGARVSVALKLSEVIKRILKDNSTDSWKSLFTFSYEILHADSISRKQSLTKTIKQNCIDKDFSICLNKTSQIHKCRQPMNIYKIIEGKISDGDIKGASNLLFSTDILATDCPETLMALKDKHPCTSESPNLSAPINSVLTVENKAVLSAIMSFRNGSAGGLDGLSPQHFKDLLCVATADAGQKLLSDLTDLVNLMLSGKVNAQILNVLYGANLCALKKKDGGIRPIAVGNTIRRITSKVCCKYIYPKLRPEFQPIQLGVCSKGGCEAAVHSLRGYLENSEEAVVIKVDIKNAFNSIDRRKLLSQCSDKVPEIYPFLWQCYNTPSHLVYRNNVIDSAVGCQQGDPLGPAIFSLGIHPIISALTSKLNIWYLDDGTIAGDYISVLRDLNFLISEFKKMGLLLNFSKCELYVSEKIPSETQALIHDKFNNLAPNIKLVDKYTLRLLGSPVLEESIPNFLYEQLDKFKNSSDHLEKINIHMAFQIIKFCLFVPKFTYFLRCSPIWKFPNILASFDTCILNILTEILNCQITDKAWQQASLPIRFGGIGIRKASAIALPAFLSSIHSTNGLVNKIISPSLGNIQFSFYREAIDAWKEASGMGSLPAILNSQRLWDEPLCRVNFQKLISTASDASERARLLAVATWESGLWLHALPSPNLGTFLDNTTFSIAVSLRLGLHTNHPHCCPCGAMVDRLGHHGLSCQRSAGRMSRHAALNDVVRRALVSINVPALLEPNGIARDDGKRPDGLTLVPWKGGRCLVWDATCVDTLAPSHLHATSEAAGAAASDAQTRKRRKYMSLSRDYIFLPFAVETLGSWGDETKHFFNVVSSRLIDHTGDRKAGAYFGQRISLAIQRGNVASILGTLPKGSSLDEVFYI

SEQ ID NO: 1915 - protein, 996 aa, Clostera curtula
MILLIIILLVITLVAISFYKNIRPMSQSAGPSYGLVLSSQSFGNDSNQTQCLLCPQPKFFKGSRGLNIHVSKCHKQPCVENLNTQQHPIPEPSTQSRQLDIVQSQNLCSLLYNLKSSTPVVKRIPRGARISVALKLSEVIKRILKDNSTDSWKSLFTFSYEILHADSISRKQSLTKTIKQNCIDKDFSICLNKTSQIHKCRQPINIYKIIEGKISDGDIKGASNLLFSTDILATDCPETLMALKDKHPCTSESPNLSAPINSVLTVENKAVLSAIMSFRNGSAGGLDGLSPQHFKDLLCVATADAGQKLLSDLTDLVNLMLSGKVNAQILNVLYGANLCALKKKDGGIRPIAVGNTIRRITSKVCCKYIYPKLRPEFQPIQLGVCSKGGCEAAVHSLRGYLQNSEEAVVIKVDIKNAFNSIDRRKLLSQCSDKVPEIYPFLWQCYNTPSHLVYRNNVIDSAVGCQQGDPLGPAIFSLGIHPIISSLTSKLNIWYLDDGTIAGDYISVLRDLNFLISEFKKMGLLLNFSKCELYVSEKIPSETQALIRDKFNNLAPNIKLVDKYTLRLLGSPVLEESIPNFLYEQLDKFKNSSDHLEKINIHMAFQIIKFCLFVPKFTYFLRCSPIWKFPNILASFDTCILNILTEILNCQITDKAWQQASLPIRFGGIGIRKASAIALPAFLSSIHSTNGLVNKIISPSLGNIQFSFYREAIDAWKEASGMGSLPAILNSQRLWDEPLCRVNFQKLISTASDASERARLLAVATWESGLWLHALPSPNLGTFLDNTTFSIAVSLRLGLHTNHPHCCPCGAMVDRLGHHGLSCQRSAGRMSRHAALNDVVRRALVSINVPALLEPNGIARDDGKRPDGLTLVPWKGGRCLVWDATCVDTLAPSHLHATSEAAGAAASDAQTRKRRKYMSLSRDYIFLPFAVETLGSWGDETKHFFNVVSSRLIDHTGDRKAGAYFGQRISLAIQRGNVASILGTLPKGSSLDEVFYI

SEQ ID NO: 1916 - protein, 1283 aa, Chrysoperla carnea
MSSADDEVAEAAGTVNITIKFPFPAEFRCEKCWVHLDTQGSQSGFNTRLSTYKSHSDYKKHIKHHHGIPIFTFECAECGYRSESLKTLKKHYLSHQPGAAPAPPKKTAPRQRKTHSTQPISSQPLPPRLAGTSDEGSPVPRTQQSPPRRVTRARSVSQSGAASRQHHPSAPGPSTSTARPSTSTEYDFNIRRNILSIITSDDDSQQQPPTSHATQPQPPKTDNGTEAVRGTATERLCRDAPAENQTDYDPPPSDRLVGMDSSPPGSLPQPFSRTRSPIELNDGISDMQRSPPPVVAPTQIQPDLVINDPSTASVVAGTDDDEIATSTQPTDNQVRWLALINNAASWDEFEEAVATITADFARGSPGHVAERPRPPHHAQQFQNRPRPIRNRPRRAQYNPADAAKIQKMYRINKKKAMNSILSEPGSSPFCQVDTETVHEHFRGIFAYKDQERSPTPEEIRQIFGPDQNDGGDGDERFTFLLDSISKESVCARLAKTSNTAPGKDGIRYSCLKRSDPGCIVLSAIFDRCFREEKTPLAWSDSRTVLLYKKGNRDELSNWRPLTLGGTIAKLYAGVLADRITCWAKLSNNISPMQKGFLEYEGCYEHNFIVQSALDDVRRDRRQIALAWLDLANAFGSVPHDHIRRVLEEMRLPNKMKSVIAELYSNSTTTIRTKDGETRPIPIRAGVKQGCPLSPIIFNLAIEPLIRVASRLATEHGYKLHDHHFSILAYADDIVLLGKDAASLRILLDAVGSTAEWMGLKFQPPKCASLHVDCRRRREVYPTEFTIQGGGLTVLKEGEEYQHLGVPTGFRVAQTPFDAIRAIKVDVQKVHESLLAPWQKLEATNMFILSRLDFILRGGNVAKGPLTDADKTIKRLAKKWMNLPQRGSPELLYIPSYQGGANLLPLADSADVSTVVHAFRLLTCKDTIVRETAWSCLKRAVRQRIRGDPTEDMIAEYLSGSLEGQLARDRGDISSLWTQARNACRRLNSKIGVGFHWCAEKRDLSVTIKRPGQTPERIIVPETARSMIVRMLRSALRAYYLSKLLGKPDQGKAYSCTNLREASNHFLLNGRYTRFCDYRFIHRARLGVVPLNGTRRFGNGDKRCRRCGYVNETLPHVLNHCTIHSAAWQRRHNAVQDRLARGSRLPPGAVLNINRQVPGVQSTLRPDLVVLDESSKEVKIIDICIPFEGAPDALEVARQQKLEKYNQLAAELTTKGYRVSLDAFVVGSLGAWLANNYRIAKSLGIAPKYTQTMARLMVSDTIRWSRDIYIEHLTRQRQYHDQPP

SEQ ID NO: 1917 - protein, 1283 aa, Chrysoperla carnea
MSSADDEVAEAAGTVNITIKFPFPAEFRCEKCWVHLDTQGSQSGFNTRLSTYKSHSDYKKHIKHHHGIPIFTFECAECGHRSESLKILKKHYLSHQPGAAPAPPKKTAPRQRKTQSTQPISSQPLPPRLAGTSDEGSPVPRTQQSPPRRVTRARSVSQSGAASRQHHPSAPGPSTSTARPSTSTEYDFNIRRNILSIITSDDDSQQQPPTSHATQPQPPKTDNGTEAVRGAATERLCRDAPAETQTDYDPPPSDRLAGMDSSPPGSLPQPFSRTRSPIELNDGISDMQRSPPPVVAPIQIQPDLVINDPSTASVVAGTDDDEIVTSTQPTENQVRWLALINNAASWEEFEEAVATITANFARGSPGHVAERPRPPHHAQQFQNRPRPTRNRPRRAQYNPADAAKIQKMYRINKKKAMNSILSEPGSSPFCQVDTETVHEHFRGIFAYKDQERSPTPEEIRQIFGPDQNDGGDGDERFTFLLDSISKESVCARLAKTSNTAPGKDGIRYSCLKRSDPGCIVLSAIFDRCFREEKTPLAWSDSRTVLLYKKGNRDELSNWRPLTLGGTIAKLYAGVLADRITCWAKLSNNISPMQKGFLEYEGCYEHNFIVQSALDDVRRDRRQIALAWLDLANAFGSVPHDHIRRVLEEMRLPNKMKSVIAELYSNSTTTIRTKDGETRPIPIRAGVKQGCPLSPIIFNLAIEPLIRVASGLATEHGYKLHDHHFSILAYADDIVLLGKDAASLRILLDAVGSTAEWMGLKFQPPKCASLHVDCRRRREVYPTEFTIQGGGLTVLKEGEEYQHLGVPTGFRVAQTPFDAIRAIKVDVQKVHESLLAPWQKLEATNMFILSRLDFILRGGNVAKGPLTDADKTIKRLAKKWMNLPQRGSPELLYIPSYQGGANLLPLADSADVSTVVHAFRLLTCKDTIVRETAWSCLKRAVRQRIRGDPTEDMIAEYLSGSLEGQLARDRGDISSLCPQTRNACRRLNSKIGVGFHWCAEKRDLSVTIKRPGQTPERIIVPETARSMIVRMLRSALRAYYLSKLLGKPDQGKAYSCTNLREASNHFLLNGRYTRFCDYRFIHRARLGVVPLNGTRRFGNGDKRCRRCGYVNETLPHVLNHCTIHSAAWQRRHNAVQDRLARGSRLPPGAVLNINRQVPGVQSTLRPDLVVLDESSKEVKIIDICIPFEGAPDALEVARQQKLEKYNQLAAELTTKGYRVSLDAFVVGSLGAWLANNYRIAKSLGIAPKYTQTMARLMVSDTIRWSRDIYIEHLTRQRQYHDQPP

SEQ ID NO: 1918 - protein, 1283 aa, Chrysoperla carnea
MSSADDEVAEAAGTVNITIKFPFPAEFRCEKCWVHLDTQGSQSGFNTRLSTYKSHSDYKKHIKHHHGIPIFTFECAECGHRSESLKILKKHYLSHQPGAAPAPPKKTAPRQRKTQSTQPISSQPLPPRLAGTSDEGSPVPRTQQSPPRRVTRARSVSQSGAASRQHHPSAPGPSTSTARPSTSTEYDFNIRRNILSIITSDDDSQQQPPTSHATQPQPPKTDNGTEAVRGAATERLCRDAPAETQTDYDPPPSDRLAGMDSSPPGSLPQPFSRTRSPIELNDGISDMQRSPPPVVAPIQIQPDLVINDPSTASVVAGTDDDEIVTSTQPTENQVRWLALINNAASWEEFEEAVATITADFARGSPGHVAERPRPPHHAQQFQNRPRPTRNRPRRAQYNPADAAKIQKMYRINKKKAMNSILSEPGSSPFCQVDTETVHEHFRGIFAYKDQERSPTPEEIRQIFGPDQNDGGDGDERFTFLLDSISKESVCARLAKTSNTAPGKDGIRYSCLKRSDPGCIVLSAIFDRCFREEKTPLAWSDSRTVLLYKKGNRDELSNWRPLTLGGTIAKLYAGVLADRITCWAKLSNNISPMQKGFLEYEGCYEHNFIVQSALDDVRRDRRQIALAWLDLANAFGSVPHDHIRRVLEEMRLPNKMKSVIAELYSNSTTTIRTKDGETRPIPIRAGVKQGCPLSPIIFNLAIEPLIRVASGLATEHGYKLHDHHFSILAYADDIVLLGKDAASLRILLDAVGSTAEWMGLKFQPPKCASLHVDCRRRREVYPTEFTIQGGGLTVLKEGEEYQHLGVPTGFRVAQTPFDAIRAIKVDVQKVHESLLAPWQKLEATNMFILSRLDFILRGGNVAKGPLTDADKTIKRLAKKWMNLPQRGSPELLYIPSYQGGANLLPLADSADVSTVVHAFRLLTCKDTIVRETAWSCLKRAVRQRIRGDPTEDMIAEYLSGSLEGQLARDRGDISSLWTQARNACRRLNSKIGVGFHWCAEKRDLSVTIKRPGQTPERIIVPETARSMIVRMLRSALRAYYLSKLLGKPDQGKAYSCTNLREASNHFLLNGRYTRFCDYRFIHRARLGVVPLNGTRRFGNGDKRCRRCGYVNETLPHVLNHCTIHSAAWQRRHNAVQDRLARGSRLPPGAVLNINRQVPGVQSTLRPDLVVLDESSKEVKIIDICIPFEGAPDALEVARQQKLEKYNQLAAELTTKGYRVSLDAFVVGSLGAWLANNYRIAKSLGIAPKYTQTMARLMVSDTIRWSRDIYIEHLTRQRQYHDQPP

SEQ ID NO: 1919 - protein, 1283 aa, Chrysoperla carnea
MSSADDEVAEAAGTVNITIKFPFPAEFRCEKCWVHLDTQGSQSGFNTRLSTYKSHSDYKKHIKHHHGIPIFTFECAECGHRSESLKILKKHYLSHQPGAAPAPPKKTAPRQRKTQSTQPISSQPLPPRLAGTSDEGSPVPRTQQSPPRRVTRARSVSQSGAASRQHHPSAPGPSTSTARPSTSTEYDFNIRRNILSIITSDDDSQQQPPTSHATQPQPPKTDNGTEAVRGAATERLCRDAPAETQTDYDPPPSDRLAGMDSSPPGSLPQPFSRTRSPIELNDGISDMQRSPPPVVAPIQIQPDLVINDPSTASVVAGTDDDEIVTSTQPTENQVRWLALINNAASWEEFEEAVATITANFARGSPGHVAERPRPPHHAQQFQNRPRPTRNRPRRAQYNPADAAKIQKMYRINKKKAMNSILSEPGSSPFCQVDTETVHEHFRGIFAYKDQERSPTPEEIRQIFGPDQNDGGDGDERFTFLLDSISKESVCARLAKTSNTAPGKDGIRYSCLKRSDPGCIVLSAIFDRCFREEKTPLAWSDSRTVLLYKKGNRDELSNWRPLTLGGTIAKLYAGVLADRITCWAKLSNNISPMQKGFLEYEGCYEHNFIVQSALDDVRRDRRQIALAWLDLANAFGSVPHDHIRRVLEEMRLPNKMKSVIAELYSNSTTTIRTKDGETRPIPIRAGVKQGCPLSPIIFNLAIEPLIRVASGLATEHGYKLHDHHFSILAYADDIVLLGKDAASLRILLDAVGSTAEWMGLKFQPPKCASLHVDCRRRREVYPTEFTIQGGGLTVLKEGEEYQHLGVPTGFRVAQTPFDAIRAIKVDVQKVHESLLAPWQKLEATNMFILSRLDFILRGGNVAKGPLTDADKTIKRLAKKWMNLPQRGSPELLYIPSYQGGANLLPLADSADVSTVVHAFRLLTCKDTIVRETAWSCLKRAVRQRIRGDPTEDMIAEYLSGSLEGQLARDRGDISSLWTQARNACRRLNSKIGVGFHWCAEKRDLSVTIKRPGQTPERIIVPETARSMIVRMLRSALRAYYLSKLLGKPDQGKAYSCTNLREASNHFLLNGRYTRFCDYRFIHRARLGVVPLNGTRRFGNGDKRCRRCGYVNETLPHVLNHCTIHSAAWQRRHNAVQDRLARGSRLPPGAVLNINRQVPGVQSTLRPDLVVLDESSKEVKIIDICIPFEGAPDALEVARQQKLEKYNQLAAELTTKGYRVSLDAFVVGSLGAWLANNYRIAKSLGIAPKYTQTMARLMVSDTIRWSRDIYIEHLTRQRQYHDQPP

SEQ ID NO: 1920 - protein, 1051 aa, Chrysoperla carnea
MDPHTYIDPPHSDHLVGINSYPLGSLPQPLSQTRSPAELNGVTSITREMETELPPVATAAQNQPDLVTIDPGATPVVAGTNVDELPTPIPPTDLADSQLTKNQVRWLALVNNAASWEEFEAAVATITADLARGTPGHVAERPPPNVQRFQNRPRPMRNRPRRAQYNPADAAKIQKLYKINKKKAMTSILSDPGSSPFCQVNTETVHEHFRGIFAHKDQEITPTPEQIRQIFRPDQNDGGDGDERFTFLLDSISKESVCARLAKTSNTAPGKDGIRYSCLKRSDPGCVVLSAIFDRCFREEKTPLAWNDSRTVLLYKKGNRDELSNWRPLTLGGTIAKLYAGVISDRVTCWAKLSDNISPMQKGFLEYEGCYEHNFIVQSALDDARRDGRQIALAWLDLANAFGSVPHDHIRRVLEEMRLPNKIRSVIAELYANTTTTIRTKDGETRPIHIRAGVKQGCPLSPIIFNLAIEPLIRVASGLAAQHGYKLHNHSFSILAYADDIVLLGKNAESLRILLDAVGSTAEWMGLKFQPPKCASLHVDCRRRREVFPTEFTIQGGGLTVLKDGEEYQHLGVPTGFRVTQTPLDAIQAIKEDVQKVHDSLLAPWQKLEATNMFILSRLDFILRGGNVAKGPLTDADKTIKRLAKKWMNLPQRGSPEILYIPSYQGGANLLPLADSADVSTVVHAFRLLTCKDTIVRETAWSCLKRVVRRRIGEDPTEDMLAKYLSGSLEGRLARDGGDISSLWSQARNACRRLNSKISVGFHWCREKRDLSVTINRPGQTPERIIVPETARSVVVRMLRSALRAFYLARLLGKPDQGKAYSCTNLREASNHFLLNGRYTRFCDYRFIHRARLGVVPLNGARRFGNGDKRCRRCGYVNETLPHVLNHCTVHSAAWQRRHNAVQDRLARGSRLPPGAVLNINRQVPGVRSTLRPDLVVLDEASKEVKIIDICIPFEGAPDALEVARQQKLDKYNQLAAELSSKGYRVSLDAFVVGSLGSWLAQNYRVAKSLGISPKYTQTMARLMASDTIRWSRDIYIEHLTGQRQYHDQPL

SEQ ID NO: 1921 - protein, 876 aa, Chrysoperla carnea
MYRINKKKAMNSILSEPGSSPFCQVDTETVHEHFRGIFAYKDQERSPTPEEIRQIFGPDQNDGGDGDERFTFLLDSISKESVCARLAKTSNTAPGKDGIRYSCLKRSDPGCIVLSAIFDRCFREEKTPLAWSDSRTVLLYKKGNRDELSNWRPLTLGGTIAKLYAGVLADRITCWAKLSNNISPMQKGFLEYEGCYEHNFIVQSALDDVRRDRRQIALAWLDLANAFGSVPHDHIRRVLEEMRLPNKMKSVIAELYSNSTTTIRTKDGETRPIPIRAGVKQGCPLSPIIFNLAIEPLIRVASGLATEHGYKLHDHHFSILAYADDIVLLGKDAASLRILLDAVGSTAEWMGLKFQPPKCASLHVDCRRRREVYPTEFTIQGGGLTVLKEGEEYQHLGVPTGFRVAQTPFDAIRAIKVDVQKVHESLLAPWQKLEATNMFILSRLDFILRGGNVAKGPLTDADKTIKRLAKKWMNLPQRGSPELLYIPSYQGGANLLPLADSADVSTVVHAFRLLTCKDTIVRETAWSCLKRAVRQRIRGDPTEDMIAEYLSGSLEGQLARDRGDISSLWTQARNACRRLNSKIGVGFHWCAEKRDLSVTIKRPGQTPERIIVPETARSMIVRMLRSALRAYYLSKLLGKPDQGKAYSCTNLREASNHFLLNGRYTRFCDYRFIHRARLGVVPLNGTRRFGNGDKRCRRCGYGNETLPHVLNHCTIHSAAWQRRHNAVQDRLARGSRLPPGAVLNINRQVPGVQSTLRPDLVVLDESSKEVKIIDICIPFEGAPDALEVARQQKLEKYNQLAAELTTKGYRVSLDAFVVGSLGAWLANNYRIAKSLGIAPKYTQTMARLMVSDTIRWSRDIYIEHLTRQRQYHDQPP

SEQ ID NO: 1922 - protein, 1290 aa, Chrysoperla carnea
MSSAEDEAVEPAGTVNTTIMFPFPAEFRCEMCWADVPDTLPARRGGALRTIAKYKSHSDFKKHIKLHHGTPIFTFECADCGFRSESLKILKKHYSNHQPGAATAPTKKAAPRKRPPPANNQPPTTRPATTTEKESSPEPQHTSPPRRVTRARSASQSGASTSRTTAPKKLSSGPQPSTSTGFDHNIQRILHRIVDSSDDDNETTTTVSTNATQQPPPPKTDNGTGAALGTVTERLCRDVPMDPHTDIDPPRSDHLVGMDSRPLGSPPQPLSRTRSPAELNDVTSITRNENKTPPIAAAAQIQPDLVSIDPSATPVVVGTNADELPTPTPPTDLAESQLTKNQVRWLALLDNAASWEEFEAAVATITSDFARGTPGHVAERPPPNVQRFQNRPRPMRNRPRRAQYNPADAAKIQKLYRINKKKAMTSILSDPGSSPFCQVNTETVHEHFRGIFAHRDQEITPTPEQIRQIFRPDQNDGEDGDERFTFLLDSISKESVCARLAKTSNTAPGKDGIRYSCLKRSDPGCVVLSAIFDRCFREEKTPLAWSDSRTVLLYKKGNRDELSNWRPLTLGGTIAKLYAGVIADRVTCWAKLSNNISPMQKGFLEYEGCYEHNFIVQSALDDARRDRRQIALAWLDLANAFGSVPHDHIRRVLEEMRLPNKIRSVIAELYANTTTTIRTKDGETRPIHIRAGVKQGCPLSPIIFNLAIEPLIRVASRLAAQHGYKLNDHNFSILAYADDIVLLGKNAESLRILLDAVGSTAEWMGLKFQPPKCASLHVDCRRRREVFPTEFTIQGGGLTVLKDGEEYHHLGVPTGFRVAQTPLDAIRAIKEDVQKVHDSLLAPWQKLEATNMFILSRLDFILRGGNVAKGPLTDADKTIKRLAKKWMNLPQRGSPEVLYIPSYQGGANLLPLADSADVSTVVHAFRLLTCKDTIVRETAWYCLKRAVRRRIGEDPTEDMLAKYLSGSLEGRLARDGGDISSLWSQARNACRRLNSKISVGFHWCREKRDLSVTIIRPGQTPERIIVPETARSVVVRMLRSALRAFYLARLLGKPDQGKAYSCTNLREASNHFLLNGRYTRFCDYRFIHRTRLGVVPLNGARRFGNGDKRCRRCGYVNETLPHVLNHCTIHSAAWQRRHNAVQDRLARGSRLPPGAVLNINRQVPGVRSTLRPDLVVLDEASKEVKIIDICIPFEGAPDALEVARQQKLDKYNQLAAELSSKGYKVSLDAFVVGSLGSWLAQNYRVAKSLGISPKYTQTMARLMASDTIRWSRDIYIEHLTGQRQYHDQPL

SEQ ID NO: 1923 - protein, 1283 aa, Chrysoperla carnea
MSSADDEVAEAAGTVNITIKFPFPAEFRCEKCWVHLDTQGSQSGFNTRLSTYKSHSDYKKHIKHHHGIPIFTFECAECGHRSESLKILKKHYLSHQPGAAPAPPKKTAPRQRKTQSTQPISSQPLPPRLAGTSDEGSPVPRTQQSPPRRVTRARSVSQSGAASRQHHPLAPGPSTSTARPSTSTEYDFNIRRNILSIITSDDDSQQQPPTSHATQPQPPKTDNGTEAVRGAATERLCRDAPAETQTDYDPPPSDRLAGMDSSPPGSLPQPFSRTRSPIELNDGISDMQRSPPPVVAPIQIQPDLVINDPSTASVVAGTDDDEIVTSTQPTENQVRWLALINNAASWEEFEEAVATITADFARGSPGHVAERPRPPHHAQQFQNRPRPTRNRPRRAQYNPADAAKIQKMYRINKKKAMNSILSEPGSSPFCQVDTETVHEHFRGIFAYKDQERSPTPEEILQIFGPDQNDGGDGDERFTFLLDSISKESVCARLAKTSNTAPGKDGIRYSCLKRSDPGCIVLSAIFDRCFREEKTPLAWSDSRTVLLYKKGNRDELSNWRPLTLGGTIAKLYAGVLADRITCWAKLSNNISPMQKGFLEYEGCYEHNFMVQSALDDVRRDRRQIALAWLDLANAFGSVPHDHIRRVLEEMRLPNKMKSVIAELYSNSTTTIRTKDGETRPIPIRAGVRQGCPLSPIIFNLAIEPLIRVASRLATEHGYKLHDHHFSILAYADDIVLLGKDAASLRILLDAVGSTAEWMGLKFQPPKCASLHVDCRRRREVYPTEFTIQGGGLTVLKEGEEYQHLGVPTGFRVAQTPFDAIRVIKVDVQKVHESLLAPWQKLEATNMFILSRLDFILRGGNVAKGPLTDADKTIKRLAKKWMNLPQRGSPELLYIPSYQGGANLLPLADSADVSTVVHAFRLLTCKDTIVRETAWSCLKRAVRQRIRGDPTEDMIAEYLSGSLEGQLARDRGDISSLWTQARNACRRLNSKIGVGFHWCAEKRDLSVTIKRPGQTPERIIVPETARSMIVRMLRSALRAYYLSKLLGKPDQGKAYSCTNLREASNHFLLNGRYTRFCDYRFIHRARLGVVPLNGTRRFGNGDKRCRRCGYVNETLPHVLNHCTIHSAAWQRRHNAVQDRLARGSRLPPGAVLNINRQVPGVQSTLRPDLVVLDESSKEVKIIDICIPFEGAPDALEVARQQKLEKYNQLAAELTTKGYRVSLDAFVVGSLGAWLANNYRIAKSLGIAPKYTQTMARLMVSDTIRWSRDIYIEHLTRQRQYHDQPP

SEQ ID NO: 1924 - protein, 1283 aa, Chrysoperla carnea
MSSADDEVAEAAGTVNITIKFPFPAEFRCEKCWVHLDTQGSQSGFNTRLSTYKSHSDYKKHIKHHHGIPIFTFECAECGYRSESLKILKKHYLSHQPGAAPAPPKKTAPRQRKTQSTQPISSQPLPPRLAGTSDEGSPVPRTQQSPPRRVTRARSVSQSGAASRQHHPSAPGPSTSTARPSTSTEYDFNIRRNILSIITSDDDSQQQPPTSHATQPQPPKTDNGTEAVRGAATERLCRDAPAEIQTDYDPPPSDRLAGMDSSPPGSLPQPFSRTRSPIELNDGISDMHSSPPPVVAPIQIQPDLVINDPSTASVVAGTDDDEIVTSTQPTENQVRWLALINNAASWEEFEEAVATITADFARGSPGHVAERPRPPHHAQQFQNRPRPTRNRPRRAQYNPADAAKIQKMYRINKKKAMNSILSEPGSSPSCQVDTETVHEHFRGIFAYKDQERSPTPEEIQQIFGPDQNDGGDGDERFTFLLDSISKESVCARLAKTSNTATGKDGIRYSCLKRSDPGCIVLSAIFDRCFREEKTPLAWSDSRTVLLYKKGNRDELSNWRPLTLGGTIAKLYAGVLADRITCWAKLSNNISPMQKGFLEYEGCYEHNFIVQSALDDVRRDRRQIALAWLDLANAFSSVPHDHIRRVLEEMRLPNKMKSVIAELYSNSTTTIRTKDGETRPIPIRAGVKQGCPLSPIIFNLAIEPLIRVASGLATEHGYKLHDHHFSILAYADDIVLLGKDAASLRILLDAVGSTAEWMGLKFQPPKCASLHVDCRRRREVYPTEFTIQGGGLTVLKEGEEYQHLGVPTGFRVAQTPFDAIRAIKVDVQKVHESLLAPWQKLEATNMFILSRLDFILRGGNVAKGPLTDADKTIKRLAKKWMNLPQRGSPELLYIPSYQGGANLLPLADSADVSTVVHAFRLLTCKDTIVRETAWSCLKRAVRQRIRGDPTEDMIAEYLSGSLEGQLARDRGDISSLWTQARNACRRLNSKIGVGFHWCAEKRDLSVTIKRPGQTPERIIVPETARSMIVRMLRSALRACYLSKLLGKPDQGKAYSCTNLREASNHFLLNGRYTRFCDYRFIHRARLGVVPLNGTRRFGNGDKRCRRCGYVNETLPHVLNHCTIHSAAWQRRHNAVQDRLARGSRLPPGAVLNINRQVPGVQSTLRPDLVVLDESSKEVKIIDICIPFEGAPDALEVARQQKLEKYNQLAAELTTKGYRVSLDAFVVGSLGAWLANNYGIAKSLGIAPKYTQTMARLMVSDTIRWSRDIYIEHLTRQRQYHDQPP

SEQ ID NO: 1925 - protein, 1283 aa, Chrysoperla carnea
MSSADDEVAEAAGTVNITIKFPFPAEFRCEKCWVHLDTQGSQSGFNTRLSTYKSHSDYKKHIKHHHGIPIFTFECAECGHRSESLKILKKHYLSHQPGAAPAPPKKTAPRQRKTQSTQPISSQPLPPRLAGTSDEGSPVPRTQQSPPRRVTRARSVSQSGAASRQHHPLAPGPSTSTARPSTSTEYDFNIRRNILSIITSDDDSQQQPPTSHATQPQPPKTDNGTEAVRGAATERLCRDAPAETQTDYDPPPSDRLAGMDSSPPGSLPQPFSRTRSPIELNDGISDMQRSPPPVVAPIQIQPDLVINDPSTASVVAGTDDDEIVTSTQPTENQVRWLALINNAASWEEFEEAVATITADFARGSPGHVAERPRPPHHAQQFQNRPRPTRNRPRRAQYNPADAAKIQKMYRINKKKAMNSILSEPGSSPFCQVDTETVHEHFRGIFAYKDQERSPTPEEILQIFGPDQNDGGDGDERFTFLLDSISKESVCARLAKTSNTAPGKDGIRYSCLKRSDPGCIVLSAIFDRCFREEKTPLAWSDSRTVLLYKKGNRDELSNWRPLTLGGTIAKLYAGVLADRITCWAKLSNNISPMQKGFLEYEGCYEHNFIVQSALDDVRRDRRQIALAWLDLANAFGSVPHDHIRRVLEEMRLPNKMKSVIAELYSNSTTTIRTKDGETRPIPIRAGVKQGCPLSPIIFNLAIEPLIRVASGLATEHGYKLHDHHFSILAYADDIVLLGKDAASLRILLDAVGSTAEWMGLKFQPPKCASLHVDCRRRREVYPTEFTIQGGGLTVLKEGEEYQHLGVPTGFRVAQTPFDAIRAIKVDVQKVHESLLAPWQKLEATNMFILSRLDFILRGGNVAKGPLTDADKTIKRLAKKWMNLPQRGSPELLYIPSYQGGANLLPLADSADVSTVVHAFRLLTCKDTIVRETAWSCLKRAVRQRIRGDPTEDMIAEYLSGSLEGQLARDRGDISSLWTQARNACRRLNSKIGVGFHWCAEKRDLSVTIKRPGQTPERIIVPETARSMIVRMLRSALRAYYLSKLLGKPDQGKAYSCTNLREASNHFLLNGRYTRFCDYRFIHRARLGVVPLNGTRRFGNGDKRCRRCGYVNETLPHVLNHCTIHSAAWQRRHNAVQDRLARGSRLPPGAVLNINRQVPGVQSTLRPDLVVLDESSKEVKIIDICIPFEGAPDALEVARQQKLEKYNQLAAELTTKGYRVSLDAFVVGSLGAWLANNYRIAKSLGIAPKYTQTMARLMVSDTIRWSRDIYIEHLTRQRQYHDQPP

SEQ ID NO: 1926 - protein, 1290 aa, Chrysoperla carnea
MSSAEDEAVEPAGTVNTTIMFPFPAEFRCEMCWADVPDTLPARRGGALRTIAKYKSHSDFKKHIKLHHGTPIFTFECADCGFRSESLKILKKHYSNHQPGAATAPTKKAAPRKRPPPANNQPPTTRPATTTEKESSPEPQHTSPPRRVTRARSASQSGASTSRTTAPKKLSSGPQPSTSTGFDHNIQRILHRIVDSSDDDNETTTTVSTNATQQPPPPKTDNGTGAALGTVTERLCRDVPMDPHTDIDPPRSDHLVGMDSRPLGSPPQPLGRTRSPAELNDVTSITRNENKTPSIAAAAQIQPDLVSIDPSATPVVVGTNADELPTPTPPTDLAESQLTKNQVRWLALLDNAASWEEFEAAVATITSDFARGTPGHVAERPPPNVQRFQNRPRPMRNRPRRAQYNPADAAKIQKLYRINKKKAMTSILSDPGSSPFCQVNTETVHEHFRGIFAHRDQEITPTPEQIRQIFRPDQNDGGDGDERFTFLLDSISKESVCARLAKTSNTAPGKDGIRYSCLKRSDPGCVVLSAIFDRCFREEKTPLAWSDSRTVLLYKKGNRDELSNWRPLTLGGTIAKLYAGVIADRVTCWAKLSNNISPMQKGFLEYEGCYEHNFIVQSALDDARRDRRQIALAWLDLANAFGSVPHDHIRRVLEEMRLPNKIRSVIAELYANTTTTIRTKDGETRPIHIRAGVKQGCPLSPIIFNLAIEPLIRVASRLAAQHGYKLNDHNFSILAYADDIVLLGKNAESLRILLDAVGSTAEWMGLKFQPPKCASLHVDCRRRREVFPTEFTIQGGGLTVLKDGEEYHHLGVPTGFRVAQTPLDAIRAIKEDVQKVHDSLLAPWQKLEATNMFILSRLDFILRGGNVAKGPLTDADKTIKRLAKKWMNLPQRGSPEVLYIPSYQGGANLLPLADSADVSTVVHAFRLLTCKDTIVRETAWYCLKRAVRRRIGEDPTEDMLAKYLSGSLEGRLARDGGDISSLWSQARNACRRLNSKISVGFHWCREKRDLSVTIIRPGQTPERIIVPETARSVVVRMLRSALRAFYLARLLGKPDQGKAYSCTNLREASNHFLLNGRYTRFCDYRFIHRARLGVVPLNGARRFGNGDKRCRRCGYVNETLPHVLNHCTVHSAAWQRRHNAVQDRLARGSRLPPGAVLNINRQVPGVRSTLRPDLVVLDEASKEVKIIDICIPFEGAPDALEVARQQKLDKYNQLAAELSSKGYKVSLDAFVVGSLGSWLAQNYRVAKSLGISPKYTQTMARLMASDTIRWSRDIYIEHLTGQRQYHDQPL

SEQ ID NO: 1927 - protein, 1285 aa, Chrysoperla carnea
MSSAEDVAVEPAGTVNTTIMFPFPAEFRCEMCWVDVPDTHPAGRGVALRSIFKYKSHSDLKKHIKSHHGTPIFTFQCAECGFRSESLKILKKHHQTHQPGAATAPPKTAAPRKQPVRAARSQPPPTRLATQTTQSSPESQTTVTPPRRITRARSVSQARASNIAPPSGPQPSTSNGFDITTRIIHQILEDSSDDELPSTVNPTSATQQPPPPKTDNGTGAALGTVTERLCHDVSMDPHTYLDPPHSDRLVGINSYPLGSLPQPLSQTRSPAELNGVTSITREMETELPPVATAAQNQPDLVTIDPGATPVVAGTNVDELPTPIPPTDLADSQLTKNQVRWLALVNNAASWEEFEAAVATITADLARGTPGHVAERPPPNVQRFQNRPRPMRNRPRRAQYNPADAAKIQKLYKINKKKAMTSILSDPGSSPFCQVNTETVHEHFRGIFAHKDQEITPTPEQIRQIFRSDQNDGGDGDERFTFLLDSISKESVCARLAKTSNTAPGKDGIRYSCLKRSDPGCVVLSAIFDRCFREEKTPLAWNDSRTVLLYKKGNRDELSNWRPLTLGGTIAKLYAGVIADRVTCWAKLSDNISPMQKGFLEYEGCYEHNFIVQSALDDARRDGRQIALAWLDLANAFGSVPHDHIRRVLEEMRLPNKIRSVIAELYANTTTTIRTKDGETRPIHIRAGVKQGCPLSPIIFNLAIEPLIRVASGLAAQHGYKLHNHSFSILAYADDIVLLGKNAESLRILLDAVGSTAEWMGLKFQPPKCASLHVDCRRRREVFPTEFTIQGGGLTVLKDGEEYQHLGVPTGFRVTQTPLDAIRAIKEDVQKVHDSLLAPWQKLEATNMFILSRLDFILRGGNVAKGPLTDADKTIKRLAKKWMNLPQRGSPEILYIPSYQGGANLLPLADSADVSTVVHAFRLLTCKDTIVRETAWSCLKRVVRRRIGEDPTEDMLAKYLSGSLEGRLARDGGDISSLWSQARNACRRLNSKIGVGFHWCREKRDLSVTINRPGQTPERIIVPETARSVVVRMLRSALRAFYLARLLGKPDQGKAYSCTNLREASNHFLLNGRYTRFCDYRFIHRARLGVVPLNGARRFGNGDKRCRRCGYVNETLPHVLNHCTVHSAAWQRRHNAVQDRLARGSRLPPGAVLNINRQVPGVRSTLRPDLVVLDEASKEVKIIDICIPFEGAPDALEVARQQKLDKYNQLAAELSSKGYRVSLDAFVVGSLGSWLAQNYRVAKSLGISPKYTQTMARLMASDTIRWSRDIYIEHLTGQRQYHDQPL

SEQ ID NO: 1928 - protein, 1285 aa, Chrysoperla carnea
MSSAEDVAVEPAGTVNTTIMFPFPAEFRCEMCWVDVPDTHPAGRGVALRSIFKYKSHSDLKKHIKSHHGTPIFTFQCAECGFRSESLKILKKHHQTHQPGAATAPPKTAAPRKQPVRAARSQPPPTRLATQTTQSSPESQTTVTPPRRITRARSVSQAGASNIAPPSGPQPSTSTGFDITTRIIHQILEDSSDDELPSTVNPTSATQQPPPPKTDNGTGAALGTVTERLCHDVSMDPHTYLDPPHSDHLVGINSYPLGSLPQPLSQTRSPAELNGVTSITREMETELPPVATAAQNQPDLVTIDPGATPVVAGTNVDELPTPIPPTDLADSQLTKNQVRWLALVNNAASWEEFEAAVATITADLARGTPGHVAERPPPNVQRFQNRPRPMRNRPRRAQYNPADAAKIQKLYKINKKKAMTSILSDPGSSPFCQVNTETVHEHFRGIFAHKDQEITPTPEQIRQIFRSDQNDGGDGDERFTFLLDSISKESVCARLAKTSNTAPGKDGIRYSCLKRSDPGCVVLSAIFDRCFREEKTPLAWNDSRTVLLYKKGNRDELSNWRPLTLGGTIAKLYAGVIADRVTCWAKLSDNISPMQKGFLEYEGCYEHNFIVQSALDDARRDGRQIALAWLDLANAFGSVPHDHIRRVLEEMRLPNKIRSVIAELYANTTTTIRTKDGETRPIHIRAGVKQGCPLSPIIFNLAIEPLIRVASGLAAQHGYKLHNHSFSILAYADDIVLLGKNAESLRILLDAVGSTAEWMGLKFQPPKCASLHVDCRRRREVFPTEFTIQGGGLTVLKDGEEYQHLGVPTGFRVTQTPLDAIRAIKEDVQKVHDSLLAPWQKLEATNMFILSRLDFILRGGNVAKGPLTDADKTIKRLAKKWMNLPQRGSPEILYIPSYQGGANLLPLADSADVSTVVHAFRLLTCKDTIVRETAWSCLKRVVRRRIGEDPTEDMLAKYLSGSLEGRLARDGGDISSLWSQARNACRRLNSKISVGFHWCREKRDLSVTINRPGQTPERIIVPETARSVVVRMLRSALRAFYLARLLGKPDQGKAYSCTNLREASNHFLLNGRYTRFCDYRFIHRARLGVVPLNGARRFGNGDKRCRRCGYVNETLPHVLNHCTVHSAAWQRRHNAVQDRLARGSRLPPGAVLNINRQVPGVRSTLRPDLVVLDEASKEVKIIDICIPFEGAPDALEVARQQKLDKYNQLAAELSSKGYRVSLDAFVVGSLGSWLAQNYRVAKSLGISPKYTQTMARLMASDTIRWSRDIYIEHLTGQRQYHDQPL

SEQ ID NO: 1929 - protein, 876 aa, Chrysoperla carnea
MYRINKKKAMNSILSEPGSSPFCQVDTETVHEHFRGIFAYKDQERSPTPEEIRQIFGPDQNDGGDGDERFTFLLESISKESVCARLAKTSNTAPGKDGIRYSCLKRSDPGCIVLSAIFDRCFREEKTPLAWSDSRTVLLYKKGNRDELSNWRPLTLGGTIAKLYAGVLADRITCWAKLSNNISPMQKGFLEYEGCYEHNFIVQSALDDVRRDRRQIALAWLDLANAFGSVPHDHIRRVLEEMRLPNKMKSVIAELYSNSTTTIRTKDGETRPIPIRAGVKQGCPLSPIIFNLAIEPLIRVASRLATEHGYKLHDHHFSILAYADDIVLLGKDAASLRILLDAVGSTAEWMGLKFQPPKCASLHVDCRRRREVYPTEFTIQGGGLTVLKEGEEYQHLGVPTGFRVAQTPFDAIRAIKVDVQKVHESLLAPWQKLEATNMFILSRLDFILRGGNVAKGPLTDADKTIKRLAKKWMNLPQRGSPELLYIPSYQGGANLLPLADSADVSTVVHAFRLLTCKDTIVRETAWSCLKRAVRQRIRGDPTEDMIAEYLSGSLEGQLARDRGDISSLWTQARNACRRLNSKIGVGFHWCAEKRDLSVTIKRPGQTPERIIVPETARSMIVRMLRSALRAYYLSKLLGKPDQGKAYSCTNLREASNHFLLNGRYTRFCDYRFIHRARLGVVPLNGTRRFGNGDKRCRRCGYVNETLPHVLNHCTIHSAAWQRRHNAVQDRLARGSRLPPGAVLNINRQVPGVQSTLRPDLVVLDESSKEVKIIDICIPFEGAPDALEVARQQKLEKYNQLAAELTTKGYRVSLDAFVVGSLGAWLANNYRIAKSLGIAPKYTQTMARLMVSDTIRWSRDIYIEHLTRQRQYHDQPP

SEQ ID NO: 1930 - protein, 876 aa, Chrysoperla carnea
MYRINKKKAMNSILSEPGSSPFCQVDTETVHEHFRGIFAYKDQERSPTPEEIRQIFGPDQNDGGDGDERFTFLLDSISKESVCARLAKTSNTAPGKDGIRYSCLKRSDPGCIVLSAIFDRCFREEKTPLAWSDSRTVLLYKKGNRDELSNWRPLTLGGTIAKLYAGVLADRITCWAKLANNISPMQKGFLEYEGCYEHNFIVQSALDDVRRDRRQIALAWLDLANAFGSVPHDHIRRVLEEMRLPNKMKSVIAELYSNSTTTIRTKDGETRPIPIRAGVKQGCPLSPIIFNLAIEPLIRVASGLATEHGYKLHDHHFSILAYADDIVLLGKDAASLRILLDAVGSTAEWMGLKFQPPKCASLHVDCRRRREVYPTEFTIQGGGLTVLKEGEEYQHLGVPTGFRVAQTPFDAIRAIKVDVQKVHESLLAPWQKLEATNMFILSRLDFILRGGNVAKGPLTDADKTIKRLAKKWMNLPQRGSPELLYIPSYQGGANLLPLADSADVSTVVHAFRLLTCKDTIVRETAWSCLKRAVRQRIRGDPTEDMIAEYLSGSLEGQLARDRGDISSLWTQARNACRRLNSKIGVGFHWCAEKRDLSVTIKRPGQTPERIIVPETARSMIVRMLRSALRAYYLSKLLGKPDQGKAYSCTNLREASNHFLLNGRYTRFCDYRFIHRARLGVVPLNGTRRFGNGDKRCRRCGYVNETLPHVLNHCTIHSAAWQRRHNAVQDRLARGSRLPPGAVLNINRQIPGVQSTLRPDLVVLDESSKEVKIIDICIPFEGAPDALEVARQQKLEKYNQLAAELTTKGYRVSLDAFVVGSLGAWLANNYRIAKSLGIAPKYTQTMARLMVSDTIRWSRDIYIEHLTRQRQYHDQPP

SEQ ID NO: 1931 - protein, 1283 aa, Chrysoperla carnea
MSSADDEVAEAAGTVNITIKFPFPAEFRCEKCWVHLDTQGSQSGFNTRLSTYKSHSDYKKHIKHHHGIPIFTFECAECGHRSESLKILKKHYLSHQPGAAPAPPKKTAPRQRKTQSTQPISSQPLPPRLAGTSDEGSPVPRTQQSPPRRVTRARSVSQSGAASRQHHPSAPGPSTSTARPSTSTEYDFNIRRNILSIITSDDDSQQQPPTSHATQPQPPKTDNGTEAVRGAATERLCRDAPAETQTDYDPPPSDRLAGMDSSPPGSLPQPFSRTRSPIELNDGISDMQRSPPPVVAPIQIQPDLVINDPSTASVVAGTDDDEIATSTQPTENQVRWLALINNAASWEEFEEAVATITADFARGSPGHVAERPRPPHHAQQFQNRPRPTRNRPRRAQYNPADAAKIQKMYRINKKKAMNSILSEPGSSPFCQVDTETVHEHFRGIFAYKDQERSPTPEEIRQIFGPDQNDGGDGDERFTFLLDSISKESVCARLAKTSNTAPGKDGIRYSCLKRSDPGCIVLSAIFDRCFREEKTPLAWSDSRTVLLYKKGNRDELSNWRPLTLGGTIAKLYAGVLADRITCWAKLSNNISPMQKGFLEYEGCYEHNFIVQSALDDVRRDRRQIALAWLDLANAFGSVPHDHIRRVLEEMRLPNKMKSVIAELYSNSTTTIRTKDGETRPIPIRAGVKQGCPLSPIIFNLAIEPLIRVASGLATEHGYKLHDHHFSILAYADDIVLLGKDAASLRILLDAVGSTAEWMGLKFQPPKCASLHVDCRRRREVYPTEFTIQGGGLTVLKEGEEYQHLGVPTGFRVAQTPFDAIRAIKVDVQKVHESLLAPWQKLEATNMFILSRLDFILRGGNVAKGPLTDADKTIKRLAKKWMNLPQRGSPELLYIPSYQGGANLLPLADSADVSTVVHAFRLLTCKDTIVRETAWSCLKRAVRQRIRGDPTEDMIAEYLSGSLEGQLARDRGDISSLWTQARNACRRLNSKIGVGFHWCAEKRDLSVTIKRPGQTPERIIVPETARSMIVRMLRSALRAYYLSKLLGKPDQGKAYSCTNLREASNHFLLNGRYTRFCDYRFIHRARLGVVPLNGTRRFGNGDKRCRRCGYVNETLPHVLNHCTIHSAAWQRRHNAVQDRLARGSRLPPGAVLNINRQVPGVQSTLRPDLVVLDESSKEVKIIDICIPFEGAPDALEVARQQKLEKYNQLAAELTTKGYRVSLDAFVVGSLGAWLANNYRIAKSLGIAPKYTQTMARLMVSDTIRWSRDIYIEHLTRQRQYHDQPP

SEQ ID NO: 1932 - protein, 1283 aa, Chrysoperla carnea
MSSADDEVAEAAGTVNITIKFPFPAEFRCEKCWVHLDTQGSQSGFNTRLSTYKSHSDYKKHIKHHHGIPIFTFECAECGYRSESLKTLKKHYLSHQPGAAPAPPKKTAPRQRKTQSTQPISSQPLPPRLAGTSDEGSPVPRTQQSPPRRVTRARSVSQSGAASRQHHPLAPGPSTSTARPSTSTEYDFNIRRNILSIITSDDDSQQQPPTSHATQPQPPKTDNGTEAVRGTATERLCRDAPAEIQTDYDPPPSDRLAGMDSSPPGSLPQPLSRTRSPIELNDGISDMHSSPPPVVAPIQIQPDLVINDPSTASVVAGTDDDEIVTSTQPTENQVRWLALINNAASWEEFEEAVATITADFARGSPGHVAERPRPPHHAQQFQNRPRPIRNRPRRAQYNPADAAKIQKMYRINKKKAMNSILSEPGSSPFCQVDTETVHEHFRGIFAYKDQERSPTPEEIRQIFGPDQNDGGDGDERFTFLLDSISKESVCARLAKTSNTAPGKDGIRYSCLKRSDPGCIVLSAIFDRCFREEKTPLAWSDSRTVLLYKKGNRDELSNWRPLTLGGTIAKLYAGVLADRITCWAKLSNNISPMQKGFLEYEGCYEHNFIVQSALDDVRRDRRQIALAWLDLANAFGSVPHDHIRRVLEEMRLPNKMKSVIAELYSNSTTTIRTKDGETRPIPIRAGVRQGCPLSPIIFNLAIEPLIRVASRLATEHGYKLHDHHFSILAYADDIVLLGKDAASLRILLDAVGSTAEWMGLKFQPPKCASLHVDCRRRREVYPTEFTIQGGGLTVLKEGEEYQHLGVPTGFRVAQTPFDAIRAIKVDVQKVHESLLAPWQKLEATNMFILSRLDFILRGGNVAKGPLTDADKTIKRLAKKWMNLPQRGSPELLYIPSYQGGANLLPLADSADVSTVVHAFRLLTCKDTIVRETAWSCLKRAVRQRIRGDPTEDMIAEYLSGSLEGQLARDRGDISSLWTQARNACRRLNSKIGVGFHWCAEKRDLSVTIKRPGQTPERIIVPETARSMIVRMLRSALRAYYLSKLLGKPDQGKAYSCTNLREASNHFLLNGRYTRFCDYRFIHRARLGVVPLNGTRRFGNGDKRCRRCGYVNETLPHVLNHCTIHSAAWQRRHNAVQDRLARGSRLPPGAVLNINRQVPGVQSTLRPDLVVLDESSKEVKIIDICIPFEGAPDALEVARQQKLEKYNQLAAELTTKGYRVSLDAFVVGSLGAWLANNYRIAKSLGIAPKYTQTMARLMVSDTIRWSRDIYIEHLTRQRQYHDQPP

SEQ ID NO: 1933 - protein, 1283 aa, Chrysoperla carnea
MSSADDEVAEAAGTVNITIKFPFPAEFRCEKCWVHLDTQGSQSGFNTRLSTYKSHSDYKKHIKHHHGIPIFTFECAECGHRSESLKILKKHYLSHQPGAAPAPPKKTAPRQRKTQSTQPISSQPLPPRLAGTSDEGSPVPRTQQSPPRRVTRARSVSQSGAASRQHHPSAPGPSTSTARPSTSTEYDFNIRRNILSIITSDDDSQQQPPTSHATQPQPPKTDNGTEAVRGAATERLCRDAPAETQTDYDPPPSDRLAGMDSSPPGSLPQPFSRTRSPIELNDGISDMQRSPPPVVAPIQIQPDLVINDPSTASVVAGTDDDEIVTSTQPTENQVRWLALINNAASWEEFEEAVATITADFARGSPGHVAERPRPPHHAQQFQNRPRPTRNRPRRAQYNPADAAKIQKMYRINKKKAMNSILSEPGSSPFCQVDTETVHKHFRGIFAYKDQERSPTPEEIRQIFGPDQNDGGDGDERFTFLLDSISKESVCARLAKTSNTAPGKDGIRYSCLKRSDPGCIVLSAIFDRCFREEKTPLAWSDSRTVLLYKKGNRDELSNWRPLTLGGTIAKLYAGVLADRITCWAKLSNNISPMQKGFLEYEGCYEHNFIVQSALDDVRRDRRQIALAWLDLANAFGSVPHDHIRRVLEEMRLPNKMKSVIAELYSNSTTTIRTKDGETRPIPIRAGVKQGCPLSPIIFNLAIEPLIRVASGLATEHGYKLHDHHFSILAYADDIVLLGKDAASLRILLDAVGSTAEWMGLKFQPPKCASLHVDCRRRREVYPTEFTIQGGGLTVLKEGEEYQHLGVPTGFRVAQTPFDAIRAIKVDVQKVHESLLAPWQKLEATNMFILSRLDFILRGGNVAKGPLTDADKTIKRLAKKWMNLPQRGSPELLYIPSYQGGANLLPLADSADVSTVVHAFRLLTCKDTIVRETAWSCLKRAVRQRIRGDPTEDMIAEYLSGSLEGQLARDRGDISSLWTQARNACRRLNSKIGVGFHWCAEKRDLSVTIKRPGQTPERIIVPETARSMIVRMLRSALRAYYLSKLLGKPDQGKAYSCTNLREASNHFLLNGRYTRFCDYRFIHRARLGVVPLNGTRRFGNEDKRCRRCGYVNETLPHVLNHCTIHSAAWQRRHNAVQDRLARGSRLPPGAVLNINRQVPGVQSTLRPDLVVLDESSKEVKIIDICIPFEGAPDALEVARQQKLEKYNQLAAELTTKGYRVSLDAFVVGSLGAWLANNYRIAKSLGIAPKYTQTMARLMVSDTIRWSRDIYIEHLTRQRQYHDQPP

SEQ ID NO: 1934 - protein, 1284 aa, Chrysoperla carnea
MSSAEDVAVEPAGTVNTTIMFPFPAEFRCEMCWVDVPDTHPAGRGVALRSIFKYKSHSDLKKHIKSHHGTPIFTFQCAECGFRSESLKILKKHHQTHQPGAATAPPKTAAPRKQPARAARSQPPPTRLATQTTQSSPESQATVLPPRRITRARSVSQAGASNIAPPSGPQPSTSTGFDITRIIHQILEDSSDDELPSTVNPTSATQQPPPPKTDNGTGAALGTVTERLCHDVSMDPHTDLDPPHSDHLVGINSYPLGSLPQPLSQTRSPAELNGVTSITREMETKLPPVATATQNQPDLVTIDPGATPVVAGTNVDELPTPIPPTDLADSQLTKNQVRWLALVNNAASWEEFEAAVATITADLARGTPGHVAERPPPNVQRFQNRPRPMRNRPRRAQYNPADAAKIQKLYKINKKKAMTSILSDPGSSPFCQVNTETVHEHFRGIFAHKDQEITPTPEQIRQIFRSDQNDGGDGDERFTFLLDSISKESVCARLAKTSNTAPGKDGIRYSCLKRSDPGCVVLSAIFDRCFREEKTPLAWNDSRTVLLYKKGNRDELSNWRPLTLGGTIAKLYAGVIADRVTCWAKLSDNISPMQKGFLEYEGCYEHNFIVQSALDDARRDGRQIALAWLDLANAFGSVPHDHIRRVLEEMRLPNKIRSVIAELYANTTTTIRTKDGETRPIHIRAGVKQGCPLSPIIFNLAIEPLIRVASGLAAQHGYKLHNHSFSILAYADDIVLLGKNAESLRILLDAVGSTAEWMGLKFQPPKCASLHVDCRRRREVFPTEFTIQGGGLTVLKDGEEYQHLGVPTGFRVTQTPLDAIQAIKEDVQKVHDSLLAPWQKLEATNMFILSRLDFILRGGNVAKGPLTDADKTIKRLAKKWMNLPQRGSPEILYIPSYQGGANLLPLADSADVSTVVHAFRLLTCKDTIVRETAWSCLKRVVRRRIGEDPTEDMLAKYLSGSLEGRLARDGGDISSLWSQARNACRRLNSKISVGFHWCREKRDLSVTINRPGQTPERIIVPETARSVVVRMLRSALRAFYLARLLGKPDQGKAYSCTNLREASNHFLLNGRYTRFCDYRFIHRARLGVVPLNGARRFGNGDKRCRRCGYVNETLPHVLNHCTVHSAAWQRRHNAVQDRLARGSRLPPGAVLNINRQVPGVRSTLRPDLVVLDETSKEVKIIDICIPFEGAPDALEVARQQKLDKYNQLAAELSSKGYRVSLDAFVVGSLGSWLAQNYRVAKSLGISPKYTQTMARLMASDTIRWSRDIYIEHLTGQRQYHDQPL

SEQ ID NO: 1935 - protein, 1283 aa, Chrysoperla carnea
MSSADDEVAEAAGTVNITIKFPFPAEFRCEKCWVHLDTQGSQSGFNTRLSTYKSHSDYKKHIKHHHGIPIFTFECAECGYRSESLKTLKKHYLSHQPGAAPAPPKKTAPRQRKTQSTQPISSQPLPPRLAGTSDEGSPVPRTQQSPPRRVTRARSVSQSGAASRQHHPSAPGPSTSTARPSTSTEHDFNIRRNILSIITSDDDSQQQPPTSHATQPQPPKTDNGTEAVRGTATERLCRDAPAEIQTDYDPPPSDRLAGMDSSPPGSLPQPLSRTRSPIELNDGISDMHSSPPPVVAPIQIQPDLVINDPSTASVVAGTDDDEIVTSTQPTENQVRWLALINNAASWEEFEEAVATITADFARGSPGHVAERPRPPHHAQQFQNRPRPIRNRPRRAQYNPADAAKIQKMYRINKKKAMNSILSEPGSSPFCQVDTETVHEHFRGIFAYKDQERSPTPEEIRQIFGPDQNDGGDGDERFTFLLDSISKESVCARLAKTSNTAPGKDGIRYSCLKRSDPGCIVLSAIFDRCFREEKTPLAWSDSRTVLLYKKGNRDELSNWRPLTLGGTIAKLYAGVLADRITCWAKLSNNISPMQKGFLEYEGCYEHNFIVQSALDDVRRDRRQIALAWLDLANAFGSVPHDHIRRVLEEMRLPNKMKSVIAELYSNSTTTIRTKDGETRPIPIRAGVRQGCPLSPIIFNLAIEPLIRVASGLATEHGYKLHDHHFSILAYADDIVLLGKDAASLRILLDAVGSTAEWMGLKFQPPKCASLHVDCRRRREVYPTEFTIQGGGLTVLKEGEEYQHLGVPTGFRVAQTPFDAIRAIKVDVQKVHESLLAPWQKLEATNMFILSRLDFILRGGNVAKGPLTDADKTIKRLAKKWMNLPQRGSPELLYIPSYQGGANLLPLADSADVSTVVHAFRLLTCKDTIVRETAWSCLKRAVRQRIRGDPTEDMIAEYLSGSLEGQLARDRGDISSLWTQARNACRRLNSKIGVGFHWCAEKRDLSVTIKRPGQTPERIIVPETARSMIVRMLRSALRAYYLSKLLGKPDQGKAYSCTNLREASNHFLLNGRYTRFCDYRFIHRARLGVVPLNGTRRFGNGDKRCRRCGYVNETLPHVLNHCTIHSAAWQRRHNAVQDRLARGSRLPPGAVLNINRQVPGVQSTLRPDLVVLDESSKEVKIIDICIPFEGAPDALEVARQQKLEKYNQLAAELTTKGYRVSLDAFVVGSLGAWLANNYRIAKSLGIAPKYTQTMARLMVSDTIRWSRDIYIEHLTRQRQYHDQPP

SEQ ID NO: 1936 - protein, 1301 aa, Chrysoperla carnea
MSQIQKMSNLRSRFFGPQAGSSRPSPTEPRPPAGDASTLPIGGSSHGYEGEQSNLALDPRLVPETRRAADDEEPSQGTSQESRASTQNSRLQRFQWTKALKADLLTCYEASEPSRRGYMGRMHTLWCEKHPELSYMKSQHLRDQVSRLKKTGFDKPRTGQEKRCRTTQAEVNRGDEIEPAAIGVVHSTRETLVAETQDGISQDEPVLESERSDTETQDRVCQNTPPSPVLEASPPTPPIPGDIPALPVLTAETATPLTSTTEANVEETAILPAEPPNTRLEELKERFQNILFITDNDLSKRKRPKYRKTFAKAQDLALINQIVDDHLNHTSSLLEIDSSVYAAMCALSPAPKSTETAEEKTRKRIEQLDSKLTPLRQTVSRIECVLEYQKAGKPFTPKVRAFARELRHQHHTLNKGILLTIKQRNIEKIRALALARKKLVKREKCIRENKIFVSNPSRLFAKPPSLVENPPSIEQIDGYWRDLYEKSTSVDKNIRPIKLFERFCNARLAEQAVLTSVTADEVSLAFKGKKNHSAPGMDAVSNFWWKRLTSTHAHLARHFTSYILGYGTFPTWFAEGRTVLIPKKGDLSVPSNYRPITCLNTVYKAFTSILNERILTTIEPVWQMIYEQRGSKRGISGCKDNLLVDRCICQDARQYQRDLSMAWVDYRKAFDTTSHQLILVLLKCLKIHPDIIRCIEELLPLWKTKFTIRCGKRTVSTDLVTYKRGVYQGDSLSPLLFCISLMPLSLRLREETGYRCGPPADRKHQVTHLFYMDDLKLYASSKSSLSQALKAVHQYTKAIGMEFGLDKCAVIHCKRGRVPDYDADVQLTDGSIVKHLDEEELYTYLGVGENHIQSVSTVKEALRGRYRHRLRQIWQSELSGIHKIRATNMLAIPILLYSFGSIKWTIEELKELDRGTRKLMNVNRSLHPRASVPRNYLPRQQGGRGLLSVECLHDRVVLGIACQVINSSDPLMKLVRDHELQGKGAFLFSAAQHAASKLGLAFDPSNRDLDDNVVLLSKSRLRSAVKRAEIRSLFEDHRNRDHQGMFYRHLDTCSLSVDLTFSFLRSAGLKSETEGFIIAAQDGVIATLTHQKYVYKQAVPSTMCRACKSQPETLMHLISACPSYATNTYIHRHNAALRVLYYFLRHKYEVDPTPVLPYAPGEIESVVKNEKCIIFWNFSFPTTRQLSATKPDIVLQDILSKTMYVIEFSAPAETNIVTKEEQKRTKYLDLLQELRQLHPGYSVKMVVLIIGCLGGIRPTLETNLSQIPVCRSHLRHLISSMQKAVIIGTLRTLRSHQTVFK

SEQ ID NO: 1937 - protein, 1295 aa, Chrysoperla carnea
MSNLRSRFFGPQAGSSRPSPTEPRPPAGDASTLPIGGSSHGYEGEQSNLALDPRLVPETRRAADDEEPSQGTSQESRASTQNSRLQRFQWTKALKADLLTCYEASEPSRRGYMGRMHTLWCEKHPELSHMKAQHLRDQVSRLKKTGFDKPRTGIEKRCRTTQAEVNRGNEIVPAATGVVHSTRETLVAETQDGISQDEPVLESERSDTETQDRVCQNTPPPPVLEASPPTPLIPGDIPALPVLTAETATPLTSTTEANVEETPILPAEPPNTRLEELKERFQNILFITDNDLSKRKRPKYRKTFAKAQDLALINQIVDDHLNHTSSLLEIDSSVYAAMCALSPAPKSTETAEEKTCKRIEQLDSKLTPLRQTVSRIECVLEYQKAGKPFTPKVRAFARELRHQHHTLNKGILLTIKQRNIEKIRALALARKKLVKREKCIRENKIFVSNPSRLFAKPPSLVENPPSIEQIDGYWRDLYEKSTSVDKNIRPIKLFERFCNARLAEQAVLTSVTADEVSLAFKGKKNHSAPGMDAVSNFWWKRLTSTHAHLARHFTSYILGFGTFPTWFAEGRTVLIPKKGDLSVPSNYRPITCLNTVYKAFTSILNERILTTIEPVWQMIYEQRGSKRGISGCKDNLLVDRCICQDARQYQRDLSMAWVDYRKAFDTTSHQLILVLLKCLKIHPDIIRCIEELLPLWKTKFTIRCGKRTVSTDLVTYKRGVYQGDSLSPLLFCISLMPLSLRLREETGYRCGPPADRKHQVTHLFYMDDLKLYASSQSSLSQALKAVHQYTKAIGMEFGLDKCAVIHCKRGRVPDYDADVQLTDGSIVKHLDEEELYTYLGVGENHIQSVSTVKEALRGRYRHRLRQIWQSELSGIHKIRATNMLAIPILLYSFGSIKWTIEELKELDRGTRKLMNVNRSLHPRASVPRNYLPRQQGGRGLLSVECLHDRVVLGIACQVINSSDPLMELVRDHELQGKGAFLFSAAQHAASKLGLAFDPSNRDLDDNVILLSKSRLRLAVKRAEIRSLFEDHRHRDHQGMFYRHLDSCGLSVDLTFSFLRSAGLKSETEGFIIAAQDGVIATLTHLKYVYKKAVSTTMCRACKSQPETLMHLISACPSYATNTYIHRHNAALRVLYYFLRHKYEVDPTPVLPYAPGEIESVVKNEKCIIFWNFSFPTTRQLSATKPDIVLQDISSKTMYVIEFSAPAETNIVTKEEQKRTKYLDLLQELRQLHPGYSVKMVVLIIGCLGGIRPTLETNLSQIPVCRSHLRHLISSMQKAVIIGTLRTLRSHQTVFK

SEQ ID NO: 1938 - protein, 1301 aa, Chrysoperla carnea
MSQIQKMSNLRSRFFGPQAGSSRPSPTEPRPPAGDASTLPIGGSSHGYEGEQSNLALDPRLVPETRRAADDEEPSQGTSQESRASTQNSRLQCFQWTKALKADLLTCYEASEPSRRGYMGRMHTLWCEKHPKLSHMKSQHLRDQASRLKKTGFDKPRTGQEKRCRTTQAEVNRGDEIEPAAIGVVHPTRETLVAETQDGISQDEPVLESERSDTETQDRVCQNTPPPPVLEASAPTPLIPEDIPALSVLTAETATPLTSTTEANVEQTPILPAEPPNTRLEELKERFQNILFKTDNDLSKRKRPKYRKTFAKAQDLALINQIVDDHLNHTSSLLEIDSSVYAAMCALSPAPKSTETAEEKTRKRIEQLDSKLTPLRQTVSRIECVLEYQKAGKPFTPKVRAFARELRHQHHTLNKGILLTIKQRNIEKIRALALARKKLVKREKCIRENKIFASNPSRLFAKPPSLVENPPSIEQIDGYWRDLYEKSTSVHKNIRPIKLFERFCNVRLAEQAVLTSVTADEVSLAFKGKKNHSAPGMDAVSNFWWKRLTSTHAHLARHFTSYILGYGTFPTWFAEGRTVLIPKKGDLSVPSNYRPITCLNTVYKAFTSILNERILTTIEPVWQMIYEQRGSKRSISGCKDNLLVDRCICQDARQYQRDLSVAWVDYRKAFDTTSHQLILVLLKCLKIHPDIIRCIEELLPLWKTKFTIRCGKRTVSTDLVTYKRGVYQGDSLSPLLFCISLMPLSLRLREETGYRCGPPADRKHQVTHLFYMDDLKLYASSESSLSQALKAVHQYTKAIGMEFGLDKCAVIHCKRGRVPDYDADVQLTDGSIVKHLDEEELYTYLGVGENHIQSVSTVKEALRGRYRHRLRQIWQSELSGIHKIRATNMLAIPILLYSFGSIKWTIEELKELDRGTRKLMNVNRSLHPRASVPRNYLPRQQGGRGLLSVECLHDRVVLGIACQVINSSDPLMKLVRDHELQGKGAFLFSAAQHAASKLGLAFDPSNRDLDDNVVLLSKSRLRSAVKRAEIRSLFEDHRNRDHQGMFYRHLDTCSLSVDLTFSFLRSAGLKSETDGFIIAAQDGVIATLTHQNYVYKQAVSTTMCRACKSQPETLMHLISACPSYATNTYIHRHNAALRVLYYFLRHKYEVDPTPVLPYAPGEIESVVKNEKCIIFWNFSFPTTRQLSATKPDIVLQDILSKTMYVIEFSAPAETNIVTKEEQKRTKYLDLLQELRQLHPGYSVKMVVLIIGCLGGIRPTLETNLSQIPVCRSHLRHLISSMQKAVIIGTLRTLRSHQTVFK

SEQ ID NO: 1939 - protein, 1301 aa, Chrysoperla carnea
MSQIQKMSNLRSRFFGPQAGSSRPSPTEPRPPAGDASTLPIGGSSHGYEGEQSNLALDPRLVPETRRAADDEEPSQGTSQESRASTQNSRLQRFQWTKALKADLLTCYEASEPSRRGYMGRMHTLWCEKHPELSHMKSQHLRDQASRLKKTGFDKPRTGQEKRCRTTQAEVNRGDEIEPAAIGVVHPTRETLVAETQDGISQDEPVLESERSDTETQDRVCQNTPPPPVLEASPPTPLIPEDIPALPVLTAETATPLTSTTEANVEETPILPAEPPNTRLEELKERFQNILFKTDNDLSKRKRPKYRKTFAKAQDLALINQIVDDHLNHTSSLLEIDSSVYAAMCALSPAPKSTETAEEKTRKRIEQLDSKLTPLRQTVSRIECVLEYQKAGKPFTPKVRAFARELRHQHHTLNKGILLTIKQRNIEKIRALALARKKLVKREKCIRENKIFVSNPSRLFAKPPSLVENPPSIEQIDGYWRDLYEKSTSVDKNIRPIKLFERFCNARLAEQAVLTSITADEVSLAFKGKKNHSAPGMDAVSNFWWKRLTSTHAHLARHFTSYILGYGTFPTWFVEGRTVLIPKKGDLSVPSNYRPITCLNTVYKAFTSILNERILTTIEPVWQMIYEQRGSKRGISGCKDNLLVDRCICQDARQYQRDLSMAWVDYRKAFDTTSHQLILVLLKCLKIHPDIIRCIEELLPLWKTKFTIRCGKRTVSTDLVTYKRGVYQGDSLSPLLFCISLMPLSLRLREETGYRCGPPADRKHQVTYLFYMDDLKLYASSQSSLSQVLKAVHQYTKAIGMEFGLDKCAVIHCKRGRVPDYDADVQLTDGSIVKHLDEEELYTYLGVGENHIQSVSTVKEALRGRYRHRLRQIWQSELSGIHKIRATNMLAIPILLYSFGSIKWTIEELKELDRGTRKLMNVNRSLHPRASVPRNYLPRQQGGRGLLSVECLHDRVVLGIACQVINSSDPLMKLVRDHELQGKGAFLFSAAQHAASKLGLAFDPSNRDLDDNVVLLSKSRLRSAVKRAEIRSLFEDHRNRDHQGMFYRHLDTCSLSVDLTFSFLRSAGLKSETEGFIFAAQDGVIATLNHQKYVYKQAVSTTMCRACKSQPETLMHLISACPSYATNTYIHRHNAALRVLYYFLRHKYEVDPTPVLPYAPGEIESVVKNEKCIIFWNFSFPTTRQLSATKPDIVLQDILSKTMYVIEFSASAETNIVTKEEQKRSKYLDLLQELRQLHPGYSVKMVVLIIGCLGGIRPTLETNLSQIPVCRSHLRHLISSMQKAVIIGTLRTLRSHQTVFK

SEQ ID NO: 1940 - protein, 941 aa, Chrysoperla carnea
MCALSPAPKSTETAEEKTCKRIEQLDSKLTPLRQTVSRIECVLEYQKAGKPFTPKVRAFARELRHQHHTLNKGILLTIKQRNIEKIRALALARKKLVKREKCIRENKIFVSNPSRLFAKPPSLVENPPSIEQIDGYWRDLYEKSTSVDKNIRPIKLFERFCNARLAEQAVLTSVTAEEVSLAFKGKKNHSAPGMDAVSNFWWKRLTSTHAHLARHFTSYILGFGTFPTWFAEGRTVLIPKKGDLSVPSNYRPITCLNTVYKAFTSILNERILTTIEPVWQMIYEQRGSKRGISGCKDNLLVDRCICQDARQYQRDLSMAWVDYRKAFDTTSHQLILVLLKCLKIHPDIIRCIEELLPLWKTKFTIRCGKRTVSTDLVTYKRGVYQGDRLSPLLFCISLMPLSLRLREETGYRCGPPADRKHQVTHLFYMDDLKLYASSESSLSQALKAVHQYTKAIGMEFGLDKCSVIHCKRGRVPDYDADVQLTDGSIVKHLDEEELYTYLGVGENHIQSVSTVKEALRGRYRHRLRQIWQSELSGIHKIRATNMLAIPILLYSFGSIKWTIEELKELDRGTRKLMNVNRSLHPRASVPRNYLPRQQGDRGLLSVECLHDRVVLGIACQVINSSDPLMELVRDHELQGKGAFLFSAAQHAASKLGLAFDPSNRDLDDNVILLSKSRLRLAVKRAEIRSLFEDHRHRDHQGMFYRHLDSCGLSVDLTFSFLRSAGLKSETEGFIIAAQDGVIATLTHQKYVYKKAVSTTMCRACKSQPETLMHLISACPSYATNTYIHRHNAALRVLYYFLRHKYEVDPTPVLPYAPGEIESVVKNEKCIIFWNFSFPTTRQLSATKPDIVLQDISSKTMYVIEFSAPAETNIVTKEEQKRTKYLDLLQELRQLHPGYSVKMVVLIIGCLGGIRPTRIYLKFRSAGLIFVTLSLPCRRLSL

SEQ ID NO: 1941 - protein, 1295 aa, Chrysoperla carnea
MSNLRNRFFGPQAGSSRPSPTEPRPPAGDASTLPIGGSSHGYEGEQSNLALDPRLVPETRRAADDEEPSQGTSQESRASTQNSRLQRFQWTKALKADLLTCYEASEPSRRGYMGRMHTLWCEKHPELSYMKSQHLRDQVSRLKKTGFDKPRTGQEKRCRTTQAEVNRRDEIEPAAIGVVHSTRETLVAETQDGISQDEPVLESERSDTETQDRVCQNTPPPPVLEASPPTPPIPGDIPTLPVLTAETATPLTSTTEANVEETPILPAEPPNTRLEELKERFQNILFITDNDLSKRKRPKYRKTFAKAQDLALINQIVDDHLNHTSSLLEIDSSVYAAMCALSPAPKSTETAEEKTCKRIEQLDSKLTPLRQTVSRIECVLEYQKAGKPFTPKVRAFARELRHQHHTLNKGILLTIKQRNIEKIRALALARKKLVKREKCIRENKIFVSNPSRLFAKPPSLVENPPSIEQIDGYWRDLYEKSTSVDKNIRPIKLFERFCNARLAEQVVLTSVTADEVSLAFKGKKNHSAPGMDAVSNFWWKRLTSTHAHLARHFTSYILGYGTFPTWFAEGRTVLIPKKGDLSVPSNYRPITCLNTVYKAFTSILNERILTTIEPVWQMIYEQRGSKRGISGCKDNLLVDRCICQDSRQYQRDLSMAWVDYRKAFDTTSHQLILVLLKCLKIHPDIIRCIEELLPLWKTKFTIRCGKRTVSTDLVTYKRGVYQGDSLSPLLFCISLMPLSLRLREETGYRCGPPTDRKHQVTHLFYMDDLKLYASSESSLSQALKAVHQYTKAIGMEFGLDKCAVIHCKRGRVPDYDADVQLTDGSIVKHLDEEELYTYLGVGENHIQSVSTVKEALRGRYRHRLRQIWQSELSGIHKIRATNILAIPILLYSFGSIKWTIEELKELDRGTRKLMNVNRSLHPRASVPRNYLPRQQGGRGLLSVECLHDRVVLGIACQVINSSDPLMKLVRDHELQGKGAFLFSAAQHAASKLGLAFDPSNRDLDDNVVLLSKSRLRSAVKRAEIRSLFEDHRNRDHQGMFYRHLDTCSLSVDLTFSFLRSAGLKSETEGFIIAAQDGVIATLTHQKYVYKQAVSTTMCRACKSQPETLMHLISACPSYATNTYIHRHNAALRVLYYFLRHKYEVDPTPVLPYAPGEIESVVKNEKCIIFWNFSFPTTRQLSATKPDIVLQDILSKTMYVIEFSAPAETNIVTKEEQKRTKYLDLLQELRQLHPGYSVKMVVLIIGCLGGIRPTLETNLSQIPVCRSHLRHLISSMQKAVIIGTLRTLRSHQTVFK

SEQ ID NO: 1942 - protein, 1301 aa, Chrysoperla carnea
MSQIQKMSNLRSRFFGPQAGSSRPSPTEPRPPAGDASTLPIGGSSHGYEGEQSNLALDPRLVPETRRAADDEEPSQGTSQESRASTQNSRLQRFQWTKALKADLLTCYEASEPSRRGYMGRMHTLWCEKHPELSHMKSQHLRDQASRLKKTGFDKPRTGQEKRCRTTQAEVNRGDEIEPAAIGVVHSTRETLVAETQDGISQDEPVLESERSDTETQDRVCQNTPPPPVLETSPPTPLIPEDIPALPVLTAETATPLTSTTEANVEETPILPAEPPNTRLEELKERFQNILFKTDNDLSKRKRPKYRKTFAKAQDLALINQIVDDHLNHTSSLLEIDSSVYAAMCALSPAPKSTETAEEKTCKRIEQLDSKLTPLRQTVSRIECVLEYQKAGKPFTPKVRAFARELRHQHHTLNKGILLTIKQRNIEKIRALALARKKLVKREKCIRENKIFVSNPSRLFAKPPSLVENPPSIEQIDGYWRDLYEKSTNVDKNIRPIKLFERFCNARLAEQAVLTSVTADEVSLAFKGKKNHSAPGMDAVSNFWWKRLTSTHAHLARHFTSYILGYGTFPTWFAEGRTVLIPKKGDLSVPSNYRPITCLNTVYKAFTSILNERILTTIEPVWQMIYEQRGSKRGISGCKDNLLVDRCICQDARQYQRDLSMAWVDYRKAFDTTSHQLILVLLKCLKIHPDIIRCIDELLPLWKTKFTIRCGKRTVSTDLVTYKRGVYQGDSLSPLLFCISLMPLSLRLREETGYRCGPPADRKHQVTHLFYMDDLKLYASSESSLSQALKAVHQYTKAIGMEFGLDKCAVIHCKRGRVPDYDADVQLTDGSIVKHLDEEELYTYLGVGENHIQSVSTVKEALRGRYRHRLRQIWQSELSGIHKIRATNMLAIPILLYSFGSIKWTIEELKELDRGTRKLMNVNRSLHPRASVPHNYLPRQQGGRGLLSAECLHDRVVLGIACQVINSSDPLMKLVRDHELQGKGAFLFSAAQHAASKLGLAFDPSNRDLDDNVVLLSKSRLRSAVKRAEIRSLFEDHRNRDHQGMFYRHLDTCSLSVDLTFSFLRSAGLKSETEGFIIAAQDGVIATLTHQKYVYKQAVSNTMCRACKSQPETLMHLISACPSYATNTYIHRHNAALRVLYYFLRHKYEVDPTPVLPYAPGEIESVVKNEKCIIFWNFSFPTTRQLSATKPDIVLQDILSKTMYVIEFSAPAETNIVTKEEQKRTKYLDNLQELRQLHPGYSVKMVVLIIGCLGGIRPTLETNLSQIPVCRSHLRHLISSMQKAVIIGTLRTLRSHQTVFK

SEQ ID NO: 1943 - protein, 1295 aa, Chrysoperla carnea
MSNLRSRFFGPQAGSSRPSPTEPRPPAGDASTLPIGGSSHGYEGEQSNLALDPRLVPETRRAADDEEPSQGTSQESRASTQNSRLQRFQWTKALKADLLTCYEASEPSRRGYMGRMHTLWCEKHPELSYMKSQHLRDQVSRLKKTGFDKPRTGQEKRCRTTQAEVNRRDEIEPAAIGVVHSTRETLVAETQDGISQDEPVLESERSDTETQDRVCQNTPPPPVLEASPPTPPIPGDIPTLPVLTAETATPLTLTTEANVEETPILPAEPPNTRLEELKERFQNILFITDNDLSKRKRPKYRKTFAKAQDLALINQIVDDHLNHTSSLLEIDSSVYAAMCALSPAPKSTETAEEKTCKRIEQLDSKLTPLRQTVSRIECVLEYQKAGKPFTPKVRAFARELRHQHHTLNKGILLTIKQRNIEKIRALALARKKLVKREKCIRENKIFVSNPSRLFAKPPSLVENPPSIEQIDGYWRDLYEKSTSVDKNIRPIKLFERFCNARLAEQAVLTSVTADEVSLAFKGKKNHSAPGMDAVSNFWWKRLTSTHAHLARHFTSYILGYGTFPTWFAEGRTVLIPKKGDLSVPSNYRPITCLNTVYKAFTSILNERILTTIEPVWQMIYEQRGSKRGISGCKDNLLVDRCICQDARQYQRDLSMAWVDYRKAFDTTSHQLILVLLKCLKIHPDIIRCIEELLPLWKTKFTIRCGKRTVSTDLVTYKRGVYQGDSLSPLLFCISLMPLSLRLREETGYRCGPPTDRKHQVTHLFYMDDLKLYASSESSLSQALKAVHQYTKAISMEFGLDKCAVIHCKRGRVPDYDADVQLTDGSIVKHLDEEELYTYLGVGENHIQSVSTVKEALRGRYRHRLRQIWQSELSGIHKIRATNMLAIPILLYSFGSIKWTIEELKELDRGTRKLMNVNRSLHPRASVPRNYLPRQQGGRGLLSVECLHDRVVLGIACQVINSSDPLMELVRDHELQGKGAFLFSAAQHAASKLGLAFDPSNRDLDDNVVLLSKSRLRSAVKRAEIRSLFEDHRNRDHQGMFYRHLDTCSLSVDLTFSFLRSAGLKSETEGFIIAAQDGVIATLTHQKYVYKKAVSTTMCRACKSQPETLMHLISACPSYATNTYIHRHNAALRVLYYFLRHKYEVDPTPVLPYAPGEIESVVKNEKCIIFWNFSFPTTRQLSATKPDIVLQDISSKTMYVIEFSAPAETNIVTKEEQKRTKYLDLLQELRQLHPGYSVKMVVLIIGCLGGIRPTLETNLSQIPVCRSHLRHLISSMQKAVIIGTLRTLRSHQTVFK

SEQ ID NO: 1944 - protein, 1357 aa, Chrysoperla carnea
MNTLISNLNHNNNNNKGRQSLTSRPSLTLGHVPYPVTINRAQNDGLTRWVRADSAELNESNPTMSNLRSIFFGPQAGSSRPSPTEPRPPAGDASTLLIGGSSHGYEGEQSNLALDPRLVPETRRAADDEEPSQGTSQESRASTQNSLQRFQWTKALKADLLTCYEASEPARRGYMGRMHTLWCEKHPELSHMKSQHLRDQVSRLKKTGFDNPRTGQKKQCRTTQAEVNQGDEIEPAATGVVHSTRETLVAETQDGISQDEPVLESERSDTETQDRVCQNTPPPPVLEASPPTPLIPRDIPALPVLTAETATPLTSTTEANVEETPILPAEPPNTRLEELKERFQNILFITDNDLSKRKRPKYCKTFAKAQDLALINQIVDDHLNRTSSLLEIDSSVYAAMCALSPAPKSTETAEEKTRKRIEQLDSKLTPLRQTVSRIECVLEYQKAGKPFTPKVRAFARELRHQHHTLNKGILLTIKQRNIEKIRALALARKKLFKREKCIRENKIFVSNPSRLFAKPPSLVENPPSIEQIDGYWRDLYEKSTSVDKNIRPIKLFERFCNARLAEQAVLTSVTADEISLAFKGKKNHSAPGMDAVSNFWWKRLTSTHAHLARHFTSYILGYGTFPTWFAEGRTVLIPKKGDLSVPSNYRPITCLNTVYKAFTSILNERILTTIEPVWQMIYEQRGSKRGISGCKDNLLVDRCICQDARQYQRDLSMAWVDYRKTFDTTSHQLILVLLKCLKIHPDIIRCIEELLPLWKTKFTIRCGKRTVSTDLVTYKRGVYQGDSLSPLLFCISLMPLSLRLREETGYHCGPPTDRKHQVTHLYCMDDLKLYASSESSLSQALKAVHQYTKAIGMEFGLDKCAVIHCKRGRVPDYDADVQLTDGSIVKHLDEEELYTYLGVGENHIQSVSTVKEALRGRYRHRLRQIWQSELSGIHKIRATNMLAIPTLLYSFGSIKWTIEELKELDRGTRKLMNVNRSLHPRASVPRNYLPRQQGGRGLLSVECLHDRVVLGIACQVINSSDPLMELVRDHELQGKGAFLFSAAKHAASKLGLAFDPSNRDLDDNVVLLSKSRLRSAVKRAEIRSLFEDHRNRDNQGMFYRHLDTCSLSVDLTFSFLRSGGLKSETEGFIIAAQDGVIATLTHQKYVCKQAVSTTMCRACKSQPETLMHLISACPSYATNTYIHRHNAALRVLYYFLRHKYEVDPTPVLPYAPGEIESVVKNEKCIIFWNFSFPTTRQLSATKPDIVLQDILSKTMYVIEFSAPAETNIVTKEEQKRTKYLDLLQELRQLHPGYSVKMVVLIIGCLGGIRPTLETNLSQIPVCRSHLRHLISSMQKAVIIGTLRPLRSHQTVFK

SEQ ID NO: 1945 - protein, 1160 aa, Chrysoperla carnea
MSNLRSRFFGPQAGSSRPSPTEPRPPAGDASTLPIGGSSHGYEGEQSNLALDPRLVPETRRAADDEEPSQGTSQESRASTQNSRLQRFQRTKALKADLLTCYEASEPSRRGYMGRMHTLWCEKHPELSHMKSQHLRDQVSRLKKTGFDKPRTGQEKRCRTTQAEVNRGDEIEPAAIGVVHSTRETLVAETQDGISQDEPVLESERSDTETQDRVCQNTPPSPVLEASPPTPPIPGDIPALPVLTAETATPLTSTTEANVEENPILPAEPPNTRLEELKERFQNILFKTDNDLSKRKRPKYRKTFPKAQDLALINQIVDDHLNHTTSLLEIDSSVYAAMCALSPAPKSTETAEEKTRKRIEQLDSKLTPLRQTVSRIECVFEYQKAGKPFTPKVRAYARELRHQHHTLNKGILLTIKQRNIEKIRALALARKKLVKREKCIRENKIFVSNPSRLFTKPPSLVENPPSIEQIDGYWRDLYEKSTNVDKNIRPIKLFERFCNARLAEQAVLTSVTADEVSLAFKGKKNHSAPGMDAVSNFWWKRLTSTHAHLARHFTSYILGYGTFPTWFAEGRTVLIPKKGDLSVPSNYRPITCLNTVYKAFTSILNERILTTIEPVWQMIYEQRGSKRGISGCKDNLLVDRCICQDARQYQRDLSMAWVDYRKAFDTTSHQLILVLLKCLKIHPDIIRCIEELLPLWKTKFTIRCGKRTVSTDLVTYKRGVYQGDSLSPLLFCISLMPLSLRLREETGYRCGPPTDRKHQVTHLFYMDDLKLYASSESSLSQALKAVHQYTKAIGMEFGLDKCAVIRCKRGRVPDYDADVQLTDGSIVKHLDEEELYTYLGVGENHIQSVFTVKEALRGRYRHRLRQIWQSELSGIHKIRATNMLAIPILLYSFGSIKWTIEELKELDRGTRKLMNVNRSLHPRASVPRDYLPRQQGGRGLLSVECLHDRVVLGIACQVINSSDPLMELVRDHELLGKGAFLFSAAQHAASKLGLAFDPSNRDLDDNVVLLSKSRLRSAVKRAEIRSLFEDHRNRDHQGMFYRHLDTCSLSVDLTFSFLRSAGLKSETEGFIIAAQDGVIATLTHQNYVCKEAVSTTMCRACKSQPETLMHLISACPSYATNTYIHRHNAALRVLYYFLRHKYEVDPNLNYIIVYLKVVNM

SEQ ID NO: 1946 - protein, 1183 aa, Chrysoperla carnea
MGRMHTLWCEKHPELSHMKSQHLRDQVSRLKKTGFDNPRTGQKKQCRTTQAEVNQGDEIEPAATGVVHSTRETLVAETQDGISQDEPVLESERSDTETQDRVCQNTPPPPVLEASPPTPLIPRDIPALPVLTAETATPLTSTTEANVEETPILPAEPPNTRLEELKERFQNILFITDNDLSKRKRPKYRKTFAKAQDLALINQIVDDHLNRTSSLLEIDSSVYAAMCALSPAPKSTETAEEKTRKRIEQLDSKLTPLRQTVSRIECVLEYQKAGKPFTPKVRAFARELRHQHHTLNKGILLTIKQRNIEKIRALALARKKLVKREKCIRENKIFVSNPSRLFAKPPSLVENPPSIEQIDGYWRDLYEKSTSVDKNIRPIKLFERFCNARLAEQAVLTSVTADEVSLAFKGKKNHSAPGMDAVSNFWWKRLTSTHAHLARHFTSYILGYGTFPTWFAEGRTVLIPKKGDLSVPSNYRPITCLNTVYKAFTSILNERILTTIEPVWQMIYEQRGSKRGISGCKDNLLVDRCICQDARQYQRDLSMAWVDYRKAFDTTSHQLILVLLKCLKIHPDIIRCIEELLPLWKTKFTIRCGKRTVSTDLVTYKRGVYQGDSLSPLLFCISLMPLSLRLREETGYRCGPPTDRKHQVTHLFYMDDLKLYASSESSLSQALKAVHQYTKAIGMEFGLDKCAVIHCKRGRVPDYDADVQLTDGSIVKHLDEEELYTYLGVGENHIQSVSTVKEALRGRYRHRLRQIWQSELSGIHKIRATNMLAIPILLYSFGSIKWTIEELKELDRGTRKLMNVNRSLHPRASVPRNYLPRQQGGRGLLSVECLHDRVVLGIACQVINSSDPLMELVRDHELQGKGAFLFSAAQHAASKLGLAFDPSNRDLDDNVVLLSKSRLRSSVKRAEIRSLFEDHRNRDHQGMFYRHLDTCSLSVDLTFSFLRSAGLKSETEGFIIAAQDGVIATLTHQKYVCKEAVSTTMCRACKSQPETLMHLISACPSYATNTYIHRHNAALRVLYYFLRHKYEVDPTPVLPYAPGEIESVVKNEKCIIFWNFSFPTTRQLSATKPDIVLQDILSKTMYVIEFSAPAETNIVTKEEQKRTKYLDLLQELRQLHPGYSVKMVVLIIGCLGGIRPTLETNLSQIPVCRSHLRHLISSMQKAVIIGTLRTLRSHQTVFK

SEQ ID NO: 1947 - protein, 1295 aa, Chrysoperla carnea
MSNLRSRFFGPQAGSSRPSPTEPRPPAGDASTLPIGGSSHGYEGEQSNLALDPRLVPETRRAADDEEPSQGTSQESRASTQNSRLQRFQWTKALKADLLTCYEASEPARRGYMGRMHTLWCEKHPELSHMKSQHLRDQVSRLKKTGFDNPRTGQKKQCRTTQAEVNQGDEIEPAATGVVHSTRETLVAETQDGISQDELVLESERSDTETQDRVCQNTPPPPVLEASPPTPLIPRDIPALPVLTAETATPLTSTTEANVEETPILPAEPPNTRLEELKERFQNILFITDNDLSKRKRPKYRKTFAKAQDLALINQIVDDHLNRTSSLLEIDSSVYAAMCALSPAPKSTETAEEKTRKRIEQLDSKLTPLRQTVSRIECVLEYQKAGKPFTPKVRAFARELRHQHHTLNKGILLTIKQRNIEKIRALALARKKLVKREKCIRENKIFVSNPSRLFAKPPSLVENPPSIEQIDGYWRDLYEKSTSVDKNIRPIKLFERFCNARLAEQAVLTSVTADEVSLAFKGKKNHSAPGMDAVSNFWWKRLTSTHAHLARHFTSYILGYGTFPTWFAEERTVLIPKKGDLSVPSNYRPITCLNTVYKAFTSILNERILTTIEPVWQMIYEQRGSKRGISGCKDNLLVDRCICQDARQYQRDLSMAWVDYRKAFDTTSHQLILVLLKCLKIHPDIIRCIEELLPLWKTKFTIRCGKRTVSTDLVTYKRGVYQGDSLSPLLFCISLMPLSLRLREETGYRCGPPTDRKHQVTHLFYMDDLKLYASTESSLSQALKAVHQYTKAIGMEFGLDKCAVIHCKRGRVPDYDADVQLTDGSIVKHLDEEELYTYLGVGENHIQSVSTVKEALRGRYRHRLRQIWQSELSGIHKIRATNMLAIPILLYSFGSIKWTIEELKELDRGTRKLMNVNRSLHPRASVPRNYLPRQQGGRGLLSVECLHDRVVLGIACQVINSSDPLMELVRDHELQGKGAFLFSAAQHAAYKLGLAFDPSNRDLDDNVVLLSKSRLRSAVKRAEIRSLFEDHRNRDHQGMFYRHLDTCSLSVDLTFSFLRSAGLKSETEGFIIAAQDGVIATLTHQKYVCKEAVSTTMCRACKSQPETLMHLISACPSYATNTYIYRHNAALRVLYYFLRHKYEVDPTPVLPYAPGEIESVVKNEKCIIFWNFSFPTTRQLSATKPDIVLQDILSKTMYVIEFSAPAETNIVTKEEQKRTKYLDLLQELRQLHPGYSVKMVVLIIGCLGGIRPTLETNLSQIPVCRSHLRHLISSMQKAVIIGTLRTLRSHQTVFK

SEQ ID NO: 1948 - protein, 1301 aa, Chrysoperla carnea
MSQIQKMSNLRSRFFGPQAGSSRPSPTEPRPPAGDASTLPTGGSSHGYEGEQSNLALDPRLVPETRRAADDEEPSQGTSQESRASTQNSRLQRFQWTKALKADLLTCYEASEPSRRGYMGRMHTLWCEKHPELSHMKSQHLRDQVSRLKKTGFDKPRTGQEKRCRTTQAEVNRGDEIEPAAIGVVHSTRETLVAETQDGISQDEPVLESERSDTETQDRVCQNTPPPPVLEDSPPTPLIPEDIPALPVLTAETATPLTSTTEANVEETPILPAEPPNTRLEELKERFQNILFKTDNDLSKRKRPKYRKTFAKAQELALINQIIDDHLNHTSSLLEIDSSVYAAMCALSPAPKSTETAEEKTRKRIEQLDSKLTPLRQTVSRIECVLEYQKAGKPFTPKVRAFARELRHQHHTLNKGILLTIKQRNIEKIRALALARKKLVKREKCIRENKIFVSNPSRLFAKPPSLVENPPSIEQIDGYWRDLYEKSTSVDKNIRPIKLFERFCNARLAEQAVLTSVTADEVSLAFKGKKNHSAPGMDAVSNFWWKRLTSTHAHLARHFTSYILGYGTFPTWFAEGRTVLIPKKGDLSVPSNYRPITCLNTVYKAFTSILNERILTTIEPVWQMIYEQRGSKRGISGCKDNLLVDRCICQDARQYQRDLSMAWVDYRKAFDTTSHQLILVLLKCLKIHPDIIRCIEELLPLWKTKFTIRCGKRTVSTDLVTYKRGVYQGDSLSPLLFCISLMPLSLRLREETGYRCGTPTDRKHQVTHLFYMDDLKLYASSESSLSQALKAVHQYTKAIGMEFGLDKCAVIHCKRGRVPDYDADVQLTDGSIVKHLDEEELYTFLGVGENHIQSVSTVKEALRGRYRHRLRQIWQSELSGIHKIRATNMLAIPILLYSFGSIKWTIEELKELDRGTRKLMNVNRSLHPRASVPRNYLPRQQGGRGLLSVECLHDRVVLGIACQVINSSDPLMELVRDHELQGKGAFLFSAAQHAASKLGLAFDPSNRDLDDNVVLLSKSRLRSAVKRAEIRSLFEDHRNRDHQGMFYRHLDTCSLSVDLTFAFLRSAGLKSETEGFIIAAQDGVIATLTHQKYVYKKAVSTTMCRACKSQPETLMHLISACPSYATNTYIHRHNAALRVLYYFLRHKYEVDPTPVLPYAPGEIESVVKNEKCIIFWNFSFPTTRQLSATKPDIVLQDILSKTMYVIEFSAPAETNIVTKEEQKRTKYLDLLQELRQLHPGYSVKMVVLIIGCLGGICPTLEMNLSQIPVCRSHLRHLISSMQKAVIIGTLRTLRSHQTVFK

SEQ ID NO: 1949 - protein, 1295 aa, Chrysoperla carnea
MSNLRSRFFGPQAGSSRPSPTEPRPPAGDASTLPIRGSSHGYEGEQSNLALDPRLVAETRRAADDEEPSQGTSQESRASTQNSRLQRFQWTKALKADLLTCYEASEPSRRGYMGRMHTLWCQKHPELSHMKSQHLRDQVSRLKKTGFDKPRTGQEKRCRTTQAEVNRGNEIVPAATGVVHSTRETLVAETQDGISQDEPVLESERSDTETQDRVCQNTPPPPVLEASPPTPLIPGDIPALPVLTAETATPLTSTTEANVEETPILPAEPPNTRLEELKERFQNILFITDNDLSKRKRPKYRKTFAKAQDLALINQIVDDHLNHTSSLLEIDSSVYAAMCALSPAPKSTETAEEKTRKRIEQLDSKLTPLRQTVSRIECVLEYQKAGKPFTPKVRAFARELRHQHHTLNKGILLTIKQRNIEKIRALALARKKLVKREKCIRENKIFVSNPSRLFAKPPSLVENPPSIEQIDGYWRDLYEKSTSVDKNIRPIKLFERFCNARLAEQAVLTSVTADEVSLAFKGKKNHSAPGMDAVSNFWWKRLTSTHAHLARHFTSYILGYGTFPTWFAEGRTVLIPKKGDLSVPSNYRPITCLNTVYKAFTSILNERILTTIEPVWQMIYEQRGSKRGISGCKDNLLVDRCICQDARQYQRDLSMSWVDYRKAFDTTSHQLILVLLKCLKIHPDIIRCIEELLPLWKTKFTIRCGKRTVSTDLVTYKRGVYQGDSLSPLLFCISLMPLSLRLREETGYRCGPPTDRKHQVTHLFYMDDLKLYASSESSLSQALKAVHQYTKAIGMEFGLDKCAVIHCKRGRVPDYDADVQLTDGSIVKHLDEEELYTYLGVGENHIQSVSTVKEALRGRYRHRLRQIWQSELSGIHKIRATNMLAIPILLYSFGSIKWTIEELKELDRGTRKLMNVNRSLHPRASVPRNYLPRQQGGRGLLSVECLHDRVVLGIACQVINSSDPLMKLVRDHELQGKGAFLFSAAQHAASKLGLAFDPSNRDLDDNVILLSKSRLRSAVKRAEIRSLFEDHRNRDHQGMFYRHLDTCSLSVDLTFSFLRSAGLKSETEGFIIAAQDGVIATLTHQKYVCKEAVSTTMCRACKSQPETLMHLISACPSYATNTYIHRHNAALRVLYYFLRHKYEVDPTPVLPYAPGEIESVVKNEKCIIFWNFSFPTTRQLSATKPDIVLQDILSKTMYVIEFSAPAETNIVTKEEQKRTKYLDLLQELRQLHPGYSVKMVVLIIGCLGGIRPTLETNLSQIPVCRSHLRHLISSMQKAVIIGTLRTLRSHQTVFK

SEQ ID NO: 1950 - protein, 1295 aa, Chrysoperla carnea
MSNLRSRFFGPQAGSSRPSPTEPRPPAGDASTLPIGGSSHGYEGEQSNLALDPRLVPETRRAADDEEPSQGTSQESRASTQNSRLQRFQWTKALKADLLTCYEASEPSRRGYMGRMHTLWCEKHPELSHMKSQHLRDQVSRLKKTGFDNPRTGQKKQCRTTQAEVNQGDEIEPAATGVVHSTRETLVAETQDGISQDEPVLESERSDTETQDRVCQNTPPPPVLEASPPTPLIPRDIPALPVLTAETATPLTSTTEANVEETPILPAEPPNTRLEELKERFQNILFITDNDLSKRKRPKYRKTFAKAQDLALINQIVDDHLNRTSSLLEIDSSVYAAMCALSPAPKSTETAEEKTRKRIEQLDSKLTPLRQTVSRIECVLEYQKAGKPFTPKVRAFARELRHQHHTLNKGILLTIKQRNIEKIRALALARKKLVKREKCIRENKIFVSNPSRLFAKPPSLVENPPSIEQIDGYWRDLYEKSTSVDKNIRPIKLFERFCNARLAEQAVLTSITADEVSLAFKSKKNHSAPGMDAVSNFWWKRLTSTHAHLARHFTSYILGYGTFPTWFAEGRTVLIPKKGDLSVPSNYRPITCLNTVYKAFTSILNERILTSIEPVWQMIYEQRGSKRGISGCKDNLLVDRCICQDARQYQRDLSMAWVDYRKAFDTTSHQLILVLLKCLKIHPDIIRCIEELLPLWKTKFTIRCGKRTVSTDLVTYKRGVYQGDSLSPLLFCISLMPLSLRLREETGYRCGPPTDRKHQVTHLFYMDDLKLYASSESSLSQALKAVHQYTKAIGMEFGLDKCAVIHCKRGRVPDYDADVQLTDGSIVKHLDEEELYTYLGVGENHIQSVSTVKEALRGRYRHRLRQIWQSELSGIHKIRATNMLAIPILLYSFGSIKWTIEELKELDRGTRKLMNVNRSLHSRASVPRNYLPRQQGGRGLLSVECLHDRVVLGIACQVINSSDPLMKLVRDHELQGKGAFLFSAAQHAASKLGLAFDPSNCDLDDNVVLLSKSRLRSAVKRAEIRSLFEDHRNRDHQGMFYRHLDTCSLSVDLTFSFLRSAGLKSETEGFIIAAQDGVIATLTHQKYVYKQAVSTTMCRACKSQPETLMHLISACPSYATNTYIHRHNAALRVLYYFLRHKYEVDPTPVLPYAPGEIESVVTNEKCIIFWNFSFPTTRQLSATKPDIVLQDILSKTMYVIEFSAPAETNIVTKEEQKRTKYLDLLQELRQLHPGYSVKMVVLIIGCLGGIRPTLETNLSQIPVCRSHLRHLISSMQKAVIIGTLRTLRSHQTVFK

SEQ ID NO: 1951 - protein, 1295 aa, Chrysoperla carnea
MSNLRSRFFGPQAGSSRPSPTEPRPPAGDASTLPIGGSSHGYEGEQSNLALDPRLVPETRRAADDEEPSQGTSQESRASTQNSRLQRFQWTKALKADLLTCYEASEPSRRGYMGRMHTLWCEKHPELSHMKSQHLRDQVSRLKKTGFDKPRTGQEKRCRTTQAEVNRGDEIEPAAIGVVHSTRETLVAETQDGISQDEPVLESERSDTETQDMVCQNTPPPPVLEASPPMPLIPEDIPALPVLTAETATPLTSTTEANVEETPILPAEPPNTRLEELKERFQNILFKTDNDLSKRKRPKYRKTFAKAQDLALINQIVDDHLNHTSSLLEIDSSVYAAMCALSPAPKSTETAEKKTCKRIVQLDSKLTPLRQTVSRIECVLEYQKAGKPFTPKVRAFARELRHQHHTLNKGILLTIKQRNIEKIRALALARKKLVKREKCIRENKIFVSNPSRLFAKPPSLVENPPSIEQIDGYWRDLYEKSTSVDKNIRPIKLFERFCNARLAEQAVLTSVTADEVSLAFKGKKNHSAPGMDAVSNFWWKRLTSTHAHLARHFTSYILGYGTFPTWFAEGRTVLIPKKGDLSVPSNYRPITCLNTVYKAFTSILNERILTTIEPVWQMIYEQRGSKRGISGCKDNLLVDRCICQDARQYQRDLSMAWVDYRKAFDTTSHQLILVLLKCLKIHPDIIRCIEELLPLWKTKFTIRCGKRTVSTDLVTYKRGVYQGDSLSPLLFCISLMPLSLRLREETGYRCGPPADRKHQVTHLFYIDDLKLYASSKSSLSQALKAVHQYTKAIGMEFGLDKCAVIHCKRGRVPDYDADVQLTDGSIVKHLDEEELYTYLGVGENHIQSVSTVKEALRGRYRHRLRQIWQSELSGIHKIRATNMLAIPILLYSFGSIKWTIEELKELDRGTRKLMNVNRSLHPRASVPRNYLPRQQGGRGLLSVECLHDRVVLGIACQVINSSDPLMKLVRDHELQGKGAFLFSAAQHAASKLGLAFDPSNRDLDDNVILLSKSRLRSAVKRAEIRSLFEDHRNRDHHGMFYRHLDTCSLSVDLTFSFLRSAGLKSETEGFIIAAQDGVIATLTHQKYVYKQAVSNTMCRACKSQPETLMHLISACPSYATNTYIHRHNAALRVLYYFLRHKYEVDPTPVLPYAPGEIESVVKNEKCIIFWNFSYPTTRQLSATKPDIVLQDISSKTMYVIEFSAPAETNIVTKEEQKRTKYLDLLQELRQLHPGYSVKMVVLIIGCLGGIRPTLETNLSQIPVCRSHLRHLISSMQKAVIIGTLRTLRSHQTVFK

SEQ ID NO: 1952 - protein, 1295 aa, Chrysoperla carnea
MSNLRSRFFGPQAGSSRPSPTEPRPPAGDASTLPIGGSSHGYEGEQSNLALDPRLVPETRRAADDEEPSQGTSQESRASTQNSRLQRFQWTKALKADLLTCYEASEPARRGYMGRMHTLWCEKHPELSHMKSQHLRDQVSRLKKTGFDNPRTGQKKQCRTTQAEVNQGDEIEPAATGVVHSTRETLVAETQDGISQDEPVLESERSDTETQDRVCQNTPPPLVLEASPPTPLIPRDIPALPVLTAETATPLTSTTEANVEETPILPAEPPNTRLEELKERFQNILFKTDNDLSKRKRPKYRKTFAKAQDLALINQIVGDHLNHTSSLLEIDSSVYAAVCALSPAPKSTETAEEKTRKRIEQLDSKLTPLRQTVSRIECVLEYQKAGKPFTPKVRAFARELRHQHHTLNKGILLTIKQRNIERIRALALARKKLVKREKCIRENKIFVSNPSRLFAKPPSLVENPPSIEQIDGYWRDLYEKSTSVDKNIRPIKLFERFCNARLTEQAVLTSVTADEVSLAFKGKKNHSAPGMDAVSNFWWKRLTSTHAHLARHFTSYILGYGTFPTWFAEGRTVLIPKKGDLSVPSNYRPITCLNTVYKAFTSILNERILTTIEPVWQMIYEQRGSKRGISGCKDNLLVDRCICQDARQYQRDLSMAWVDYRKAFDTTSHQLILVLLKCLKIHPDIIRCIEELLPLWKTKFTIRCGKRTVSTDPVTYKRGVYQGDSLSPLLFCISLMPLSLRLREETGYRCGPPTDRKHQVTHLFYMDDLKLYASSESSLSQALKAVHQYTKAIGMEFGLDKCAVIHCKRGRVPDYDADVQLTDGSIVKHLDEEELYTYLGVGENHIQSVSTVKEALRGRYRHRLRQIWQSELSGIHKIRATNMLSIPILLYSFGSIKWTIEELKELDRGTRKLMNVNRSLHPRASVPRNYLPRQQGGRGLLSVECLHDRVVLGIACQVINSSDPLMELVRDHELQGKGAFLFSAAQHAASKLGLAFDPSNRDLDDNVVLLSKSRLRSAVKRAEIRSLFEDHRNRDHQGMFYRHLDTCSLSVDLTFSFLRSAGLKSETEGFIIAAQDGVIATLTHQKYVCKEAVSTTMCRACKSQPETLMHLISACPSYATNTYIHRHNAALRVLYYFLRHKYEVDPTPVLPYAPGEIESVVKNEKCIIFWNFSFPTTRQLSATKPDIVLQDILSKTMYVIEFSAPAETNIVTKEEQKRTKYLDLLQELRQLHPGYSVKMVVLIIGCLGGIRPTLETNLSQIPVCRSHLRHLISSMQKAVIIGTLRTLRSHQTVFK

SEQ ID NO: 1953 - protein, 1183 aa, Chrysoperla carnea
MGRMHTLWCEKHPELSHMKSQHLSDQVSLLKKTGFDKPRTGIEKRCRTTQAEVNRGNEIVPAATGVVHSTRETLVAETQDGISQDEPVLESERSDTETQDRVCQNTPTPPVLEASPPTPLIPGDIPALPVLTAETATPLTSTTEANVEETPILPAEPPNTRLEELKERFQNILFITDNDLSKRKRPKYRKTFAKAQDLALINQIVDDHLNHTSSLLEIDSSVYAAMCALSPAPKSTETAEEKTRKRIEQLDSKLTPLRQTVSRIECVLEYQKAGKPFTPKVRAFARELRHQHHTLNKGILLTIKQRNIEKIRALALARKKLVKREKCIRENKIFVSNPSRLFAKPPSLVENPPSIEQIDGYWRDLYEKSTSVDKNIRPIKLFERFCNARLAEQAVLTSVTADEVSLAFKGKKNHSAPGMDAVSNFWWKRLTSTHAHLARHFTSYILGYGTFPTWFAEGRTVLIPKKGDLSVPSNYRPITCLNTVYKAFTSILNERILTTIEPVWQMIYEQRGSKRGISGCKDNLLVDRCICQDARQYQRDLSMAWVDYRKAFDTTSHQLILVLLKCLKIHPDIIRCIEELLPLWKTKFTIRCGKRTVSTDMVTYKRGVYQGDSLSPLLFCISLMPLSLRLREETGYRCGPPTDRKHQVTHLFYMDDLKLYASSESSLSQALKAVHQYTKAIGMEFGLDKCAVIHCKRGRVPDYDADVQLTDGSIVKHLDEEELYTYLGVGENHIPSVSTVKEALRGRYRHRLRQIWQSELSGIHKIRATNMLAIPILLYSFGSIKWTIEELKELDRGTRKLMNVNRSLHPRASVPRNYLPRQQGGRGLLSVECLHDRVVLGIACQVINSSDPLMELVRDHELQGKGAFLFSAAQHAAYKLGLAFDPSNRDLDDNVVLLSKSRLRSAVKRAEIRSLFEDHRNRDHQGMFYRHLDTCSLSVDLTFSFLRSAGLKSETEGFIIAAQDGVIATLTHQKYVCKEAVSTTMCRACKSQLETLMHRISACPSYATNTYIHRHNAALRVLYYFLRHKYEVDPTPVLPYAPGEIESVVKNEKCIIFWNFSFPTTRQLSATKPDIVLQDILSKTMYVIEFSAPAETNIVTKEEQKRTKYLDHLQELRQLHPGYSVKMVVLIIGCLGGIRPTLETNLSQIPVCRSHLRHLISSMQKAVIIGTLRTLRSHQTVFK

SEQ ID NO: 1954 - protein, 1077 aa, Chrysoperla carnea
MGRMHTLWCEKHPELSHMKSQHLRDQVSRLKKTGFDKPRTGIEKRCRTTQAEVNRGNEIVPAATGVVHSTRETLVAETQDGISQDEPVLESERSDTETQDRVCQNTPPPPVLEASPPTPLIPGDIPALPVLTAEIATPLTSTTEANVEETLILPAEPPNTRLEELKERFQNILFITDNDLFKRKRPKYRKTFAKAQDLALINQIVDDHLNHTSSPLEIDSSVYAAMCALSLAPKSTETAEEKTCKRIEQLDSKLTPLRQTVSRIECVLEYQKAGKPFTPKVRAFARELRHQHHTLNKGILLTIKQRNIEKIRALALARKKLVKREKCIRENKIFVSNPSRLFAKPPSLVENPPSIEQIDGYWRDLYEKSTSVDKNIRPIKLFERFCNARLAEQAVLTSVTADEVSLAYKGKKNHSAPGMDAVSNFWWKGLTSTHAHLARHFTSYIFGFGTFPTWFAEGRTVLIPKKGDLSVPSNYRPITCLNTVYKAFTSILNERILTTIEPVWQMIYEQRGSKRGISGCKDNLLVDRCICQDARQYQRDLNMAWVDYRKAFDTTSHQLILVLLKCLKIHPDIIRCIEELFPLWKTKFTIRCGKRTVSTDLVTYKRGVYQGDSLSPLLFCISLMPLCLRLREETGYRCGPPADRKHQVTHLFYMDDLKLYASSESSLSQALKAVHQYTKAIGMEFGLDKCAVIHCKRGRVPDYDADVQLTDGSIVKHLDEEELYTYLDIGENHIQSVSTVKEALRGRYRHRLRQIWQSELSGIHKIRATNMLAIPILLYSFGSIKWTIEELKELDRGTRKLMNVNRSLHPRASVPRNYLPRQQGGRGLLSVECLHDRVVLGIACQVINSSDPLMELVRDHELQGRGAFLFSAAQHAASKLGHAFDPSNRDLDDNVVLLSKSRLRLAVKRAEIRSLFEDLRHRDHQGMFYRHLDSCGLSVDLTFSFLRSAGLKSETEGFIIAAQDGVIATLTHQKYVYKKAVSTTMCRACKSQPETLMHLISACPSYATNTYIHRHNAALRVLYYFLRHKYEVDPTPVLPYAPGEIESVVKNEKCIIFWNFSFPTTRQFSATKPDIVL

SEQ ID NO: 1955 - protein, 1179 aa, Chrysoperla carnea
MGRMHTLWCEKHPELSHMKSQHLRDQVSRLKKTGFDKPRTGIEKRCRTTQAEVNRGDEIEPAAIGVVHSTRETLVAETQDGISQDEPVLESERSDTETQDQVCQNTPPPPVLEASPPTPLIPGDIPALPVLTAETATPLTSTTEANVEETPILPAEPPNTRLEELKERFQSILFITDNDLSKRKRPKYRKTFAKALINQIVDDHLNHTSSLLEIDSSVYAAMCALSPAPKSTETAEEKTRKRIEQLDSKLTPLRQTVSRIECVLEYQKAGKPFTPKVRAFARELRHQHHTLNKGILLTIKQRNIEKIRALALARKKLVKREKCIRENKIFVSNPSRLFTKPPSLVENPPSIEQIDGYWRDLYEKSTSVDKNIRPIKLFERFCNARLAEQAVLTSVTADEVSLAFKGKKNHSAPVMDAVSNFWWKRLTSTHAHLARHFTSYILGYGTFPTWFAEGRTVLIPKKGNLSVPSNYRPITCLNTVYKAFTSILNERILTTIEPVWQMIYEQRGSKRGISGCKDNLLVDRCICQDARQYQRDLSMAWVDYRKAFDTTSHQLILVLLKCLKIHPDIIRCIEELLPLWKTKFTIRCGKRTVSTDLVTYKRGVYQGDSLSPLLFCISLMPLSLRLREETGYRCGPPTDRKHQVTHLFYMDDLKLYASSESSLSQALKAVHQYTKAIGMEFGLDKCAVIHCKRGRVPDYDADVQLTDGSIVKHLDEEELYTYLGVGENHIQSVSTVKEALRGRYRHRLRQIWQSELFGIHKIRATNMLAIPILLYSFGSIKWTIEELKELDRGTRKLMNVNRSLHPRASVPRNYLPRQQGGRGLLSVECLHDRVVLGIACQVINSSDPLMELVRDHELQGKGAFLFSAAQHAASKLGLAFDPSNRDLDDNVILLSKSRLRLAVKRAEIRSLFEDHRHRDHQGMFYRHLDSCGLSVDLTFSFLRSAGLKSETEGFIIAAQDGVIATLTHQKYVYKKAVSTTMCRACKSQPETLMHLISACPSYATNTYIHRHNAALRVLYYFLRHKYEVDPTPVLPYAPGEIESVVKNEKCIIFWNFSFPTTRQLSATKPDIVLQDISSKTMYVIEFSAPAETNIVTKEEQKRTKYLDLLQELRQLHPGYSVKMVVLIIGCLGGIRPTLETNLSQIPVCRSHLRHLISSMQKAVIIGTLRTLRSHQTVFK

SEQ ID NO: 1956 - protein, 1301 aa, Chrysoperla carnea
MSRIQKMSNLRSRFFGPQAGSSRPSPTEPRPPAGDASTLPIGGSSHGYEGEQSNLALDPRLVPETRRAADDEEPSQGTSQESRASTQNSRLQRFQWTKALKADLLTCYEASEPSRRGYMGRMHTLWCEKHPELSHMKSQHLRDQVSRLKKTGFDKPRTGQEKRCRTTQAEVNRGDEIEPAAIGVVHSTRETLVAETQDGISQDEPVLESERSDTETQDRVCQNTPPSPVLEASPPTPPIPGDIPALPVLTAETATPLTSTTEESVEETPILPAEPPNTRLEELKERFQNILFKTDNDLSKRKRPKYRKTFAKAQDLALINQIVDDHLNHTSSLLEIGSSVYAAMCALSPAPKSTETAEEITRKRIEQLDSKLTPLRQTVSRIECVLEYQKAGKPFTPKARAFARELRHQHHTLNKGILLTIKQRNIEKIRALALARKKLVKREKCIRENKIFVSNPSRLFAKPPSLVENPPSIEQIDGYWRDLYEKSTSVDKNIRPIKLFERFCNARLAEQALLTSVTADEVSLAFKGKKNHSAPGMDAVSNFWWKRLTSTHAHLARHFTPYILGYGTFPTWFAEGRTVLIPKKGDLSVPSNYRPITGLNTVYKAFTSILNERILTTIEPVWQMIYEQRGSKRGISGCKDNLLVDRCICQDARQYQRDLSMAWVDYRKAFDTTSHQLILVLLKCLKIHPDIIRCIEELLPLWKTKFTIRCGKRTVSTDLVTYKRGVYQGDSLSPLLFCISLMPLSLHLREETGYRCGPPTDRKHQVTHLFYMDDLKLYASSESSLSQALKAVHQYTKAIGMEFGLDKCAVIHCKRGRVPDYDADVQLTDGSIVKHLDEEELYTYLGVGENHIQSVSTVKEALRGRYRHRLRQIWQSELSGIHKIRATYMLAIPILLYSFGSIKWTIEELKELDRGTRKLMNVNRSLHPRASVPRNYLPRQQGGRGLLSVKCLHDRVVLGIACQVINSSDPLMELVRDHELQGKGAFLFSAAQHAASKLGLAFDPSNRDLDDNVVLLSKSRLRLAVKRAEIRSLFEDHRHRDHQVMFYRHLDSCGLSVDLTFSFLRSAGLKSETEGFIIAAQDGVIATLTHQKYVCKEAVSTTMCRACISQPETLMHLISACPSYATNTYIHRHNAALRVLYYFLRHKYEVDPTPVLPYVPGEIESVVKNEKCIIFWNFSFPTTRQLSATKPDIVLQDISSKTMYVIEFSAPAETNIVTKEEQKRTKYLDLLQELRQLHPGYSVKMVVLIIGCLGGIRPTLDTNLSQIPDCRSHLRHLISSMQKAVIIGTLRTLRSHQTVFK

SEQ ID NO: 1957 - protein, 1212 aa, Chrysoperla carnea
MSNLRSRFFGPQAGSSRPSPTEPRPPAGDASTLPIGGSSHGYEGEQSNLALDPRLVPETRRAADDEEPSQGTSQESRASTQNSRLQRFQWTKALKADLLTCYEASEPSRRGYMGRMHTLWCEKHPELSHMKAQHLRDQVSRLKKTGFDKPRTGIEKRCRTTQAEVNRGNEIVPAATGVVHSTRETLVAETQDGISQDEPVLESERSDTETQDRVCQNTPPPPVLEASPPTPLIPGDIPALLVLTAETATPLTSTTEANVEETPILPAEPPNTRLEELKERFQNILFITDNDLSKRKRPKYRKTFAKAQDLDLINQIVDDNLNHTSSLLEIDSSVYAAMCALSPAPKSTETVEEKTCKRIEQLDSKLTPLRQTVSRIECVLEYQKAGKPFTPKVRAFARELRHQHHTLNKGILLTIKQRNIEKIRALALARKKLVKREKCIRENKIFVSNPSRLFAKLPSLVENPPSIEQIDGYWRDLYEKSTNVDKNIRPIKLFERFCNARLAEQAVLTSVTADEVSLAFKGKKNHSAPGMDAVSNFWWKRLTSTHAHLARHFTSYILGYGTYPTWFAEGRTVLIPKKGDLSVPSNYRPITCLNTVYKAFTSILNERILITIEPVWQMIYEQRGSKRGISGCKDNLLVDRCICQDARQYQRDLSMAWVDYRKAFDTTSHQLILVLLKCLKIHPDIIRCIEELLPLWKTKFTIRCGKRTVSTDLVTYKRGVYQGDSLSPLLFCISLMPLSLRLREETGYRCGPPTDRKHQVTHLFYMDDLKLYASSESSLSQALKAVHQYTKAIGMEFGLDKCAVIHCKRGRVPDYDADVQLTDGSIVKHLDEEELYTYLGVGENHIQSVSTVKEALRGRYRHRLRQIWQSELSGIHKIRATNMLAIPILLYSFGSIKWTIEELKELDRGTRKLMNVNRSLHPRASVPRNYLPRQQGGRGLLSVECLHDRVVLGIACQVINSSDPLMELVRDHELQGKGAFLFSAAQHAASKLGLAFDPSNRDLDDNVILLSKSRLRLAVKRAEIRSLFEDHRHRDHQGMFYRHLDSCGLSVDLTFSFLRSAGLKSETEGFVIAAQDGVIATLTHQKYVYKKAVSTTMCRACKSQPETLMHLISACPSYATNTYIHRHNAALRVLYYFLRHKYEVDPTPVLPYAPGEIESVVKNEKCIIFWNFSFPTTRQLSATKPDIVLQDISSKTMYVIEFSAPAETNIVT

SEQ ID NO: 1958 - protein, 813 aa, Chrysoperla carnea
MSNLRSRFFGPQAGSSRPSPTEPRPPAGDASTLPIGGSSHGYEGEQSNLALDPRLVPETRRAADDEEPSQGTSQESRASTQNSRLQRFQWTKALKADLLTCYEASEPSRRGYMGRMHTLWCEKHPELSHMKSQHLRDQVSRLKKTGFDNPRTGQKKQCRTTQAEVNQGDEIEPAATGVAAGSPTGSHQLILVLLKCLKIHPDIIRCIEELLPLWKTKFSIRCGKRTVSTDLVTYKRGVYQGDSLSPLLFCISLMPLSLRLREETGYRCGPPTDRKHQVTHLFYMDDLKLYASSESSLSQALKAVHQYTKAIGMEFGLDKCAVIHCKRGRVPDYDADVQLTDGSIVKHLDEEELYTYLGVGENHIQSVSTVKEALRGRYRHRLRQIWQSELSGIQKIRATNMLAIPILLYSFGSIKWTIEELKELDRGTRKLMNVNRSLHPRASVPRNYLPRQQGGRGFLSVECLHDRVVLGIACQVINSSDPLMELVRDHELQGKGAFLFSAAQHAASKLGLAFDPSNRDLDDNVVLLSKSRLRSAVKRAEIRSLFEDHRNRDHQRMFYRHLDTCSLSVDLTFSFLRSAGLKSETEGFIIAAQDGVIATLTHQKYVCKEAVSTTMCRACKSQPETLMHLISACPSYATNTYIHRHNAALRVLYYFLRHKYEVDPTPVLLYAPGEIESVVKNEKCIIFWNFSFPTTRQLSATKPDIVLQDILSKTMYVIEFSAPAETNIVTKEEQKRTKYLDLLQELRQLHPGYSVKMVVLIIGCLGGIRPTLETNLSQIPVCRSHLRHLISSMQKAVIIGTLRTLRSHQTVFK

SEQ ID NO: 1959 - protein, 1295 aa, Chrysoperla carnea
MSNLRSRFFGPQAGSSRPSPTEPRPPAGDASTLPIGGSSHGYEGEQSNLALDPRLVPETRRAADDEEPSQGTSQESRASTQNSRLQRFQWTKALKADLLTCYEASEPSRRGYMGRMHTLWCEKHPELSHMKSQHLRDQVSRLKKTGFDKPRTGIEKRCRTTQAEVNRGDEIEPAAIGVVHSTRETLVAETQDGISQDEPVLESERSDTETQDRVCQNTPPPPVLETSPPTPLIPEDIPALPVLTAETATPLTSTTEANVEKTPILPAEPPNTRLEELKERFQNILFKTDNDLSKRKRPKYRKTFAKAQDLALINQIVDDHLNHTSSLLEIDSSVYAAMCALSPAPKSTETAEEKTCKRIEQLDSKLTPLRQTVSRIECVLEYQKAGKPFTPKVRAFARELRHQHHTLNKGILLTIKQRNIEKIRALALARKKLVKREKCIRENKIFVSNPSRLFAKPPSLVENPPSIEQIDGYWRDLYEKSTNVDKNIRPIKLFERFCNARLAEQAVLTSVTADEVSLAFKGKKNHSAPGMDAVSNFWWKRLTSTHAHLARHFTSYILGYGTFPTWFAEGRTVLIPKKGDLSVPSNYRPITCLNTVYKAFTSILNERILTTIEPVWQMIYEQRGSKRGISGCKDNLLVDRCICQDARQYQRDLSMAWVDYRKAFDTTSHQLILVLLKCLKIHPDIIRCIEELLPLWKTKFTIRCGKRTVSTDLVTYKRGVYQGDSLSPLLFCISLMPLSLRLREETGYRCGPPADRKHQVTHLFYMDDLKLYASSESSLSQALKAVHQYTKAIGMEFGLDKCAVIHCKRGRVPDYDADVQLTDGSIVKHLDEEELYTYLGVGENHIQSVSTVKEALRGRYRHRLRQIWQSELSGIHKIRATNMLAIPILLYSFGSIKWTIEELKELDRGTRKLMNVNRSLHPRASVPRNYLPRQQGGRGLLSVECLHDRVVLGIACQVINSSDPLMKLVRDHELQGKGAFLFSAAQHAASKLGLAFDPSNRDLDDNVILLSKSRLRSAVKRAEIRSLFEDHRNRDHQEMFYRHLDTCSLSVDLTFSFLRSAGLKSETEGFIIAAQDGVIATLTHQKYVYKQAVSNTMCRACKSQPETLMHLISACPSYATNTYIHRHNAALRVLYYFLRHKYEVDPTPVLPYAPGEIESVVKNEKCIIFWNFSFPTTRQLSATKPDIVLQDILSKTMYVIEFSAPAETNIVTKEEQKRTKYLDLLQELRQLHPGYSVKMVVLIIGCLGGIRPTLETNLSQIPVCRSHLRHLISSMQKAVIIGTLRTLRSHQTVFK

SEQ ID NO: 1960 - protein, 1295 aa, Chrysoperla carnea
MSNLRSRFFGPQAGSSRPSPTEPRPPAGDASTLPIGGSSHGYEGEQSNLALDPRLVPETRRAADDEEPSQGTSQESRASTQNSRLQRFQWTKALKADLLTCYEASEPSRRGYMGRMHTLWCEKHPELSHMKSQHLRDQVSRLKKTGFDKPRTGIEKRCRTTQAEVNRGNEIVPAATGVVHSTRETLVAETQDGISQDEPVLESERSDTETQDRVCQNTPPPPVLEASPPTPLIPGDIPALPVLTAETATPLTSTTEANVEETPILPAEPPNTRLEELKERFQNILFITDNDLYKRKRPKYRKTFAKAQDLALINQIVDDHLNHTSSLLEIDSSVYAAMCALSPAPKSTETAEEKTRKRIEQLDSKLTPLRQTVSRIECVLEYQKAGKPFTPKVRAFARELRHQHHTLNKGILLTIKQRNIEKIRALALARKKLVKREKCIRENKIFVSNPSRLFAKPPSLVENPPSIEQIDGYWRDLYEKSTSVDKNIRPIKLFERFCNARLAEQAVLTSVTADEVSLAFKGKKNHSAPGMDAVSNFWWKRLTSTHAHLARHFTSYILGYGTFPTWFAEGRTVLIPKKGDLSVPSNYRPITCLNAVYKAFTSILNERILTTIKPVWQMIYEQRGSKRGISGCKDNLLVDRCICQDARQYQRDLSMAWVDYRKAFDTTSHQLILVLLKCLKIHPDIIRCIEELLPLWKTKFTIRCGKRTASTDLVTYKRGVYQGDSLSPLLFCISLMPLSLRLREETGYRCGPPTDRKHQVTHLFYMDDLKLYASSESSLSQALKAVHQYTKAIGMEFGLDKCAVIHCKRGRVPDYDADVQLTDGSIVKHLDEEELYTYLGVGENHIQSVSTVKEALRGRYRHRLRQIWQSELSGIHKIRATNMLAIPILLYSFGSIKWTIEELKELDRGTRKLMNVNRSLHPRASVPRNYLPRQQGGRGLLSVECLHDRVVLGIACQVINSSDPLMELVRDHELQGRGAFLFSAAQHAASKLGLAFDPSNRDLDDNVILLSKSRLRLAVKRAEIRSLFEDHRNRDHQGMFYRHLDTCSLSVDLTFSFLRSAGLKSETEGFIIAAQDGVIATLTHQKFVCKKAVSTTMCRACKSQPETLMHLISACPSYATNTYIHRHNAALRVLYYFLRHKYEVDPTPVLPYAPGEIESVVKNEKCIIFWNFSFPTTRQLSATKPDIVLQDILSKTMYVIEFSAPAETNIVTKEEQKRTKYLDLLQELRQLHPGYSVKMVVLIIGCLGGIRPTLETNLSQIPVCRSHLRHLISSTQKAVIIGTLRTLRSHQTVFK

SEQ ID NO: 1961 - protein, 1295 aa, Chrysoperla carnea
MSNLRSRFFGPQAGSSRPSPTEPRPPAGDASTLPIGGSSHGYEGEQSNLALDPRLVPETRRAADDEEPSQGTSQESRASTQNSRLQRFQWTKALKADLLTCYEASEPSRRGYMGRMHTLWCEKHPELSHMKSQHLRDQVSRLKKTGFDKPRTGQEKRCRTTQAEVNRGDEIEPAAIGVVHSTRETLVAETQDGISQDEPVLESERSDTETQDRVGQNTPPPPVLEASPPTPLIPGDIPALPVLTAETATPLTSTTEANVEETPILPAEPPNTRLEELKERFQNILFITDNDLSKRKRPKYRKTFAKAQDLALINQIVDDHLNHTSSLLEIDSSVYAAMCALSPAPKSTETAEEKTRKRIEQLDSKLTPLRQTVSRIECVLEYQKAGKPFTPKVRAFARELRHQHHTLNKGILLTIKQRNIEKIRALALARKKLVKREKCIRENKIFVSNPSRLFAKPPSLVENPPSIEQIDGYWRDLYEKSTSVDKNIRPIKLFERFCNARLAEQAVLTSVTADEVSLAFKGKKNHSAPGMDAVSNFWWKRLTSTHAHLARHFTSYILGYGTFPTWFAEGRTVLIPKKGDLSVPSNYRPITCLNTVYKAFTSILNERILTTIEPVWQMIYEQRGSKRGISGCKDNLLVDRCICQDARQYQRDLSMAWVDYRKAFDTTSHQLILVLLKCLKIHPDIIRCIEELLPLWKTKFTIRCGKRTVSTDLVTYKRGVYQGDSLSPLLFCISLMPLSLRLREETGYRCGPPTERKHQVTHLFYMDDLKLYASSESSLSQALKAVHQYTKAIGMEFGLDKCAVIHCKRGRVPDYDADVQLTDGSIVKHLDEEELYTYLGVGENHIQSVSTVKEALRGRYRHRLRQIWQSELSGIHKIRATNMLAIPILLYSFGSIKWTIEELKELDRGTRKLMNVNRSLHPRASVPRNYLPRQQGGRGLLSVECLHDRVVLGIACQVINSSDPLMELVRDHELQGKGAFLFSAAKHAASKLGLAFDPSNRDLDDNVVLLSKYRLRSAVKRAEIRFLFEDHRHRDHQGMFYRHLDSCGLSVDLTFSFLRSAGLKSETEGFIIAAQDGVIATLTHQKYVYKKAVSTTMCRACKSQPETLMHLISACPSYATNTYIHRHNAALRVLYYFLRHKYEVDPTPVLPYAPGEIESVVKNEKCIIFWNFSFPTTRQLSATKPDIVLQDILSKTMYVIEFSAPAETNIVTKEEQKRTKYLDLLQELRQLHPGYSVKMVVLIIGCLGGIRPTLETNLSQIPVCRSHLRHLISSMQKAVIIGTLRTLRSHQTVFK

SEQ ID NO: 1962 - protein, 1295 aa, Chrysoperla carnea
MSNLRSRFFGPQAGSSRPSPTEPRPPAGDASTLPIGGSSHGYEGEQSNLALDPRLVPETRRAADDEEPSQGTSQESRASTQNSRLQRFQWTKALKADLLTCYEASEPSRRGYMGRMHTLWCEKHPELSHMKSQHLRDQVSRLKKTGIDKPRTGQEKRCRTTQAEVNRGDEIEPAAIGVVHSTRETLVAETQDGISQDEPVLESERSDTETQDRVCQNTPPAPVLEASPPTPPIPGDIPALPVLTAETATPLTSTTEANVEETPILPAEPPNTRLEELKERFQNILFKTDNDLSKRKRPKYRKTFAKAQDLALINQIVDDHLNHTSSLLEIDSSVYAAMCALSPAPKSTETAEEKTCKRIEQLDSKLTPLRQTVSRIECVLEYQKAGKPFTPKVRAFARELRHQHHTLNKGILLTIKQRNIEKIRALALARKKLVKREKCIRENKIFVSNPSRLFAKPPSLVENPPSIEQIDGYWRDLYEKSTSVDKNIRPIKLFERFCNARLAEQAVLTSVTADEVSLAFKGKKNHSAPGMDAVSNFWWKRLTSTHAHLARHFTSYILGYGTFPTWFAEGRTVLIPKKGDLSVPSNYRPITCLNTVYKAFTSILNERILTTIEPVWQMIYEQRGSKRGISGCKDNLLVDRCICQDARQYQRDLSMSWVDYRKAFDTTSHQLILVLLKCLKIHPDIIRCIEELLPLWKTKFTIRCGKRTVSTDLVTYKRGVYQGDSLSPLLFCISLMPLSLRLREETGYRCGPPTDRKHQVTHLFYMDDLKLYASSESSLSQALKAVHQYTKAIGMEFGLDKCAVIHCKRGRVPDYDADVQLTDGSIVKHLDEEELYTYLGVGENHIQSVSTVKEALRGRYRHRLRQIWQSELSGIHKIRATNMLAIPILLYSFGSIKWTIEELKELDRGTRKLMNVNRSLHPRASVPRNYLPRQQGGRGLLSVECLHDRVVLGIACQVINSSDPLMKLVRDHELQGKGAFLFSAAQHAASKLGLAFDPSNRDLDDNVILLSKSRLRSAVKRAEIRSLFEDHRNRDHQGMFYRHLDTCSLSVDLTFSFLRSAGLKSETEGFIIAAQDGVIATLTHQKYVCKQAVSTTMCRACKSQPETLMHLISACPSYATNTYIHRHNAALRVLYYFLRHKYEVDPTPVLPYAPGEIESVVKNEKCIIFWNFSFPTTRQLSATKPDIVLQDISSKTMYVIEFSAPAETNIVTKEEQKRTKYLDLLQELRQLHPGYSVKMVVLIIGCLGGIRPTLETNLSQIPVCRSHLRHLISSMQKAVIIGTLRTLRSHQTVFK

SEQ ID NO: 1963 - protein, 1301 aa, Chrysoperla carnea
MSQIQKMSNLRSRFFGPQAGSSRPSPTEPRPPAGDASTLPIGGSSHGYEGEQSNLALDPRLVPETRRAADDEEPSQGTSQESRASTQNSRLQRFQWTKALKADLLTCYEASEPSRRGYMGRMHTLWCEKHPELSHMKSQHLRDQASRLKKTGFDKPRTGQEKRCRTTQAEVNRGDEIEPAAIGVVHSTRETLVAETQDGISQDEPVLESERSDTETQDRVCQNTPPPPVLETSPPTPLTPEDIPALPVLTAETATPLTSTTEANVEETPILPAEPPNTRLEELKERFQNILFKTDNDLSKRKRPKYRKTFAKAQDLALINQIVDDHLNHTSSLLEIDSSVYAAMCALSPAPKSTETAEEKTCKRIEQLDSKLTPLRQTVSRIECVLEYQKAGKPFTPKVRAFARELRHQHHTLNKGILLTIKQRNIEKIRALALARKKLVKREKCIRENKIFVSNPSRLFAKPPSLVENPPSIEQIDGYWRDLYEKSTNVDKNIRPIKLFERFCNARLAEQAVLTSVTADEVSLAFKGKKNHSAPGMDAVSNFWWKRLTSTHAHLARHFTSYILGYGTFPTWFAEGRTVLIPKKGDLSVPSNYRPITCLNTVYKAFTSILNERILTTIEPVWQMIYEQRGSKRGISGCKDNLLVDRCICQDARQYQRDLSMAWVDYRKAFDTTSHQLILVLLKCLKIHPDIIRCIEELLPLWKTKFTIRCGKRTVSTDLVTYKRGVYQGDSLSPLLFCISLMPLSLRLREETGYRCGPPTDRKHQVTHLFYMDDLKLYASSESSLSQALKAVHQYTKAIGMEFGLDKCAVIHCKRGRVPDYDADVQLTDGSIVKHLDEEELYTYLGVGENHIQSVSTVKEALRGRYRHRLRQIWQSELSGIHKIRATNMLAIPILLYSFGSIKWTIEELKELDRGTRKLMNVNRSLHPRASVPRNYLPRQQGGRGLLSVECLHDRVVLGIACQVINSSDPLMELVRDHELQGKGAFLFSAAQHAASKLGLAFDPSNRDLDDNVVLLSKSRLRSAVKRAEIRSLFEDHRNRDHQGMFYRHLDTCSLSVDLTFSFLRSAGLKSETEGFIIAAQDGVIATLTHQKYVYKKAVSTTMCRACKSQPETLMHLISACPSYATNTYIHRHNAALRVLYYFLRHKYEVDPTPVLPYAPGEIESVVKNEKCIIFWNFSFPTTRQLSATKPDIVLQDISSKTMYVIEFSAPAETNIVTKEEQKRTKYLDLLQELRQLHSGYSVKMVVLIIGCLGGIRPTLETNLSQIPVCRSHLRHLISSMQKAVIIGTLRTLRSHQTVFK

SEQ ID NO: 1964 - protein, 1181 aa, Chrysoperla carnea
MGRMHTLWCEKHPELTHMKSQHLRDQASRLKKTGFDKPRTGQEKRCRTTQAEVNRGDEIEPAAIGVVHSTRETLVAETQDGISQDEPVLESERSDTETQDRVCQNTPPPPVLEASPPTPLIPGDIPALPVLTAETATPLTSTTEANVEETPIIPAEPPNTRWEELKERFQNILFITDNDLSKRKRPKYRKTFAKAQDLALINQIVDDHLNHTSSLLEIDSSVYAAMCALSPAPKSTETAEEKTRKRIELLDSKLTPVRQTVSRIECVLEYQKAGKPFTPKVRAFARELRHQHHTLNKGILRTIKQRNIEKIRALALARKKLVKREKCIRENKIFVSNPSSLFAKPPSLVENPPSIEQIDGYWRDLYEKSTSVDKNIRPIKLFERFCNARLAEQAVLTSVTADEVSLAFKGKKNHSAPGMDAVSNFWWKRLTSTHAHLARHFTSYILGYGTFPTWFAEGRTVLIPKKGDPSVPSNYRPITSLNTVYKAFTSILNERILTTIEPVWQMIYEQRGSKRGISGCKDNLLVDRCICQDARQYQRDLSMAWVDYRKAFDTSSHQLILVLLKCLKIHPDIIRCIEELLPLWKTKFTIRCGKRTASTDLVTYKRGVYQGDSLSPLVFCISHMPLSLRLREETGYRCGPPTDRKHQVTHLFYMDDLKLYASSESSLSQALKAVHQYTKAIGMEFGLDKCAVIHCKRGRVPDYDADVQLTDGSIVKHLDEEELYTYLGVGENHIQSVSTVKEALRGRYRHRLRQIWQSELSGIHKIRATNMLAIPILLYSFGSIKWTIEELKELDRGTRKLMNVNRSLHPRASIPRNYLPRQQGGRGLLSVECLHDRVVLGIACQVINSSDPLMELVRDHELQGKGAFLFSAAKHAASKLGLAFDPCNRDDNVVLLSKSRLRSAVKRAEIRSLFEDHRNRDNQGMFYRHLDTCSLSVDLTFSFLRSAGLKSETEGFIIAAQDGVIATLTHQKYVCKQAVSTTMCRACKSQPETLMHLISACPSYATNTYIHRHNAGLRVLYYFLRHKYEVDPTPVLPYAPGEIESVVKNEKCIIFWNFSFPTTRQLSATKPDIVLQDISSKTMYVIEFSAPAETNIVTKEEQKRTKYLDLLQELRQLHPGYSVKMVVLIIGCLGGIRPTLETNLSQIPVCRSHLRHLISSMQKAVIIGTLRTLRSHQTVFK

SEQ ID NO: 1965 - protein, 1017 aa, Chrysoperla carnea
MIIIMIIMIIIKERFQNILFITDNDLSKRKRPKYRKTFAKAQDLALINQIVDDHLNHTSSLLEIDSSVYAAMCALSPAPKSTETAEEKTCKRIEQLDSKLTPLRQTVSRIECVLEYQKAGKPFTPKVRAFARELRHQHHTLNKGILLTIKQRNIEKIRALALARKKLVKREKCIRENKIFVSNPSRLFAKPPSLVENPPSIEQIDGYWRDLYEKSTSVDKNIRPIKLFERFCNARLAEQAVLTSVTADEVSLAFKGKKNHSAPGMDAVSNFWWKRLTSTHAHLARHFTSYILGYGTFPTWFAEGRTVLIPKKGDLSVPSKYRPITCLNTVYKAFTSILNERILTTIEPVWQMIYEQRGSKRGISGCKDILLVDRCICQDARQYQRDLSMAWVDYRKAFDTTSHQLILVLLKCLKIHPDIIRCIQELLPLWKTKFTIRCGKRTVSTDLVTYKRGVYQGDSLSPLLFCISLMPLSLRLREETGYRCGPPTDRKHQVTHLFYMDDLKLYASSGSSLSQALKAVHQYTKANGMEFGLDKCAVIHCKRGRVPDYDADVQLTDGSIVKHLDEEELYTYLGVGENHIQSVSTVKEALRGRYRHRLRQIWQSELSGIHKIRATNMLAIPILLYSFGSIQWTILMNVNRSLHPRASVPRNYLPRQQGGRGLLSVECLHDRVVLGIACQVINSSDPLMELVRDHELQGKGAFLFSAAQHAASKLGLAFDPSNRDLDDNVILLSKSRLRLAVKRAEIRSFFEDHRHRDHQGMFYRHLDSCGLSVDLTFSFLRSAGLKSETEGFIIAAQDGVIGTLTHQKYVYKKAVSTTMCRACKSLPETLMHLISACPSYATNTYIHRHNAALCVLYYFLRHKYEVDPTPVLPYAPGEIESVVKNEKCIIFWNFSFPTTRQLSAAKPDIVLQDISSKTMYVIEFSAPAETNIVTKEEQKRTKYLDLLQELRQLHPGYSVKMVVLIIGCLGGIRPTLETNLSQIPVCRSHLRHLISSMQKAVIIGTLRTLRSPQTVFK

SEQ ID NO: 1966 - protein, 1180 aa, Chrysoperla carnea
MGRMHTLWCQKHPELSYMKSQHLRDQVSRLRKTGFDKPRTGQEKRCRTTQAEVNRGDEIEPAAIGVVHSTRETLVAETQDGISQDEPVLESERSDTETQNRVCQNTPPSPVLEASPPTPPIPGDIPALPVLTAETATPLTSTSEANVEETPILPAEPPTTRLEELKERFQNILFKTDNDLSKRKRPKYRKTFAKAQDLALINQIVDDHLNHTSSLLEIDSSVYAAMCALSPAPKSTETAEKKTRKRIEQLDSKLTPLRQTVSRIECVLEYQKAGKPFTPKVRAFARELRHQHHTLNKGILLTIKQRNIEKIRALALARKKLVKREKCIRENKIFVSNPYRLFAKPPSLVENPPSIEQIDGYWRDLYEKSTSVDKNIRPIKLFERFCNARLAEQAVLTSVTADEVSLAFKGKKNHSAPGMDAVSNFWWKRLTSTHAHLARHFTSYILGYGTFPTWFAEGRTVLIPKKGDLSVPSNYRPITCLNTVYKAFTSILNERILTTIEPVWQMIYEQRGSKRGISGCKDNLLVDRCICQDARQYQRDLSMAWVDYRKAFDTTSHQLILVLLKCLKIHPDIIRCIEELLPLWKTKFTIRCGKRTVSTDLVTYKRGVYQGDSLSPLLFCISLMPLSLRLREETGYRCGLPTDRKHQVTHLFYMDDLKLYASSESSLSQALKAVHQYTKAIGMEFGLDKCAVIHCKRGRVSDYDADVQLTDGSIVKHLNEEELYTYLGVVENHIQSVSTVKEALRGRYRHRLRQIWQSELSGIRATNMLAIPILLYSFGSIKWTIEELKELDRGTHKLMNVNRSLHPRASVPRYYLPRQQGGRGLLSVECLHDRVVLGIACQVINSSDPLMELVRDHELQGKGEFLFSAAQHAASKLGLAFDPSNHDLDDNVVLLSKSRLRSAVKRAEIRSLFEDHRNRDHQGMFYRHLDTCSLSVDLTFSFLRSAGLKSETEGFIIAAQDGVIATLTHQKYVCKQAVSTTMCRACKSQSETLMHLISACPSYATNTYIHRHNAALRVLYYFLRHKYEVDPTPVLPYAPGEIESVVKNEKCIIFWNFSFPTTRQLSATKPDIVLQDILSKTMYVIEFSAPAETNIVTKEEQKRTKYLDLLQELRQLHPGYSVKMVVLIIGCLGGIRPTLETNLSQIPVCRSHLRHLISSMQKAVIIGTLRTLRSHQTVFK

SEQ ID NO: 1967 - protein, 986 aa, Hedya salicella
MFILSFCVFIILILVFIILLSLNINHRMSLPGGNASSIADSDESPQNLIICSLCSEPRYFKNQHGLRVHLGKKHKASDGTLNFDPPIATDTANLSVLNDISETLSRLKNNIRLIKRVPRGARISVSQKLASTIQNAVTENSYQAWEQLLTFPYRTLHITDQNKNTSLTAKIKKNCQHPLCLEDLDKIVTKHNTSLYKRIENKVGEGDIRGAARLLFSTDCIAPNNQVTVSALRSKHPLPSTNQSLPAPPDTATPPLTTSTDAVLRAVMSFQSGSAGGLDGLTPQHLKDLLGHSSGDTGELLLKALADLSNLMLSGEVNPEVTSTLYGANLCALVKKDGGIRPIAVGTTYRRLVAKIGCAAVSGPLNQYFQPIQLGFGSKGGCEAAVHALRTHITQNSGEVLLKVDVKNAFNSVDRAALLAQTREKAPPIYNFIWQCYNKPSKLLFKQNHLSSAVGCQQGDPLGPALFSLAIHPIITNFISKFNVWYLDDGTLGGDVTEVLEDLRVLIEHFRGIGLELNFSKCELFFSDTCLDKELVLSKFRRLAPNIKITEKSSLHLLGAPVLDESFPDFLESKIKNLTEVSDRMTKINAHVAYTIIRYCLFVPKFTYVLRCSHFWKFPTLLEKIDKIIYNILVSVINVNLDDRSWSQASLPIRHGGLGIRKVSSVSLPAYLSSVHSSLELTSKMLKSPIGHFNIPFMSEARIAWSDACPSADLPTNLISQRLWDEPLCRLVRENLFQTATSLPERARLRATVEWESGQWLQALPSTSIGTLLDNCTFRLSVALRLGVTCVAPHRCRCGDPVDPLGHHGLSCGRSAGRAPRHASLNDIIRRALASAGAPAVLEPTGLARADGKRPDGMTLVPWKMGRPLVWDATCADTLALSHLRGTAVKAGSAANSAEVLKRRKYANINSGCMFEPFGVETLGPWGESAHRVFKECSRRLVELTRDQRAGSYLAQRISIAIQRGNAASLLGTLPIDGDLGQIFYL

SEQ ID NO: 1968 - protein, 984 aa, Notocelia uddmanniana
MFIFLFCVFLTLLFVFVLFLIVNMNHDMSLPGGSAPLTSNNDPPSQNLLQCPLCSQTRYFKNQHGLKVHLGKKHKVTDAPAGFSDDSRVPTINCKSNISETLSHLKNNTCILKRVPRGARISVSQKLASDIQTVLTENTYQAWEQLLTFPYRTLHIADQSKTTSLTSKIKHNCQHPHSLEDLHRITPKHNSPIYKNIENKVGEGDIRGAARLLFSTDCIAPNNQETLSALQNKHPLPSTNQDLPDPPDSSTPPLTTSTDGVLRAVMSFQSGSAGGLDGLTAQHLKDLLGHGSGEAGELLLKALADLSNLMLAGNVHPAITSTLYGANLCALLKKDGGIRPIAVGTTYRRLVAKIGCAAISDALSQYFQPTQLGFGSKGGCEAAVHALRTHVTQTTGKVLLKVDVQNAFNSIDRAALLAQAREKAPTIFNFIWQCYRNPSNLLFNENHISSAVGCQQGDPLGPALFSLAIHPIISKLTSQFNAWYLDDGTLGGDEAEVLEDLRVLIEEFHGVGLELNFSKCELFFSDTCKDNETTLSKFRRLAPNIKLAEKSTLHLLGAPVLDESFPVFLDNKIENLNEVSDRMSKLNAHVAYAIIRYCLFVPKFTYVLRCSHFWKFPSLLDKIDKIIQNLLNSIINVNLDDRSWVQASLPIRHGGLGIRKVSSVSLPAYLSSLHSSFHLTSKILKSPTLQIDIPFMTEAINAWTNSCQNTILPGNRSTQRLWDEPLCRLVRDNLYQTATSLTERARLLAVAEWESGQWLQALPSSSLGTLLDNTTFRLSVALRLGVTCVAPHRCRCGDPVDQLGHHGLSCSRSAGRAPRHANLNDIIRRALASAGAPAILEPTGLARDDGKRPDGMTLVPWKMGRPLVWDATCADTMASSHLRGTATKAGSAANSAETLKRRKYAALNSGYHFVPFGVETLGPWGESAHSLFKECSKRLMEVTRDRRAGSYLAQRISIAIQRGNAASLLGTLPSEGDLGQIFYL

SEQ ID NO: 1969 - protein, 958 aa, Cydia splendana
MSLPGGNASLITVNDDCSQKLQCSLCSQPKYFKNQHGLSVHLGKKHKSPDTPMNADHPISIDTLDHPVTYDISETLSRLKHTIRIIKRVPRGARVSVAQKLTSLLQNVVSENSYQAWEQLLTFPYRTLHITDQNKTTSLTAKIKHNCQHPHPLEDLHRIAPKHNTSLFKNIENKVGEGDIRGAARLLFSTDCIAPNNQETLSALKTKHPSPSTNQILPDPPDLSTPPLTTSTDGVLKAIMSFQSGSASGLDGLTPQHLKDLLAHSSGNDGELLLKSLADLSNLMLSGKIPTEVTSTLYGANLCALLKKGGGIRPIAVGTTYRRLVAKIGCTAISRPLSEYFQPTQLGFGSKGGCEAAVHALRTHITQTSGKVLLKVDVKNAFNSVDRAVLLEQTRIKVPQIYNFIWQCYSSASLLLFKENHLSSAVGCQQGDPLGPALFSLAIHPIIVKLNSKFNVWYLDDGTLGGDVSEVLDDFRVLIEEFRGIGLELNSSKCELFFSDTCLDKDFVLSKFRRLAPSIQITEKSSLHLLGAPVLDESFSDFLENKIKNLNEVSDRMSRINAHVAYTVIRYCLFVPKFTYVLRCSHFWKFPNLLEKIDKIIQNLLISVININLEDRSWTQASLPIRHGGLGIRKVSSVSLPAFLSSTNSSQVLVSKILKAPIDQLNIPFNLEARNAWSDSCPNTDLPDNPNSQRLWDEPLCRLVRHNLYQTATSLHERARLLAASEWESGQWLQALPSISTGTLLDNSTFRLSVALRLGVNCVSPHRCRCGDPVDRLGHHGLSCGRSAGRAPRHASLNDIIRRALASAGAPAVLEPTGLARDDGKRPDGMTLVPWKMGRPLVWDATCADTLALSHLHGTAVKAGSAANSAELLKRRKYAAINSGCIFEPFGVETMGPWGESAHRVFNECSRRLVELTRDQRAGSYLAQRISIAIQRGNAASLLGTLPIDGDLGQIFYL

SEQ ID NO: 1970 - protein, 986 aa, Hedya salicella
MFILSFCVFIILILVFIILLSLNINHRMSLPGGNASSIADSDESPQNLIICSLCSQPRYFKNQHGLRVHLGKKHKASDGTLNFDPPIATDTANLSVLNDISETLSRLNNNIRLIKRVPRGARISVSQKLASTIQNAVTENSYQAWEQLFTFPYRTLHITDQNKNTSLTAKIKKNCQHPLCLEDLDKIVTKHNTSLYKRIENKVGEGDIRGAARLLFSTDCIAPNNQVTVSALRSKYPLPSANQSLPAPPDTATPPLTTSTDAVLRAVMSFQSGSAGGLDGLTPQHLKDLLGHSSGDTGELLLKALADLSNLMLSGEVNPEVTSTLYGANLCALVKKDGGIRPIAVGTTYRRLVAKIGCAAVSGPLNQYFQPIQLGFGSKGGCEAAVHALRTHITQNSGEVLLKVDVKNAFNSVDRAALLAQTREKAPPIYNFIWQCYNKPSKLLFKQNHLSSAVGCQQGDPLGPALFSLAIHPIITNFISKFNVWYLDDGTLGGDVTEVLEDLRVLIEHFRGIGLELNFSKCELFFSDTCLDKELVLSKFRRLAPNIKITEKSSLHLLGAPVLDESFPDFLDSKNKNLTEVSDRMTQINAHVAYTIIRYCLFVPKFTYVLRCSHFWKFPTLLEKIDKIIYNILVSLINVKLDNRSWSQASLPIRHGGLGIRKVSSVSLPAYLSSVHSSLELTSKMLKSPIGHFNIPFMSEARIAWSDACPSADLPTNLISQRLWDEPLCRLVRENLFQTATSLPERARLRATVEWESGQWLQALPSTSIGTLLDNCTFRLSVALRLGVTCVAPHRCRCGDPVDPLGHHGLSCGRSAGRAPRHASLNDIIRRALASAGAPAVLEPTGLARADGKRPDGMTLVPWKMGRPLVWDATCADTLALSHLRGTAVKAGSAANSAEVLKRRKYANINSGCMFEPFGVETLGPWGESAHRVFKECSRRLVELTRDQRAGSYLAQRISIAIQRGNAASLLGTLPIDGDLGQFFYL

SEQ ID NO: 1971 - protein, 986 aa, Hedya salicella
MFILSFCVFIILILVFIILLSLNINHRMSLPGGNASSIADSDESPQNLIICSLCSQPRYFKNQHGLRVHLGKKHKASDGTLNFDPPIATDTANLSVLNDISETLSRLKNNIRLIKRVPRGARISVSQKLASTIQNAVTENSYQAWEQLLTFPYRTLHITDQNKNTSLTAKIKKNCQHPLCLEDLDKIVTKHNTSLYKRIENKVGEGDIRGAARLLFSTDCIAPNNQVTVSALRSKHPLPSTNQSLPAPPDTATPPLTTSTDAVLRAVMSFQSGSAGGLDGLTPQHLKDLLGHSSGDTGELLLKALADLSNLMLSGEVNPEVTSTLYGANLCALVKKDGGIRPIAVGTTYRRLVAKIGCAAVSGPLNQYFQPIQLGFGSKGGCEAAVHALRTHITQNSGEVLLKVDVKNAFNSVDRAALLAQTREKAPPIYNFIWQCYNKPSKLLFKQNHLSSAVGCQQGDPLGPALFSLAIHPIITNFISKFNVWYLDDGTLGGDVTEVLEDLRVLIEHFRGIGLELNFSKCELFFSDTCLDKELVLSKFRRLAPNIKITEKSSLHLLGAPVLDESFPDFLESKIKNLTEVSDRMTKINAHVAYTIIRYCLFVPKFTYVLRCSHFWKFPTLLEKIDKIIYNILVSVINVNLDDRSWSQASLPIRHGGLGIRKVSSVSLPAYLSSVHSSLELTSKMLKSPIGHFNIPFMSEARIAWSDACPSADLPTNLISQRLWDEPLCRLVRENLFQTATSLPERARLRATVEWESGQWLQALPSTSIGTLLDNCTFRLSVALRLGVTCVAPHRCRCGDPVDPLGHHGLSCGRSAGRAPRHASLNDIIRRALASAGAPAVLEPTGLARADGKRPDGMTLVPWKMGRPLVWDATCADTLALSHLRGTAVKAGSAANSAEVLKRRKYANINSGCMFEPFGVETLGPWGESAHRVFKECSRRLVELTRDQRAGSYLAQRISIAIQRGNAASLLGTLPIDGDLGQIFYL

SEQ ID NO: 1972 - protein, 986 aa, Hedya salicella
MFILWFCVFIILILVFIILLSLNINHRMSLPGGNASSIADSDESPQNLIICSLCSQPRYFKNQHGLRVHLGKKHKASDGTLNFDPPIATDTANLSVLNDISETLSRLKNNIRLIKRVPRGARISVSQKLASTIQNAVTENSYQAWEQLLTFPYRTLHITDQNKNTSLTAKIKKNCQHPLCLEDLDKIVTKHNTSLYKRIENKVGEGDIRGAARLLFSTDCIAPNNQVTVSALRSKHPLPSTNQSLPAPPDTATPPLTTSTDAVLRAVMSFQSGSAGGLDGLTPQHLKDLLGHSSGDTGELLLKALADLSNLMLSGEVNPEVTSTLYGANLCALVKKDGGIRPIAVGTTYRRLVAKIGCAAVSGPLNQYFQPIQLGFGSKGGCEAAVHALRTHITQNSGEVLLKVDVKNAFNSVDRAALLAQTREKAPPIYNFIWQCYNKPSKLLFKQNHLSSAVGCQQGDPLGPALFSLAIHPIITNFISKFNVWYLDDGTLGGDVTEVLEDLRVLIEHFRGIGLELNFSKCELFFSDTCLDKELVLSKFRRLAPNIKITEKSSLHLLGAPVLDESFPDFLESKIKNLTEVSDRMTKINAHVAYTIIRYCLFVPKFTYVLRCSHFWKFPTLLEKIDKIIYNILVSVINVNLDDRSWSQASLPIRHGGLGIRKVSSVSLPAYLSSVHSSLELTSKMLKSPIGHFNIPFMSEARIAWSDACPSADLPTNLISQRLWDEPLCRLVRENLFQTATSLPERARLRATVEWESGQWLQALPSTSIGTLLDNCTFRLSVALRLGVTCVAPHRCRCGDPVDPLGHHGLSCGRSAGRAPRHASLNDIIRRALASAGAPAVLEPTGLARADGKRPDGMTLVPWKMGRPLVWDATCADTLALSHLRGTAVKAGSAANSAEVLKRRKYANINSGCMFEPFGVETLGPWGESAHRVFKECSRRLVELTRDQRAGSYLAQRISIAIQRGNAASLLGTLPIDGDLGQIFYL

SEQ ID NO: 1973 - protein, 984 aa, Notocelia uddmanniana
MFIFLFCVFLTLLFVFVLFLIVNMNHDMSLPGGSAPSTSNNDPPSQNLLQCPLCSQTRYFKNQHGLKVHLGKKHKVTDAPAGFSDDSRVPTINCKSNISETLSHLKNNTCILKRVPRGARISVSQKLASDIQTVLTENTYQAWEQLLTFPYRTLHIADQSKTTSLTSKIKHNCQHPHSLEDLHRITPKHNSPIYKNIENKVGEGDIRGAARLLFSTDCIAPNNQETLSALQNKHPLPSTNQNLPDPPDSSTPPLTTSTDGVLRAVMSFQSGSAGGLDGLTAQHLKDLLGHGSGEAGELLLKALADLSNLMLAGNVHPAITSTLYGANLCALLKKDGGIRPIAVGTTYRRLVAKIGCAAISDPLSQYFQPTQLGFGSKGGCEAAVHALRTHVTQTTGKVLLKVDVQNAFNSIDRAALLAQAREKAPTIFNFIWQCYSNPSNLLFNENHISSAVGCQQGDPLGPALFSLAIHPIISKLTSQFNAWYLDDGTLGGDEAEVLEDLRVLIEEFHGVGLELNFSKCELFFSDTCKDNETTLSKFRRLAPNIKLAEKSTLHLLGAPVLDESFPVFLDNKIENLNEVSDRMSKLNAHVAYAIIRYCLFVPKFTYVLRCSHFWKFPSLLDKIDKIIQNLLNSIINVNLDDRSWVQASLPIRHGGLGIRKVSSVSLPAYLSSLHSSFHHTSKILKSPTLQIDIPFMTEAINAWTNSCPNTILPGNRSTQRLWDEPLCRLVRDNLYQTATSLTERARLLAVAEWESGQWLQALPSSSLGTLLDNTTFRLSVALRLGVTCVAPHRCRCGDPVDQLGHHGLSCSRSAGRAPRHANLNDIIRRALASAGAPAILEPTGLARDDGKRPDGMTLVPWKMGRPLVWDATCADTMASSHLRGTATKAGSAANSAETLKRRKYAALNSGYHFVPFGVETLGPWGESAHRLFKECSKRLMEVTRDRRAGSYLAQRISIAIQRGNAASLLGTLPSEGDLGQIFYL

SEQ ID NO: 1974 - protein, 923 aa, Notocelia uddmanniana
MFIFLFCVFLTLLFVFVLFLIVNMNHDMSLPGGSAPSTSNNDPPSQNLLQCPLCSQTRYFKNQHGLKVHLGKKHKVTDAPAGFSDDSRVPTINCKSNISETLSHLKNNTCILKRVPRGARISVSQKLASDIQTVLTENTYQAWEQLLTFPYRTLHIADQSKTTSLTSKIKHNCQHPHSLEDLHRITPKHNSPIHKNIENKVGEGDIRGAARLLFSTDCIAPNNQETLSALQNKHPLPSTNQDLPDPPDSSTPPLTTSTDGVLRAVMSFQSGSAGGLDGLTAQHLKDLLGHGSGEAGELLLKALADLSNLMLAGNVHPAITSTLYGANLCALLKKDGGIRPIAVGTTYRRLVAKIGCAAISDPLSQYFQPTQLGFGSKGGCEAAVHALRTHVTQTTGKVLLKVDVQNAFNSIDRAALLAQAREKAPTIFNFIWQCYSNPSNLLFNENHISSAVGCQQGDPLGPALFSLAIHPIISKLTSQFNAWYLDDGTLGGDEAEVLEDLRVLIEEFHGVGLELNFSKCELFFSDTCRDNETTLSKFRRLAPNIKLAEKSTLHLLGAPVLDESFPVFLDNKIKNLNEVSDRMSKLNAHVAYAIIRYCLFVPKFTYVLRCSHFWKFPSLLDKIDKIIQNLLNSIINVNLDDRSWVQASLPIRHGGLGIRKVSSVSLPAYLSSLHSSFHLTSKILKSPTLQIDIPFMTEAINAWTNSCPNTILPGNRSTQRLWDEPLCRLVRDNLYQTATSLTERARLLAVAEWESGQWLQALPSSSLGTLLDNTTFRLSVALRLGVTCVAPHRCRCGDPVDQLGHHGLSCSRSAGRAPRHANLNDIIRRALASAGAPAILEPTGLARDDGKRPDGMTLVPWKMGRPLVWDATCADTMASSHLRGTATKAGSAANSAETLKRRKYAALNSGYHFVPFGVETLGP

SEQ ID NO: 1975 - protein, 984 aa, Notocelia uddmanniana
MFIFLFCVFLTLLFVFVLFLIVNMNHDMSLPGGSAPSTSNNDPPSQNLLQCPLCSQTRYFKNQHGLKVHLGKKHKVTDAPAGFSDDSRVPTINCKSNISETLSHLKNNTCILKRVPRGARISVSQKLTSDIQTVLTENTYQAWEQLLTFPYRTLHIADQSKTTSLTSKIKHNCQHPHSLEDLHRITPKHNSPIYKNIENKVGEGDIRGAARLLFSTDCIAPNNQETLSALQNKHPLPSTNQDLPDPPDSSTPPLTTSTDGVLRAVMSFQSGSAGGLDGLTAQHLKDLLGHGSGEAGELLLKALADLSNLMLAGNVHPAITSTLYGANLCALLKKDGGIRPIAVGTTYRRLVAKIGCAAISDPLSQYFQPTQLGFGSKGGCEAAVHALRTHVTQTTGKVLLKVDVQNAFNSIDRAALLAQAREKAPTIFNFIWQCYSNPSNLLFNENHISSAVGCQQGDPLGPALFSLAIHPIISKLTSQFNAWYLDDGTLGGDEAEVLEDLRVLIEEFHVVGLELNFSKCELFFSDTCKDNETTLSKFRRLAPNIKLAEKSTLHLLGAPVLDESFPVFLDNKIENLNEVSDRMSKLNAHVAYAIIRYCLFVPKFTYVLRCSHFWKFPSLLDKIDKIIQNLLNSIINVNLDDRSWVQASLPIRHGGLGIRKVSSVSLPAYLSSLHSSFHLTSKILKSPTLQIDIPFMTEAINAWTNSCPNTILPGNRSTQRLWDEPLCRLVRDNLYQTATSLTERARLLAVAEWESGQWLQALLSSSLGTLLDNTTFRLSVALRLGVTCVAPHRCRCGDPVDQLGHHGLSCSRSAGRAPRHANLNDIIRRALASAGAPAILEPTGLARDDGKRPDGMTLVPWKMGRPLVWDATCADTMASSHLRGTATKAGSAANSAETLKRRKYAALNSGYHFVPFGVETLGPWGESAHSLFKECSKRLMEVTRDRRAGSYLAQRISIAIQRGNAASLLGTLPSEGDLGQIFYL

SEQ ID NO: 1976 - protein, 986 aa, Hedya salicella
MFILSFCVFIILILVFIILLNLNINHRMSLPGGNASSIADSDESPQNLIICSLCSQPRYFKNQHGLRVHLGKKHKASDGTLNFDPPIATDTANLSVLNDISETLSRLKNNIRLIKRVPRGARISVSQKLASTIQNAVTENSYQAWEQLLTFPYRTLHITDQNKNTSLTAKIKKNCQHPLCLEDLDKIVTKHNTSLYKRIENKVGEGDIRGAARLLFSTDCIAPNNQVTVSALRSKHPLPSTNQSLPAPPDTATPPLTTSTDAVLRAVMSFQSGSAGGLDGLTPQHLKDLLGHSSGDTGELLLKALADLSNLMLSGEVNPEVTSTLYGANLCALVKKDGGIRPIAVGTTYRRLVAKIGCAAVSGPLNQYFQPIQLGFGSKGGCEAAVHALRTHITQNSGEVLLKVDVKNAFNSVDRAALLAQTREKAPPIYNFIWQCYNKPSKLLFKQNHLSSAVGCQQGDPLGPALFSLAIHPIITNFISKFNVWYLDDGTLGGDVTEVLEDLRVLIEHFRGIGLELNFSKCELFFSDTCLDKELVLSKFRRLAPNIKITEKSSLHLLGAPVLDESFPDFLESKIKNLTEVSDRMTKINAHVAYTIIRYCLFVPKFTYVLRCSHFWKFPTLLEKIDKIIYNILVSVINVNLDDRSWSQASLPIRHGGLGIRKVSSVSLPAYLSSVHSSLELTSKMLKSPIGHFNIPFMSEARIAWSDACPSADLPTNLISQRLWDEPLCRLVRENLFQTATSLPERARLRATVEWESGQWLQALPSTSIGTLLDNCTFRLSVALRLGVTCVAPHRCRCGDPVDPLGHHGLSCGRSAGRAPRHASLNDIIRRALASAGAPAVLEPTGLARADGKRPDGMTLVPWKMGRPLVWDATCADTLALSHLRGTAVKAGSAANSAEVLKRRKYANINSGCMFEPFGVETLGPWGESAHRVFKECSRRLVELTRDQRAGSYLAQRISIAIQRGNAASLLGTLPIDGDLGQIFYL

SEQ ID NO: 1977 - protein, 986 aa, Hedya salicella
MFILSFCVFIILILVFSILLSLNINHRMSLPGGNASSIADSDESPQNLIICSLCSQPRYFKNQHGLRVHLGKKHKASDGTLNFDPPIATDTANLSVLNDISETLSRLKNNIRLIKRVPRGARISVSQKLASTIQNAVTENSYQAWEQLLTFPYRTLHITDQNKNTSLTAKIKKNCQHPLCLEDLDKIVTKHNTSLYKRIENKVGEGDIRGAARLLFSTDCIAPNNQVTVSALRSKHPLPSTNQSLPAPPDTATPPLTTSTDAVLRAVMSFQSGSAGGLDGLTPQHLKDLLGHSSGDTGELLLKALADLSNLMLSGEVNPEVTSTLYGANLCALVKKDGGIRPIAVGTTYRRLVAKIGCAAVSGPLNQYFQPIQLGFGSKGGCEAAVHALRTHITQNSGEVLLKVDVKNAFNSVDRAALLAQTREKAPPIYNFIWQCYNKPSKLLFKQNHLSSAVGCQQGDPLGPALFSLAIHPIITNFISKFNVWYLDDGTLGGDVTEVLEDLRVLIEHFRGIGLEFNFSKCELFFSDTCLDKELVLSKFRRLAPNIKITEKSSLHLLGAPVLDESFPDFLESKIKNLTEVSDRMTKINAHVAYTIIRYCLFVPKFTYVLRCSHFWKFPTLLEKIDKIIYNILVSVINVNLDDRSWSQASLLIRHGGLGIRKVSSVSLPAYLSSVHSSLELTSKMLKSPIGHFNIPFMSEARIAWSDACPSADLPTNLISQRLWDEPLCRLVRENLFQTATSLPERARLRATVEWESGQWLQALPSTSIGTLLDNCTFRLSVALRLGVTCVAPHRCRCGDPVDPLGHHGLSCGRSAGRAPRHASLNDIIRRALASAGAPAVLEPTGLARADGKRPDGMTLVPWKMGRPLVWDATCADTLALSHLRGTAVKAGSAANSAEVLKRRKYANINSGCMFEPFGVETLGPWGESAHRVFKECSRRLVELTRDQRAGSYLAQRISIAIQRGNAASLLGTLPIDGDLGQIFYL

SEQ ID NO: 1978 - protein, 986 aa, Hedya salicella
MFILSFCVFIILILVFIILLSLNINHRMSLPGGNASSIADSDESPQNLIICSLCSQPRYFKNQHGLRVHLGKKHKASDGTLNFDPPIATDTANLSVLNDISETLSRLKNNIRLIKRVPRGARISVSQKLASTIQNAVTENSYQAWEQLLTFPYRTLHITDQNKNTSLTAKIKKNCQHPLCLEDLDKIVTKHNTSLYKRIENKVGEGDIRGAARLLFSTDCIAPNNQVTVSALRSKHPLPSTNQSLPAPPDTATPPLTTSTDAVLRAVMSFQSGSAGGLDGLTPQHLKDLLGHSSGDTGELLLKALADLSNLMLSGEVNPEVTSTLYGANLCALVKKDGGIRPIAVGTTYRRLVAKIGCAAVSGPLNQYFQPIQLGFGSKGGCEAAVHALRTHITQNSGKVLLKVDVKNAFNSVDRAALLAQTREKAPPIYNFIWQCYNKPSKLLFKQNHLSSAVGCQQGDPLGPALFSLAIHPIITNFISKFNVWYLDDGTLGGDVTEVLEDLRVLIEHFRGIGLELNFSKCELFFSDTCLDKELVLSKFRRLAPNIKITEKSSLHLLGAPVLDESFPDFLESKIKNLTEVSDRMTKINAHVAYTIIRYCLFVPKFTYVLRCSHFWKFPTLLEKIDKIIYNILVSVINVNLDDRSWSQASLPIRHGGLGIRKVSSVSLPAYLSSVHSSLELTSKMLKSPIGHFNIPFMSEARIAWSDACPSADLPTNLISQRLWDEPLCRLVRENLFQTATSLPERARLRATVEWESGQWLQALPSTSIGTLLDNCTFRLSVALRLGVTCVAPHRCRCGDPVDPLGHHGLSCGRSAGRAPRHASLNDIIRRALASAGAPAVLEPTGLARADGKRPDGMTLVPWKMGRPLVWDATCADTLALSHLRGTAVKAGSAANSAEVLKRRKYANINSGCMFEPFGVETLGPWGESAHRVFKECSRRLVELTRDQRAGSYLAQRISIAIQRGNAASLLGTLPIDGDLGQIFYL

SEQ ID NO: 1979 - protein, 1203 aa, Hermetia illucens
MRRRRNLRSGTDNRRESSDLVTGSGSRNGQHGVETASRGAVRRLGATTTRSTAPPAAAVSPQPVATTSAGSRRKRMKWTEEMNLFIIRSYYEITAGAGTTSYRPLLHQRFVERFPQFAHVTVQRVADQYRFITRSDTIPATIRERVRLEVIGETGDRESMGAEAAASTTPRRTAGNRFSTRRSTLLHRPAEVSAEVRDEFQRACIEFSDMDPLHRPGIPRLYASPATPGILSQINDEIASQLCADMSLLQLQSLVYCGAVAAIRLHGQKIRFRVIGLSDKRDPPWKIRLERRRDSLRQDIARLIQISTGNASRRVRNKVQRVYRNYAIPCETPVVEILDTLKQKLSVICSRLRRYGESYSRRVQNATYARNQRSFFRSLNESQQSAQTIQFSVTEAKEYWGGLWGLPAQHAEHAEWITAEGTRHANTPGMNFADVTEEEVRRAINSSKNWRGPGLDRVQNFWYKKFTSVHSRLARSINEVMSRPEEFPPFLTAGITYLIPKKDTVQDPADTRPITCLPTLYKFITSIISGRINAHLETNNILSEEQKGCRVGSRGYKEQLIIDSVVVGQATRGQRNLYSCYIDYAKAFDSVPHTWLIAILHLYRIDPKLIKFLATVMEGWHTTLSVRTSEGANTSEPIRIRRGIFQGDSLSPLWFCMALNPLSWLLNDARGHGFAIKYGLRAKCELTHLMYLDDIKLYAGTDDHLRSLLRIIDMFSRDIRMEFGLDKCRIQAIRKGHHEPHAGHSIGDLHIEAMTETDFYKYLGILQGTHARVGDLKKALLSEFLRRAKLVLKSHLSGKNKISALNVFAIPSLAYAFGILPWTKTDLENVQRRIRTTMSKFRMHHPKSAVERMNLPRDIGGRGVVDVAAQHHRQVDSLRAYFYSKEQASPLHAAVCKADCGLTPLNLKDRSFNPLSGVKSDQERIEEWKSKAMHGKHVNCLWQPFVDLHLSNRWLCAGELFAETEGFMCAIHDGVVATRAYKKLIMKERVENDQCRMCGSALETLDHLISGCTVMAPVQYITRHNAVCKVIHQNLAYKHGLITGTCPVYRYEPQAVLDSSAYSMYWDRQVLTDRHTAHNKPDVLLVDKTGRSAYIIDVAIPHNSNIERKYVEKKVNYEPLAREIKEIWRLERVVVVPIILSATGIVPKSLTASLMSWDFHTVWFKPCKSTPFCIRARCCGEYSTDSPTDLPPATTTSAPLVFK

SEQ ID NO: 1980 - protein, 1193 aa, Hermetia illucens
MHHQKMRRRRNLRSGTDNRRESSDLVTGSGSRNGQHGVETASRGAVRRLGATTTRSTAPPAAAVSPQSVATTSAGSRRKRMKWTEEMNLFIIRSYYEITAGAGTTSYRPLLHQRFVERFPQFAHVTVQRVADQYRFITRSDTIPATIRERVRLEVIGETGDRESMGAEAAASTTSRRTAGNRFSTRRSTLLHRPAEVSAEVRDEFQRACIEFSDMDPLHRPGIPRLYASPATPGILSQINDEIASRLCADMSLLQLQSLVYCGAVAAIRLHGQKIRFRVIGLSDKRDPPWKIRLERRRDSLRQDIARLIQISTGNASRRVRNKVQRVYRNYAIPCETPVVEILDTLKQKLSVICSRLRRYGESYSRRVQNATYARNQRSFFRSLNESQQSAQTIQFSVTEAKEYWGGLWGLPAQHAEHAEWITAEGTRHANTPGMNFADVTEEEVRGAINSSKNWRGPGLDRVQNFWYKKFTSVHSRLARSINEVMSRPEEFPPFLTAGITYLIPKKDTVQDPADTRPITCLPTLYKFITSIISGRINAHLETNNILSEEQKGCRVGSRGCKEQLIIDSVVVGQATRGQRNLFSCYIDYAKAFDSVPHTWLIDILHLYRIDPKLIKFLATVMEGWHTTLSVRTSEGANTSEPIRIRRGIFQGDSLSPLWFCMALNPLSWLLNDARGHGFAIKYGLRAKCELTHLMYLDDIKLYAGTDNHLRSLLRIIDMFSRDIRMEFGLDKCRIQAIRKGHHEPHAGHSIGDLHIEAMTETDFYKYLGILQGTHARVGDLKEALLSEFLRRVKLVLKSHLSGKNKISALNVFAIPSLAYAFGILPWTKTDLENVQRRIRTTMSKFRMHHPKSAVERMNLPRDIGGRGVVDVAAQHHRQVDSLRAYFYSKEQASPLHAAVCKADCGLTPLNLKDRSFNPLSGVKSDQERIEEWKSKAMHGKHVNCLWQPFVDLHLSNRWLCAGELFAETEGFMCAIQDGVVATRAYKKLIMKERVENDQCRMCGSALETLDHLISGCTVMAPVQYITRHNAVCKVIHQNLAYKHGLITGTCPVYRYEPQAVLDSSAYSMYWDRQVLTDRHTAHNKPDVLLVDKTGRSAYIIDVAIPHNSNIERKYVEKKVNYEPLAREIKEIWRLERVVVVPIILSATGIVPKSLTASLDVLGLSHSLVQTMQKYTILHTCSMLRGVLDGFSH

SEQ ID NO: 1981 - protein, 1188 aa, Hermetia illucens
MRRRRNLRSGTDNRRESSDLVTGSGSRNGQHGVETASRGAVRRLGATTTRSTAPPAAAVSPQPVATTSAGSRRKRMKWTEEMNLFIIRSYYEITAGAGTTSYRPLLHQRFVERFPQFAHVTVQRVADQYRFITRSDTIPATIRERVRLEVIGETGDRESMGAEAAASTTSRRTAGNRFSTRRSTLLHRPAEVSAEVRDEFQRACIEFSDMDPLHRPGIPRLYASPATPGILSQINDEIASRLCADMSLLQLQSLVYCGAVAAIRLHGQKIRFRVIGLSDKRDPPWKIRLERRRDSLRQDIARLIQISTGNASRRVRNKVQRVYRNYAIPCETPVFEILDTLKQKLSVICSRLRRYGESYFRRVQNATYARNQRSFFRSLNESQQSAQTIQFSVTEAKEYWGGLWGLPAQHAEHAEWITAEGTRHVNTPGMNFADVTEEEVRRAINSSKNWRGPGLDRVQNFWYKKFTSVHSRLARSINEVMSRPEEFPPFLTAGITYLVPKKDTVQDPADTRPITCLPTLYKFITSIISGRINAHLETNNILSEEQKGCRVGSRGCKEQLIIDSVVVGQATRGQRNLFSCYIDYAKAFDSVPHTWLIDILHLYRIDPKLIKFLATVMEGWHTTLSVRTSEGANTSEPIRIRRGIFQGDSLSPLWFCMALNPLSWLLNDARGHGFAIKYGLRAKCELTHLMYLDDIKLYAGTDNHLRSLLRIIDMFSRDIRMEFGLDKCRIQAIRKGHHEPHAGHSIGDLHIEAMTETDFYKYLGILQGTHARVGDLKEALLSEFLRRVKLVLKSHLSGKNKISALNVFAIPSLAYAFGILPWTKTDLENVQRRIRTTMSKFRMHHPKSAVERMNLPRDIGGRGVVDVAAQHHRQVDSLRAYFYSKEQASPLHAAVCKADCGLTPLNLKDRSFNPLSGVKSDQERIEEWKSKAMHGKHLNCLWQPFVDLHLSNRWLCAGELFAETEGFMCAIQDGVVATRAYKKLIMKERVENDQCRMCGSALETLDHLISGCTVMAPVQYITRHNAVCKVIHQNLAYKHGLITGTCPVYRYEPQAVLDSSAYSMYWDRQVLTDRHTAHNKPDVLLVDKTGRSAYIIDVAIPHNSNIERKYVEKKVNYEPLAREIKEIWRLERVVVVPIILSATGIVPKSLTASLDVLGLSHSLVQTMQKYTILHTCSMLRGVLDGFSH

SEQ ID NO: 1982 - protein, 1029 aa, Hermetia illucens
MEAEAAASTTPRRTAGNRFSTRRSTLLHRPAEVSAEVRDEFQRACIEFSDMDPLHRPGIPRLYASSATPGILSQINDEIASRLCADMSLLQLQSLVYCGAVAAIRLHGQKIRFRVIGFSDKRDPPWKIRLERRRDSLRQDIARLIQISTGNASRRVRNKVQRVYRNYAIPCETPVVEILDTLKQKLSVICSRLRRYGESYSKRVQNATYARNQRSFFRSLNESQQSAQTIQFSVTEAKEYWGGLWGLPAQHAEHAEWITAEGTRHANTPGMNFADVTEEEVRRAINISKNWRGPGLDRVQNFWYKKFTSVHSRLARSINEVMSRPEEFPPFLTAGITYLIPKKDTVQDPADTRPITCLPTLYKFITSIISGRINAHLETNNILSEEQKGCRVGSRGCKEQLIIDSVIVGQATKGQRNLFSCYIDYAKAFDSVPHTWLIDILHLYRIDPKLIKFLATVMEGWHTTLSVRTSEGANTSEPIRIRRGIFQGDSLSPLWFCMALNPLSWLLNDARGHGFAIKYGLRAKCELTHLMYLDDIKLYAGTDNHLRSLLRIIDMFSRDIRMEFGLDKCRIQAIRKGHHEPHAGHSIGDLHIEAMTETDFYKYLGILQGTHARVGDLKEALLSEFLRRVKLVLKSHLSGKNKISALNVFAIPSLAYAFGILPWTKTDLENVQRRIRTTMSKFRMHHPKSAVERMNLPRDIGGRGVVDVAAQHHRQVDSMRAYFYSKEQASPLHAAVCKADCGLTPLNLKDRSFNPLSGVKSDQERIEEWKSKAMHGKHVNCLWQPFVDLHLSSRWLCAGELFAETEGFMCAIQDGVVATRAYKKLIMKERVENDQCRMCGSALETLDHLISGCTVMAPVQYITSHNAVCKVIHQNLAYKHGLITGTCPVYRYEPQAVLDSSAYSMYWDRQVLTDRHTAHNKPDVLLVDKTGRSAYIIDVAIPHNSDIERKYVEKKVNYEPLAREIKEIWRLEWVVVVPIILSATGIVPKSLTASLDVLGLSHSLVQTMQKYTILHTCSMLRGVLDGFSH

SEQ ID NO: 1983 - protein, 1193 aa, Hermetia illucens
MHHQKMRRRRNLRSGTDNRRESSDLVTGSGSRNGQHGVETASRGAVRRLGATTTRSTAPPAAAVSPQSVATTSAGSRRKRMKWTEEMNLFIIRSYYEITAGAGTTSYRPLLHQRFVERFPQFAHVTVQRVADQYRFITRSDTIPATIRERVRLEVIGETGDRESMGAEAAASTTPRRTAGNRFSTRRSTLLHRPAEVSAEVRDEFQKACIEFSDMDPLHRPGIPRLYASPATPGILSQINDEIASRLCADMSLLQLQSLVYCGAVAAIRLHGQKIRFRVIGLSDKRDPPWKIRLERRRDSLRQDIARLIQISTGNASRRVRNKVQRVYRNYAIPCETPVVEILDTLKQKLSVICSRLRRYGESYSRRVQNATYARNQRSFFRSLNESQQSAQTIQFSVTEAKEYWGGLWGLPAQHAEHAEWITAEGTRHANTPGMNFADVTEEEVRRAINISKNWRGPGLDRVQNFWYKKFTSVHSRLARSINEVMSRPEEFPPFLTAGITYLIPKKDTVQDPADTRPITCLPTLYKFITSIISGRINAHLETNNILSEEQKGCRVGSRGCKEQLIIDSVVVGQATRGQRNLFSCYIDYAKAFDSVPHTWLIDILHLYRIDPKLIKFLATVMEGWHTTLSVRTSEGANTSEPIRIRRGIFQGDSLSPLWFCMALNPLSWLLNDARGHGFAIKYGLRAKCELTHLMYLDDIKLYAGTDNHLRSLLRIIDMFSRDIRMEFGLDKCRIQAIRKGHHEPHAGHSIGDLHIEAMTETDFYKYLGILQGTHARVGDLKEALLSEFLRRVKLVLKSHLSGKNKISALNVFAIPSLAYAFGILPWTKTDLENVQRRIRTTMSKFRMHHPKSAVERMNLPRDIGGRGVVDVAAQHHRQVDSLRAYFYSKEQASPLHAAVCKADCGLTPLNLKDRSFNPLSGVKSDQERIEEWKSKAMHGKHVNCLWQPFVDLHLSNRWLCAGELFAETEGFMCAIQDGVVATRAYKKLIMKERVENDQCRMCGSALETLDHLISGCTVMAPVQYITRHNAVCKVIHQNLAYKHGLITGTCPVYRYEPQAVLDSSAYSMYWDRQVLTDRHTAHNKPDVLLVDKTGRSAYIIDVAIPHNSNIERKYVEKKVNYEPLAREIKEIWRLERVVVVPIILSATGIVPKSLTASLDVLGLSHSLVQTMQKYTILHTCSMLRGVLDGFSH

SEQ ID NO: 1984 - protein, 1029 aa, Hermetia illucens
MGAEAAASTTPRRTAGNRFSTRRSTLLHRPAEVSAEVRDEFQRACIEFSDMDPLHRPGIPRLYASPATPGILSQINDEIASRLCADMSLLQLQSLVYCGAVAAIRLHGQKIRFRVIGLSDKRDPPWKIRLERRRDSLRQDIARLIQISTGSASRRVRNKVQRVYRNYAIPCETPVVEILDTLKQKLSVICSRLRRYGESYSRRVQNATYARNQRSFFRSLNESQQSAQTIQFSVTEAKEYWGGLWGLPAQHAEHAEWIAAEGTRHANTPGMNFADVTEEEVRRAINISKNWRGPGLDRVQNFWYKKFTSVHSRLARSINEVMSRPEEFPPFLTAGITYLIPKKDTVQDPADTRPITCLPTLYKFITAIISGRINAHLETNNILSEEQKGCRVGSRGCKEQLIIDSVVVGQATRGQRNLFSCYIDYAKAFDSVPHTWLIDILHLYRIDPKLIKFLATVMEGWHTTLSVRTSEGANTSEPIRIRRGIFQGDSLSPLWFCMALNPLSWLLNDARGHGFAIKYGLRAKCELTHLMYLDDIKLYAGTDNHLRSLLRIIDMFSRDIRMEFGLDKCRIQAIRKGHHEPHAGHSIGDLHIEAMTETDFYKYLGILQGTHARVGDLKEALLSEFLRRVKLVLKSHLSGKNKISALNVFAIPSLAYAFGILPWTKTDLENVQRRIRTTMSKFRMHHPKSAVERMNLPRDIGGRGVVDVAAQHHRQVDSLRAYFYSKEQASPLHAAVCKADCGLTPLNLKDRSFNPLSGVKSDQERIEEWKSKAMHGKHVNCLWQPFVDLHLSNRWLCAGELFAETEGFMCAIQDGVVATRAYKKLIMKERVENDQCRMCGSALETLDHLISGCTVMAPVQYITRHNAVCKVIHQNLAYKHGLITGTCPVYRYEPQAVLDSSAYSMYWDRQVLTDRHTAHNKPDVLLVDKTGRSAYIIDVAIPHNSNIERKYVEKKVNYEPLAREIKEIWRLERVVVVPIILSATGIVPKSLTASLDVLGLSHSLVQTMQKYTILHTCSMLRGVLDGFSH

SEQ ID NO: 1985 - protein, 1062 aa, Hermetia illucens
MRRRGNLRSGTDNRRESSDLVTGSGSRNGQHGVETASRGAVRRLGATTTRSTAPPAAAVSPQSVATTSAGSRRKRIKWTEEMNLFIICSYYEITAGAGTTSYRPLLHQRFVERFPQFAHVTVQRVADQYRFITRSDTIPATIRERVRLEVIGETGDRESMGAEASASTTPRRTAGNSFSTRRSTLLHRPAEVSAEVRDEFQRACIEFSDMDPLHRPGIPRLYASPATPGILSQINDEIASRLCADMSLLQLQSLVYCGAVAAVRLHGQKIRFRVIGLSDKRDPPWKIRLERRRDSLRQDITRLIQISTGNASRRVRNKVQRVYRNYAIACETPVIEILDTLKQKLSVICSRLRRYGESYSRRVQNATYARNQRSFFRSLNESQQTIQFSVTEAKEYWDGLWGLPAQHPEHAEWITAEGTRHANTPGMNFADVTEEEVRRAINSSKNWRGPGLDRVQNFWYKKFTSVHSRLARSINEVMSRPEEFPPFLTAGITYLIPKKDTVQDPADTRPITCLPTLYKFITCIISGRINAHLETNNILSEEQKGCRVGSRVCKEQLIIDSVVVGQATRGQRNLFSCYIDYAKAFDSVPHTWLIDILHLYRIDPKLIKFLATVMEGWHTTLSVCTSEGANTSEPIRIRRGIFQGDSLSPLWFCMALNPLSWLLNDARGHGFPIKYGLRAKCELTHLMYLDDIELYAGTDNHLRSLLRIIDMFSRDIRMEFGLDMCRIQAIRKGHHEPHAGHSIGDLHIEAMTETDFYKYLGILQGTHARVGDLKEALLSEFLRRVKLVLKSHLSGKNKISALNIFAILSLAYAFGILPWTKTDLENVQRRIRTTMSKFRMHHPKSAVERMNLPRDIGGRGVVDVAAQHHRQVDSLHAYFYSKEQASPLHAAVCKADCGLTPLNLKDRSFNPLSAVKSDQERIDEWKSKAIHGKHVNCLWQPFVDLHLSNRWLCAGELFAETEGFMCAIQDGVVATRAYKKLIMKERVENDQCRMCGSALETLDHLISGCTVMAPVQYITRHNAVCKVIHQNLAYKHGLITGTCPVYRYEPQAVLDSSVLFCF

SEQ ID NO: 1986 - protein, 1193 aa, Hermetia illucens
MHHQKMRRRRNLRSGTDNRRESSDLVTGSGSRNGQHGVETASRGAVRRLGATTTRSTAPPAAAVSPQSVATTSAGSRRKRMKWTEEMNLFIIRSYYEITAGAGTTSYRPLLHQRFVERFPQFAHVTVQRVADQYRFITRSDTIPATIRERVRLEVIGETGDRESMGAEAAASTTPRRTAGNRFSTRRSTLLHRPAEVSAEVREEFQRACIEFSDMDPLHRPGIPRLYASPATPGILSQINDEIASRLCADMSLLQLQSLVYCGAVAAIRLYGQKIRFRVIGLSDKRDPPWKIRLERRRDSLRQDIARLIQISTGSASRRVRNKVQRVYRNYAIPCETPVVEILDTLKQKLSVICSRLRRYGESYSRRVQNATYARNQRSFFRSLNESQQSAQTMQFSVTEAKEYWGGLWGLPAQHAEHAEWITAEGTRHANTPGMNFADVTEEEVRRAINISKNWRGPGLDRVQNFWYKKFTSVHSRLARSINEVMSRPEEFPPFLTAGITYLIPKKDTVQDPADTRPITCLPTLYKFITSIISGRINAHLETNNILSEEQKGCRVGSRGCKEQLIIDSVVVGQATRGQRNLFSCYIDYAKAFDSVPHTWLIDILHLYRIDPKLIKFLATVMEGWHTTLSVRTSEGANTSEPIRIRRGIFQGDSLSPLWFCMALNPLSWLLNDARGHGFAIKYGLRAKCELTHLMYLDDIKLYAGTDNHLRSLLRIIDMFSRDIRMEFGLDKCRIQAIRKGHHEPHAGHSIGDLHIEAMTETDFYKYLGILQGAHARVGDLKEALLSEFLRRVKLVLKSHLSGKNKISALNVFAISSLAYAFGILPWTKTDLENVQRRIRTTMSKFRMHHPKSAVERMNLPRDIGGRGVVDVAAQHHCQVDSLRAYFYSKEQASPLHAAVCKADCGLTPLNLKDRSFNPLSGVKSDQERIEEWKSKAMHGKHVNCLWQPFVDLHLSNRWLCAGELFAETEGFMCAIQDGVVATRAYKKLIMKERVENDQCRMCGSALETLDHLISGCTVMAPVQYITRHNAVCKVIHQNLAYKHGLITGTCPVYRYEPQAVLDSSAYSMYWDRQVLTDRHTAHNKPDVLLVDKTGRSAYIIDVAIPHNSNIERKYVEKKVNYEPLAREIKEIWRLERVVVVPIILSATGIVPKSLTASLDVLGLSHSLVQTMQKYTILHTCSMLRGVLDGFSH

SEQ ID NO: 1987 - protein, 1187 aa, Hermetia illucens
MIRRRNLRSGTDNRRESSDLVTGSGSRNGQHGVETASRGAVRRLGATTTRSTAPPAAAVSPQSVATTSADSRRKRMKWTEEMNLFIIRSYYEITAGAGITSYRPLLHQRFVERFPQFAHVTVQRVADQYRFITCSDTIPATIRERVRLEVIGETGDRESMGAEAAASTTPRRTAGNRFSTRRSTLLHRPAEVSAEVRDEFQRACIEFSDMDPLHRPGIPRLYASPATPGILSQTNDEIASRLCADMSLLQLQSLVYCGAVAAIRLHGQKIRFRVIGLSDKRDPPWKIRQERRRDSLRQDIARLIQISTGNASRRVRNKVQRVYRNYAIPCETPVVEILDTLKQKLSVICSRLRRYGESYSRRVQNATYARNQRSFFRSLNESQQSAQTIQFSLTEAKEYWGGLWGLPAQHAEHAEWITAEGTRHANTPGMNFADVTEEEVRRAINISKNWRGPGLDRVQNFWYKKFTSVHSRLARSINEVMSRPEEFPPFLTAGITYLIPKKDTVQDPADTRPITCLPTLYKFITSIISGRINAHLETNNILSEEQKGCRVGLRGCKEQLIIDSVVVGQATRGQRNLFSCYIDYAKAFDSVPHTWLIDILHLYHIDPKLIKFLATVMERWHTTLSVRTSEGANTSEPIRIRRGIFQGDSLSPLWFCMALNPLSWLLNDARGHGFAIKYGLRAKCELTHLMYLDDIKLYAGTDNHLRSLLRIIDMFSRDIPMEFGLDKCRIQAIRKGHHEPHAGHSIGDLHIEAMTETDFYKYLGILQGTHARVGDLKEALLSEFLRRVKLVLKSHLSGKNKISALNVFAIPSLAYAFGILPWTKTDLENVQRRIRTTMSKFRMHHPKSAVERMNLPRDIGGRGVVDVAAQHHRQVDSLSAYFYSKEQASPLHAAVCKADCGLTPLNLKDRSFNPLSGVKSDQERIEEWKSKAMHGKHVNCLWQPFVDLHLSNRWLCAGELFAETEGFMCAIQDGVVATRVYKKLIMKERVENDQCRMCGSALETLDHLISGCTVMAPVQYITRHNAVCKVIHQNLGYKHGLITGTCPVYRYEPQAVLDSSAYSMYWDRQVLTDRHTAHNKPDVLLVDKTGRSAYIIDVAIPHNSNIERKYVKKVNYEPLAREIKEIWRLERVVVVPIILSATGIVPKSLTASLDVLGLSHSLVQTMQKYTILHTCSMLRGVLDGFSH

SEQ ID NO: 1988 - protein, 1238 aa, Hermetia illucens
MDSFSLNGCTPPQRLRGWVRKVQEFCSLADYSPRKLSTHLAARDKMHHQKMRRRRNLRSGTDNRRESSDLVTGSGSRNGQHGVETASRGAVRRLGATTTRSTAPPAAAVSPQSVATTSAGSRRKRMKWTEEMNLFIIRSYYEITAGAGTTSYRPLLHQRFVERFPQFAHVTVQRVADQYRFITRSDTIPATIRERVRLEVIGETGDRESMGAEAAASTTPRRTAGNRFSTRRSTLLHRPAEVSAEVRDEFQRAFIEFSDMDPLHRPGIPRLYASPATPGILSQINDEIASRLCADMSLLQLQSLVYCGAVAAIRLHGQKIRFRVIGLSDKRDPPWKIRLERRRDSLRQDIARLIQISTGNASRRVRNKVQRVYRNYAIPCETPVVEILDTLKQKLSVICSRLRRYGESYSRRVQNATYARNQRSFFRSLNESQQSAQTIQFSVTEAKEYWGGLWGLPAQHAEHAEWITAEGTRHANTPGMNFADVTEEEVRRAINISKNWRGPGLDRVQNFWYKKFTSVHSRLARSINVVMSRPEEFPPFLTAGITYLIPKKDTVQDPADTRPITCLPTLYKFITSIISGRINAHLETNNILSEEQKGCRVGSRGCKEQLIIDSVVVGQATRGQRNLFSCYIDYAKAFDSVPHTWLIDILHLYRIDPKLIKFLATVMEGWHTTLSVRTSEGANTSEPIRIRRAIFQGDSLSPLWFCMALNPLSRLLNDARGHGFAIKYGLRAKCELTHLMYLDDIKLYAGTDNHLRSLLRIIDMFSRDIRMEFGLDKCRIQAIRKGHHEPHAGHSIGDLHIEAMTETDFYKYLGILQGTHARVGDLKEALLSEFLRRVKLVLKSHLSGKNKISALNVFAIPSLAYAFGILPWTKTDLENVQRRIRTTMSKFRMHHPKSAVERMNLPRDIGGRGVVDVAAQHHRQVDSLRAYFYSKEQASPLHAAVCKADCGLTPLNLKDRSFNPLSGVKSDQERIEEWKSKTMHGKHVNCLWQPFVDLHLSNRWLCAGELFAETEGFMCAIQDGVVATRAYKKLIMKERVENDQCRMCGSALETLDHLISGCTVMAPVQYITRHNAVCKVIHQNLAYKHGLITGTCPVYRYEPQAVLDSSAYSMYWDRQVLTDRHTAHNKPDVLLVDKTGRSAYIIDVAIPHNSNIERKYVEKKVNYEPLAREIKEIWRLERVVVVPIILSATGIVPKSLTASLDVLGLSHSLVQTMQKYTILHTCSMLRGVLDGFSH

SEQ ID NO: 1989 - protein, 1188 aa, Hermetia illucens
MRRKRNLRSGMDNRRESSDLVTGSGSRNGQHGVETASRGAVRRLGATTTRSTAPPAAAVSPQSVATTSAGSRRKRMKWTEEMNLFIIRSYYEITAGAGITSYRPLLHQRFVERFPQFAHVTVQRVADQYRFITRSDTIPATIRERVRLEVIGETGDRESMGAEAAASTTPRRTAGNRFSTRRSTLLHRPAEVSAEVRDEFQRACIEFSDMDPLHRPGIPRLYASPATPGILSQINDEIASRLCADMSLLQLQSLVYCGAVAAIRLHGQKIRFRVIGLSDKRDPPWKIRLERRRDSLRQDIARLIQISTGNASRRVRNKVQRVYRNYAIPCETPVVEILDTLKQKLSVICSRLRRYGESYSRRVQNATYARNQRSFFRSLNESQQSAQTIQFSVTEAKEYWGGLWGLPAQHAEHAEWITAEVTRHANTPGMNFADVTEEEVRRAINISKNWRGPGLDRVQNFWYKKFTSVHSRLARSINEVMSRPEEFPPFLTAGITYLIPKKDTVQDPADTRPITCLPTLYKFITSIISGRINAHLETNNILSKEQKGCRVGSRGCKEQLIIDSVVVGQATRGQRNLFSCYIDYAKAFDSVPHTWLIDILHLYRIDPKLIKFLATVMEGWHTTLSVRTSEGANTSEPIRIRRGIFQGDSLSPLWFCMALNPLSWLLNDTRGHGFAIKYGLRAKCELTHLMYLDDIKLYAGTDNHLRSLLRIIDMFSRDIRMEFGLDKCRIQAIRKGHHEPHAGHSIGDLHIEAMTETDFYKYLGILQGTHARVGDLKEALLSEFLRRVKLVLKSHLSGKNKISALNVFAIPSLAYAFGILPWTKTDLENVQRRIRTTMSKFRMHHPKSAVERMNLLRDIGGRGVVDVAAQHHRQVDSLRAYFYSKEQASPLHAAVCKADCGLTPLNLKDRSFNPLSGVKSDQERIEEWKSKAMHGKHVNCLWQPFVDLHLSNRWLCAGELFAETEGFMCAIQDGVVATRAYKKLIMKERVENDQCRMCGSALETLDHLISGCTVMAPVQYITRHNAVCKVIHQNLAYKHGLITGTCPVYRYEPQAVLDSSAYSMYWDRQVLTDRHTAHNKPDVLLVDKTGRSAYIIEVDIPHNSNIERKYVEKKVNYEPLAREIKEIWRLERVVVVPIILSATGIVPKSLTASLDVLGLSHSLVQTMQKYTILHTCSMLRGVLDGFSH

SEQ ID NO: 1990 - protein, 1190 aa, Hermetia illucens
MHHQKMRRRRNLRSGTDNRRESSDLVTGSGSRNGQHGVETASRGAVRRLGATTTRSTAPPAAAVSPQSVATTSAGSRRKRMKWTEEMNLFIIRSYYEITAGAGTTSYRPLLHQRFVERFPQFAHVTVQRVADQYRFITRSDTIPATIRERVRLEVIGETGDRESMGAEAAASTTSRRTAGNRFSTRRSTLLHRPAEVSAELRDEFQRACIEFSDMDPLHRPGIPRLYASPATPGILSQINDEIASRLCADMSLLQLQSLVYCGAVAAIRLHGQKIRFRVIGLSDKRDPPWKIRLERRRDSLRQDIATLIQISTGNASRRVRNKVQRVYRNYAIPCETPVVEILDTLKQKLSVICSRLRRYGESYSRRIQNATYARNQRSFFRSLNESQQSAQTIQFSVTEAKEYWGGLWGLPAQHAEWITAEGTRHVNTPGMNFADVTEEEVRGAINSSKNWRGPGLDRVQNFWYKKFTSVHSRLARSINEVMSRPEEFPPFLTAGITYLIPKKDTVQDPADTRPITCLPTLYKFSTSIISGRINAHLETNNILSEEQKGFRVGSRGCKEQLIIDSVVVGQATRGQRNLFSCYIDYAKAFDSVPHTWLIDILHLYRIDPKLIKFLATVMEGWHTTLSVRTSEGANTSEPIRIRRGIFQGDSLSPLWFCMALNPLSWLLNDARGHGFAIKYGLRAKCELTHLMYLDDIKLYAGTDNHLRSLLRIIDMFSRDIRMEFGLDKCRIQAIRKGHHEPHAGHSIGDLHIEAMTETDFYKYLGILQGTHARVGDLKEALLSEFLRRVKLVLKSHLSGKNKISALNVFAIPSLAYAFGILPWTKTDLENVQRRIRTTMSKFRMHHPKSAVERMNLPRDIGGRGVVDVAAQHHRQVDSLRACFYSKEQASPLHAAVCKADCGLTPLNLKDRSFNPLSGVKSDQERIEEWKSKAMHGKHVNCLWQPFVDLHLSNRWLCAGELFAETEGFMCAIQDGVVATRAYKKLIMKERVENDQCRMCGSALETLDHLISGCTVMAPMQYITRHNAVCKVIHQNLAYKHGLITGTCPVYRYEPQAVLDSSAYSMYWDRQVLTDRHTAHNKPDVLLVDKTGRSAYIIDVAIPHNSNIERKYVEKKVNYEPLAREIKEIWRLERVVVVPIILSATGIVPKSLTASLDVLGLSHSLVQTMQKYTILHTCSMLRGVLDGFSH

SEQ ID NO: 1991 - protein, 1029 aa, Hermetia illucens
MGAEAAASTTSRRTAGNRFSTRRSTLLHRPAEVSAEVRDEFQRACIEFSDMDPLHRPGIPRLYASPATPGILSQINDEIASRLCADMSLLQLQSLVYCGAVAAIRLHGQKIRFRVIGLSDKRDPPWKIRLERRRDSLRQDIARLIQISTGNASRRVRNKVQRVYRNYAIPCETPVVEILDTLKQKLSVICSRLRRYGESYSRRVQNATYARNQRSFFRSLNESQQSAQTIQFSVTEAKEYWGGLWGLPAQHAEHAEWITAEGTRHVNTPGMNFADVTEEEVRRAINSSKNWRGPGLDRVQNFWYKKFTSVHSRLARSINEVMSRPEEFPPFLTAGITYLIPKKDTVQDPADTRPITCLPTLYKFITSIISGRINAHLETNNILSEEQKGCRVGSRGCKEQLIIDSVVVGQATRGQRNLFSCYFDYAKAFDSVPHTWLIDILHLYRIDPKLIKFLATVMEGWHTTLSVRTSEGANTSEPIRIRRGIFQGDSLSPLWFCMALNPLSWLLNDARGHGFAIKYGLRAKCELTHLMYLDDIKLYAGTDNHLRSLLRIIDMFSRDIRMEFGLDKCRIQAIRKGHHEPHAGHSIGDLHIEAMTETDFYKYLGILQGTHARVGDLKEALLSEFLRRVKLVLKSHLSGKNKMSALNVFAIPSLAYAFGILPWTKTDLENVQRRIRTTMSKFRMHHPKSAVERMNLPRDIGGRGVVDVAAQHHRQVDSLRAYFYSKEQASPLHAAVCKADCGLTPLNLKDRSFNPLSGVKSDQERIEEWKSKAMHGKHVNCLWQPFVDLHLSNRWLCAGELFAEMEGFMCAIQDDVVATRAYKKRIMKERVENDQCRMCGSALETLDHLISGCTVMAPVQYITRHNAVCKVIHQNLAYKHGLITGTCPVYRYEPQAVLDGSAYSMYWDRQVLTDRHTAHNKPDVLLVDKTGRSAYIIVVAIPHNSNIEWKYVEKKVNYEPLAREIKEIWRLERVVVVPIILSATGIVPKFLTASLDVLGLSHSLVQTMQKYTILHTCSMLRGVLDGFSH

SEQ ID NO: 1992 - protein, 1188 aa, Hermetia illucens
MRRRRNLRSGTDNRRESSDLVTGSGSRNGQHGVETASRGAVRRLGATTTRSTAPPAAAVSPQPVATTSAGSRRKRMKWTEEMNLFIIRSYYEITAGAGTTSYRPLLHQRFVERFPQFAHVTVQRVADQYRFITRSDTIPATIRERVRLEVIGETGDRESMGAEAAASTTSRRTAGNRFSTRRSTLLHRPAEVSAEDRDEFQRACIEFSDMDPLHRPGIPRLYASPATPGILSQINDEIASRLCADMSLLQLQSLVYCGAVAAIRLYGQKIRFRVIGLSDKRDPPWKIRLERRRDSLRQDIARLIQISTGSASRRVRNKVQRVYRNYAIPCETPVVEILDTLKQKLSVIYSRLRRYGESYSRRVQNATYARNQRSFFRSLNESQQSAQTIQFSVTEAKEYWGGLWGSPAQHAGHAEWITAEGTRHANTPGMNFADVTEEEVRRAINISKNWRGPGLDRVQNFWYKKFTSVHSRLARSINEVMSRPEEFPPFLTAGITYLIPKKDTVQDPADTRPITCLPTLYKFITSIISGRINAHLETNNILSEEQKGCRVGSRGCKEQLIIDSVVVGQATRGQRNLFSCYIDYAKAFDSVPHTWLIDILHLYRIDPKLIKFLATVMEGWHTTLSVRTSEGANTSEPIRIRRGIFQGDSLSPLWFCMALNPLSWLLNDARGHGFAIKYGLRAKCELTHLMYLDDIKLYAGTDNHLRSLLRIIDMFSRDIRMEFGLDKCRIQAIRKGHHEPHAGHSIGNLHIEAMTETDFYKYLGILQGTHARVGDLKEALLSEFLRRVKLVLKSHLSGKNKISALNVFAIPSLAYAFGILPWTKTDLENVQRRIRTTMSKFRMHHPKSAVERMNLPRDIGGRGVVDVAAQHHRQVDSLRAYFYSKEQASPLHASVCKADCGLTPLNLKDRSFNPLSGVKSDQERIEEWKSKAMHGKHVNCLWQPFVDLHLSNRWLCAGELFAETEGFMCAIQDGVVATRAYKKLIMKERVENDQCRMCGSALETLDHLISGCTVMAPVQYITRHNAVCKVIHQNLAYKHGLITGTCPVYRYEPQAVLDSSAYSMYWDRQVLTDRHTAHNKPDVLLVDKTGRSAYIIDVAIPHNSNIERKYVEKKVNYEPLAREIKEIWRLERVVVVPIILSATGIVPKSLTASLDVLGLSHSLVQTMQKYTILHTCSMLRGVLDGFSH

SEQ ID NO: 1993 - protein, 1193 aa, Hermetia illucens
MHHQKMRRRKNLRSGTDNRRESSDLVTGSGSRNGQHGVETASRGAVRRLGATTTRSTAPPAAAVSPQSVATTSAGSRRKRMKWTEEMNLFIIRSYYEITAGAGTTSYRPLLHQRFVERFPQFAHVTVQRVADQYRFITRSDTIPATIRERVRLEVIGETGDRESMGAEAAASTTPRRTAGNRFSTRRSTLLHRPAEVSAEVRDEFQRACIEFSDMDPLHRPGIPRLYASPATPGILSQINDEIASRLCADMSLLQLQSLVYCGAVAAIRLHGQKIRFRVIGLSDKRDPPWKIRLKRRRDSLRQDIARLIQISTGNASRRVRNKVQRVYRNYAIPCETPVVEILDTLKQKLSVICSRLRRYGESYSRRVQNATYARNQRSFFRSLNESQQSVQTIQFSVTEAKEYWGGLWGLPAQHAEHAEWITAEGTRHANTPGMNFVDVTEEEVRRAINISKNWRGPGLDRVQNFWYKKFTSVHSRLARSINEVMSRPEEFPPFLTAGITYLIPKKDTVQDPADTRPITCLPTLYKFITSIISGRINAHLETNNILSEEQKGCRVGSRGCKEQLIIDSVVVGQATRGQRNLFSCYIDYAKAFDSVPHTWLIDILHLYRIDPKLIKFLATVMEGWHTTLSVRTSEGANTSEPIRIRRGIFQGDSLSPLWFCMALNPLSWLLNDARGHGFAIKYGLRAKCELTHLMYLDDIKLYAGTDNHLRSLLRIIDMFSRDIRMEFGLDKCRIQAIRKGHHEPHAGHSIGDLHIEAMTETDFYKYLGILQGTHARVGDLKEALLSEFLRRVKLVLKSHLSGKNKVSALNVFAIPSLAYAFGILPWTKTDLENVQRRIRTTMSKFRMHHPKSAVERMNLPRDIGGRGVVDVAAQHHRQVDSLRAYFYSKEQASPLHAAVCKADCGLTPLNLKDRSFNPLSGVKSDQERIEEWKSKAMHGKHVNCLWQPFVDLHLSNRWLCAGELFAETEGFMCAIQDGVVATRAYKKLIMKERVENDQCRMCGSALETLDHLISGCTVMAPVQYITRHNAVCKVIHQNLAYKHGLITGTCPVYRYEPQAVLDSSAYSMYWDRQVLTDRHTAHNKTDVLLVDKTGRSAYIIDVAIPHNSNIERKYVEKKVNYEQLAREIKEIWRLERVVVVPIILSATGIVPKSLTASLDVLGLTHSLVQTMQKYTILHTCSMLRGVLDGFSH

SEQ ID NO: 1994 - protein, 1188 aa, Hermetia illucens
MRRRRNLRSGTDNRRESSDLVTGSGSRNGQHGVETASRGAVRRLGATTTRSTAPPAAAVSPQPVAATSAGSRRKRMKWTEEMNLFIIRSYYEITAGAGTTSYRPLLHQRFVERFPQFAHVTVQRVADQYRFITRSDTIPATIRERVRLEVIGETGDRESMGAEAAASTTPRRTAGNRFSTRRSTLLHRPAEVSAEVRDEFQRACIEFSDMDPLHRPGIPRLYASPATPGILSQINDEIASRLCADMSLLQLQSLVYCGAVAAIRLHGQKIRFRVIGLSDKRDPPWKIRLERRRDSLRQDIARLIQISTGSASRRVRNKVQRVYRNYAIPCETPVVEILDTLKQKLSVICSRLRRYGESYSRRVQNATYARNQRSFFRSLNESQQSAQTIQFSVTEAKEYWGGLWGLPAQHAEHAEWITAEGTRHVNTPGMNFADVTEEEVRGAINSSKNWRGPGLDRVQNFWYKKFTSVHSRLARSINEVMSRPEEFPPFLTAGITYLIPKKDTVQDPADTRPITCLPTLYKFITSIISGRINAHLETNNILSEEQKGCRVGSRGCKEQLIIDSVVVGQATRGQRNLFSCYIDYAKAFDSVPHTWLIDILHLYRIDPKLIKFLATVMEGWHTTLSVRTSEGANTSEPIRIRRGIFQGDSLSPLWFCMALNPLSWLLNDARGHGFAIKYGLRAKCELTHLMYLDDIKLYAGTDNHLRSLLRIIDMFSRDIRMQFGLDKCRIQAIRKGHHEPHAGHSIGDLHIEAMTETDFYKYLGILQGTHARVGDLKEALLSEFLRRVKLVLKSHLSGKNKIGALNVFAIPSLAYAFGILPWTKTDLENVQRRIRTTMSKFRMHHPKSAVERMNLPRDIGGRGVVDVAAQHHRQVDSLRAYFYSKEQASPLHAAVCKADCGLTPLNLKDRSFNPLSGVKSDQERIEEWKSKAMHGKHVNCLWQPFVDLHLSNRWLCAGELFAETEGFMCAIQDGVVATRAYKKLIMKERVENDQCRMCGSALETLDHLISGCTVMAPVQYITRHNAVCKVIHQNLAYKHGLITGTCPVYRYEPPAVLDSSAYSMYWDRQVLTDRHTAHNKPDVLLVDKTGRSAYIIDVAIPHNSNIERKYVEKKVNYEPLAREIKEIWRLERVVVVPIILSATGIVPKSLTASLDVLGLSHSLVQTMQKYTILHTCSMLRGVLDGFSH

SEQ ID NO: 1995 - protein, 1023 aa, Hermetia illucens
MGAEAAASTTPRRTAGNRFSTRRSTLLHRPAEVSAEVRDEFQRACIEFSDMDPLHRPGIPRLYASPATPGILSQINDEIASRLCADMSLLQLQSLVYCGAVAAIRLHGQKIRFRVIGLSDKRDPPWKIRLERRRDSLRQDIARLIQISTGNASRRVRNKVQRVYRNYAIPCETSVVEILDTLKQKLSVICSRLRRYGESYSRRVQNATYARNQRSFFRSLNESQQSAQTIQFSVTEAKEYWGGLWGLPAQHAEHAEWITAEGTRHANTPGMNFADVTEEEVRRAINISKNWRGPGLDRVQNFWYKKFTSVHSRLARSINEAMSRPEEFPPFLTAGITYLIPKKDTVQDPADTRPITCLPTLYKFITSIISGRINAHLETNNILSEEQKGCRVGSRGCKEQLIIDSVVVGQATRGQRNLFSCYIDYAKAFDSVPHTWLIDILHLYRIDPKLIKFLATTTLSVCTSEGANTSEPIRIRRGIFQGGSLTPLWFCMALNPLSWLLNDARVHGFAIKYGLRAKCELAHLMYLDDIKLYAGTDDHLRSLLRIIDMFSRDIRMEFGLDKCRIQAIRKGHHEPHAGHSIGDLHIEAMTETDFYKYLGILQGTHARVGDLKEALLSEFLRRVKLVLKSHLSGKNKISALNAFAIPSLAYAFGILPWTKTDLENVQRRIRTTMSKFRMHHPKSAVERMNLPRDIGGRGVVDVAAQHHRQVDSLRAYFYSKEQTSPLHAAVCKADCGLTPLNLKDRSFNPLSGVKSDQERIEEWKSKAMHGKHVNCLWQPFVDLHLSNRWLCAGELFAETEEFMCAIQDGVVATRAYKKLIMKERVENDQCRMCGSALETLDHLISGCTVMAPVQYITRHNAVCKVIHQNLAYKHGLITGTCPVYRYEQQAVLDSSAYSMYWDRQVLTDRHTAHNKPDVLLVDKTGRSAYIIDVAIPHNSNIEGKYVEKKVNYELLAREIKEIWRLERVVVVPIILSATGIVPKSLTASLDVLGLSHSLVQTMQKYTILHTCSMLRGVLDGFSH

SEQ ID NO: 1996 - protein, 1188 aa, Hermetia illucens
MRRRRNLRSGTDNRRESSDLVTGSGSRNGQHGVETASRGAVRRLGATTTRSTAPPAAAVSPQPVATTSAGSRRKRMKWTEEMNLFIIRSYYEITAGAGTTSYRPLLHQRFVERFPQFAHVTVQRVADQYRFITRSDTIPATIRERVRLEVIGETGDRESMGAEAAASTTPRRTAGNRFSTRRSTLLHRPAEVSAEVRDEFQRACIEFSDMDPLHRPGIPRLYASPATPGILSQINDEIASRLCADMSLLQLQSLVYCGAVAAIRLHGQKIRFRVIGLSDKRDPPWKIRLERRRDSLRQDIARLIQISTGNASRRVRNKVQRVYRNYAIPCETPVVEILDTLKQKLSVICSRLRRYGESYSRRVQNATYARNQRSFFRSLNESQQSAQTIQFSVTEAKEYWGGLWGLPAQHAEHAEWITAEGTRHVNTPGMNFADVTEEEVRGAINSSKNWRGPGLDRVQNFWYKKFTSVHSRLARSINEVMSRPEEFPPFLTAGITYLIPKKDTVQDPADTRPITCLPTLYKFITSIISGRINAHLETNNILSEEQKGCRVGSRGCKEQLIIDSVVVGQATRGQRNLFSCYIDYAKAFDSVPHTWLIDILHLYRIDPKLIKFLATVMEGWHTTLSVRTSEGANTSEPIRIRRGIFQGDSLSPLWFCMALNPLSWLLNDARGHGFAIKYGLRAKCELTHLMYLDDIKLYAGTDNHLRSLLRIIDMFSRDIRMEFGLDKCRIQAIRKGHHEPHAGHSIGDLHIEAMTETDFYKYLGILQGTHARVGDLKEALLSEFLRRVKLVLKSHLSGKNKIGALNVFAIPSLAYAFGILPWTKTDLENVQRRIRTTMSKFRMHHPKSAVERMNLPRDIGGRGVVDVAAQHHRQVDSLRAYFYSKEQASPLHAAVCKADCGLTPLNLKDRSFNPLSGVKSDQERIEEWKSKAMHGKHVNCLWQPFVDLHLSNRWLCAGELFAETEGFMCAIQDGVVATRAYKKLIMKERVENDQCRMCGSALETLDHLISGCTVMAPVQYITRHNAVCKVIHQNLAYKHGLITGTCPVYRYEPQAVLDSSAYSMYWDRQVLTDRHTAHNKPDVLLVDKTGRSAYIIDVAIPHNSNIERKYVEKKVNYEPLAREIKEIWRLERVVVVPIILSATGIVPKSLTASLDVLGLSHSLVQTMQKYTILHTCSMLRGVLDGFSH

SEQ ID NO: 1997 - protein, 1026 aa, Hermetia illucens
MGAEAAASTTPRRTAGNRFSTRRSTLLHRPAEVSAEVRDEFQRACMEFSDMDPLHRPGIPRLYASPATPGILSQINDEIASRLCADMSLLQLQSLVYCGAVAAIRLHGQKIRFRVIGLSDKRDPPWKIRLEHRRDSLRQDIARLIQISTGNASRRVRNKVQRVYRNYAIPCETPVVEILDTLKQKLSVICSRLRRYGESYSRRVQNATYARNQRSFFRSLNESQQSAQTIQFSVTEAKEYWGGLWGLPAQHAEWITAEGTRHANTPGMNFADVTEEEVRRAINISKNWRGPGLDRVQNFWYKKFTSVHSRLARSINEVMSRPEEFPPFLTAGITYLIPKKDTVQDPADTRPITCLPTLYKFITSIISGRINAHLETNNILSEEQKGCRVGSRGCKEQLIIDSVVVGQATRGQRNLFSCYIDYAKAFDSVPHTWLIDILHLYRIDPKLIKFLATVMEGWHTTLSVRTSEGANTSEPIRIRRGIFQGDSLSPLWFCMALNPLSWLLNDARGHGFAIKYGLRAKCELTHLMYLDDIKLYAGTDNHLRSLLRIIDMFSRDIRMEFGLDKCRIQAIRKGHHEPHAGHSIGDLHIEAMTETDFYKYLGILQGTHARVGDLKEALLSEFLRRVKLVLKSHLSGKNKISALNVFAIPSLAYAFGILPWTKTDLENVQRRIRTTMSKFRMHHPKSAVERMNLPRDIGGRVVVDVAAQHHRQVDSLRAYFYSKEQASPLHAAVCKADCGLTPLNLKDRSFNPLSGVKSDQERIEEWKSKAMHGKHVNCLWQPFVDLHMSNRWLCAGELFAETEGFMCAIQDGVVATRAYKKLIMKERVENDQCRMCGSALETLDHLISGCTVMAPVQYITRHNAVCKVIHQNLAYKHGLITGTCPVYRYEPQAVLDSSAYSMYWDRQVLTDRHTAHNKPDVLLVDKTGRSAYIIDVAIPHNSNIERKYVEKKVNYEPLAREIKEIWRLERVVVVPIILSATGIVPKSLTASLDVLGLSHSLVQTMQKYTILHTCSMLRGVLDGFSH

SEQ ID NO: 1998 - protein, 759 aa, Hermetia illucens
MNFADVTEEEVRRAINISKNWRGPGLDRVQNFWYKKFTSVHSRLARSINEVMSRPEEFPPFLTAGITYLIPKKDTVQDPADTRPITCLPTLYKFITSIISGRINAHLETNNILSEEQKGCRVGSRGCKEQLIIDSVVVGQATRGQRNLFSCYIDYAKAFDSVPHTWLIDILHLYRIDPKLIKFLATVMEGWHTTLSVRTSEVANTSEPIRIRKGIFQGDSLSPLWFCMALNPLSWLLNDARGHGFAIKYGLRAKCELTHLMYLDDIKLYAGTDNHLRSLLRIIDMFSRDIRMEFGLDKCRIQAIRKGHHEPHAGHSIGDLHIEAMTETDFYKYLGILQGTHARVGDLKEALLSEFLRRVKLVLKSHLSGKNKISALNVFAIPSLAYAFGILPWTKTDLENVQRRIRTTMSKFRMHHPKSAVERMNLPRDIGGRGVVDVAAQHHRQVDSLRAYFYSKEQASPLHAAVCKADCGLTPLNLKDRSFNPLSGVKSDQERIEEWKSKAMHGKHVNCLWQPFVDLHLSNRWLCAGELFAETEGFMCAIQDGVVATRAYKKLIMKERVENDQCRMCGSALETLDHLISGCTVMAPVQYITRHNAVCKVIHQNLAYKHGLITGTCPVYRYEPQAVLDSSAYSMYWDRQVLTDRHTAHNKPDVLLVDKTGRSAYIIDVAIPHNSNIERKYVEKKVNYEPLAREIKEIWRLERVVVVPIILSATGIVPKSLTASLDVLGLSHSLVQTMQKYTILHTCSMLRGVLDGFSH

SEQ ID NO: 1999 - protein, 1029 aa, Hermetia illucens
MGAEAAASTTPRRTAGNRFSTRRSTLLHRPAEVSAEVRDEFQRACIEFSDMDPLHRPGIPRLYASPATPGILSQINDEIASRLCADMSLLQLQSLVYCGAVAAIRLHGQKIRFRVIGLSDKRDPPWKIRLERRRDSLRQDIARLIQISTGNASRRVRNKVQRVYRNYAIPCETPVVEILDTLKQKLSVICSRLRRYGESYSRRVQNTTYARNQRSFFRSLNESQQSAQTIQFSVTEAKEYWGGLWGLPAQHAEHAEWITAEGTRHANTPGMNFADVTEEEVRRAINISKNWRGPGLDRVQNFWYKKFTSVHSRLARSINEVMSRPEEFPPFLTAGITYLIPKKDTVQDPADTRPITCLPTLYKFITSIISGRINAHLETNNILSEEQKGCRVGSRGCKEQLIIDSVVVGQATRGQRNLFSCYIDYAKAFDSVPHTWLIDILHLYRIDPKLIKFLATVMEGWHTTLSVRTSEGANTSEPIRIRRGIFQGDSLSPLWFCMALNPLSWLLNDARGHGFAIKYGLRAKCELTHLMYLDDIKLYAGTDNHLRSLLRIIDMFSRDIRMEFGLDKCRIQAIRKGHHEPHAGHSIGDLHIEAMTETDFYKYLGILQGTHARVGDLKEALLSEFLRRVKLVLKSHLSGKNKISALNVFAIPSLAYAFGILPWTKTDLENVQRRIRTTMSKFRMHHPKSAVERMNLPRDIGGRGVVDVAAQHHRQVDSLRAYFYSKEQASPLHAAVCKADCGLTPLNLKDRSFNPLSGVKSDQERIEEWKSKAMHGKHVNCLWQPFVDLHLSNRWLCAGELFAETEGFMCAIQDGVVATRAYKKLIMKERVENDQCRMCGSALETLDHLISGCTVMAPVQYITRHNAVCKVIHQNLAYKHGLITGTCPVYRYEPQAVLDSSAYSMYWDRQVLTDRHTAHNKPDVLLVDKTGRSAYIIDVAIPHNSNIERKYVEKKVNYEPLAREIKEIWRLERVVVVPIILSATGIVPKSLTASLDVLGLSHSLVQTMQKYTILHTCSMLRGVLDGFSH

SEQ ID NO: 2000 - protein, 1193 aa, Hermetia illucens
MHHQKMRRRRNLRSGTDNRRESSDLVTGSGSRNGQHGVETASRGAVRRLGATTTRSTAPPAAAVSPQSVATTSAGSRRKRMKWTEEMNLFIIRSYYEITAGAGTTSYRPLLHQRFVERFPQFAHVTVQRVADQYRFITRSDTIPATIRERVRLEVIGETGDRESMGAEAAASTTPRRTAGNRFSTRRSTLLHRPAEVSAEVRDEFQRACIEFSDMDPLHRPGIPRLYASPATPGILSQINDEIASRLCADMSLLQLQSLVYCGAVAAIRLHGQKIRFRVIGLSDKRDPPWKIRLERRRDSLRQDIARLIQISTGNASRRVRNKVQRVYRNYAIPCETPVVEILDTLKQKLSVICSRLRRYGESYSRRVQNATYARNQRSFFRSLNESQQSAQTIQFSVTEAKEYWGGLWGLPAQHAEHAEWITAEGTRHVNTPGMNFADVTEEEVRGAINSSKNWRGPGLDRVQNFWYKKFTSVHSRLARSINEVMSRPEEFPPFLTAGITYLIPKKDTVQDPADTRPITCLPTLYKFITSIISGRINAHLETNNILSEEQKGCRVGSKGCKEQLIIDSVVVGQATRGQRNLFSCYIDYAKAFDSVPHTWLIDILHLYRIDPKLIKFLATVMEGWHTTLTVRTSEGANTSEPIRIRRGIFQGDSLSPLWFCMALNPLSWLLNDARGHGFAIKYGLRAKCELTHLMYLDDIKLYAGTDNHLRSLLRIIDMFSRDIRMEFGLDKCRIQAIRKGHHEPHAGHSIGDLHIEAMTETDFYKYLGILQGTHARVGDLKEALLSEFLRRVKLVLKSHLSGKNKISALNVFAIPSLAYAFGILPWTKTDLENVQRRIRTTMSKFRMHHPKSAVERMNLPRDIGGRGVVDVAAQHHRQVDSLRAYFYSKEQASPLHAAVCKADCGLTPLNLKDRSFNPLSGVKSDQERIEEWKSKAMHGKHVNCLWQPFVDLHLSNRWLCAGELFAETEGFMCAIQDGVVATRAYKKLIMKERVENDQCRMCGSALETLDHLISGCTVMAPVQYITRHNAVCKVIHQNLAYKHGLITGTCPVYRYEPQAVLDSSAYSMYWDRQVLTDRHTAHNKPDVLLVDKTGRSAYIIDVAIPHNSNIERKYVEKKVNYEPLAREIKEIWRLERVIVVPIILSATGIVPKSLTASLDVLGLSHSLVQTMQKYTILHTCSMLRGVLDGFSH

SEQ ID NO: 2001 - protein, 1193 aa, Hermetia illucens
MHHQKMRRRRNLRSGTDNRRESSDLVTGSGSRNGQHGVETASRGAVRRLGATTTRSTAPPAAAVSPQSVATTSAGSRRKRMKWTEEMNLFIIRSYYEITAGAGTTSYRPLLHQRFVERFPQFAHVTVQRVADQYRFITRSDTIPATIRERVRLEVIGETGDRESMGAEAAASTTPRRTAGNRFSTRRSTLLHRPAEVSAEVRDEFQRACIEFSDMDPLHRPGIPRLYASPATPGILSQINDEIASRLCADMSLLQLQSLVYCGAVAAIRLHGQKIRFRVIGLSDKRDPPWKIRLERRRDSLRQDIARLIQISTGNASRRVRNKVQRVYRNYAIPCETPVVEILDTLKQKLSVICSRLRRYGESYSRRVQNATYARNQRSFFRSLNESQQSAQTIQFSVTEAKEYWGGLWGLPAQHAEHAEWITAEGTRYVNTPGMNFADVTEEEVRGAINSSKNWRGPGLDRVQNFWYKKFTSVHSRLARSINEVMSRPEEFPPFLTAGITYLIPKKDTVQDPADTRPITCLPTLYKFITSIISGRINAHLETNNILSEEQKGCRVGSRGCKEQLIIDSVVVGQATRGQRNLFSCYIDYAKAFDSVPHTWLIDILHLYRIDPKLIKFLATVMEGWHTTLSVRTSEGANTSEPIRIRRGIFQGDSLSPLWFCMALNPLSWLLNDARGHGFAIKYGLRAKCELTHLMYLDDIKLYAGTDNHLRSLLRIIDMFSRDIRMEFGLDKCRIQAIRKGHHEPHAGHSIGDLHIEAMTETDFYKYLGILQGTHARVGDLKEALLSEFLRRVKLVLKSHLSGKNKISALNVFAIPSLAYAFGILPWTKTDLENVQRRIRTTMSKFRMHHPKSAVERMNLPRDIGGRGVVDVAAQHHRQVDSLRAYFYSKEQASPLHAAVCKADCGLTPLNLKDRSFNPLSGVKSDQERIEEWKSKAMHGKHVNCLWQPFVDLHLSNRWLCAGELFAETEGFMCAIQDGVVATRAYKKLIMKERVENDQCRMCGSALETLDHLISGCTVMAPVQYITRHNAVCKVIHQNLAYKHGLITGTCPVYRYEPQAVLDSSAYSMYWDRQVLTDRHTAHNKPDVLLVDKTGRSAYIIDVAIPHNSNIERKYVEKKVNYEPLAREIKEIWRLERVVVVPIILSATGIVPKSLTASLDVLGLSHSLVQTMQKYTILHTCSMLRGVLDGFSH

SEQ ID NO: 2002 - protein, 1101 aa, Hermetia illucens
MRRRRNLRSGTDNRRESSDLVTGSGSRNGQHGVKTASRGAVRRLGATTTRSTAPPAAAVSPQSVATIGETGDRESMGAEAAASTTPRRTAGNSFSTRRSTLLHRPAEVSAEVRDEFQRASMEFSDMDPLHRPGIPRLYASPATPGILSQINDEIAPRLCADMSLLQLQSLVYCGAVAAIRLHGQKIRFHVIGLSDKRDPPWKIRLERRRDSLRQGIARLIQISTGNASRRVRNKVQRVYRNYGIPCETPVVEILDTLKQKLSVICSRLRRYGESYSRRVQNATYAMNQRSFFRSLNEFQQSAQTIQFSVTEAKEYWGGLWGLPAQHAEWITAEGTRHANTPGINFADVTEEEVRRAINSSKNWRGPGLDRVQNFWYKKFTSVHSRLARSINEVMSRPEEFPPFLTAGITYLIPKKDTVQDPADIRPITCLPTLYKFITSIISGRINAHLETNNILSEEQKGCRVGSRGCKEQLIIDSVVVGQATRGQRNLFSCYIDYAKAFDSVPHTWLIDILHLYRIDPKLIKFLATVMEGWHTTLSVRTSEGANTSEPIRIRRGIFQGDSLSPLWFCMALNPLSWLLNDARGHGFAIKYGLRAKCELTHLMYLDDIKLYASTDDHLRSLLRIIDMFSPDIRMEFGLDKCRIQAIHKGHHEPHAGHSIGDLHIEAMTETDFYKYLGILQGTHARVGDLKEALQSEFLRRAKLVLKSHLSEKNKISALNVFAIPSLAYAFGILPWTKTDLENVQRRIRTTMSKFRMHHPKSAVERMNLPRDIGGRGVVDVAAQHHRQVEALRAYFYSKEQASPLHAAVCKADCGLTPLNLKDRSFNPLSGVKSDQERIDEWKSKAMHGKHVNCLWQPFVDLHLSNRWLCAAELFAETEGFMCAIQDGVVATRAYKKLIMKERVENDQCRMCGSALETLDHLISGCTVMAPVQYITSHNAVCKVIHQNLAYKHGLITGICPVYRYEPQAVLDNSAYSMYWDRQVLTDRHTALNKPDVLLVDKTGRSAYIIDVAIPHNSNIERKYVEKKVNYEPLAREIKEIWRLERVVVLPIILSATGIVPKSLTASLDVLGLSHSLVQTVQKYTILHTCSMLRGVLDGFSH

SEQ ID NO: 2003 - protein, 1188 aa, Hermetia illucens
MRRKRNLRSGTDNRRESSDLVTGSGSRNGQHGVETASRGAVRRLGATTTRSTAPPAAAVSPQSVATTSAGSRRKRMKWTEEMNLFIIRSYYEITAGAGITSYRPLLHQRFVERFPQFAHVTVQRVADQYRFITRSDTIPATIRERVRLEVIGETGDRESMGAEAAASTTPRRTAGNRFSTRRSTLLHRPAEVSAEVRDEFQRACIEFSDMDPLHRPGIPRLYASPATPGILSQINDEIASRLCADMSLLQLQSLVYCGAVAAIRLHGQKIRFRVIGLSDKRDPPWKIRLERRRDSLRQDIARLIQISTGNASRRVRNKVQRVYRNYAIPCETPVVEILDTLKQKLSVICSRLRRYGESYSRRVQNATYARNQRSFFRSLNESQQSAQTIQFSVTEAKEYWGGLWGLPAQHAEHAEWITAEGTRHANTPGMNFADVTEEEVRRAINISKNWRGPGLDRVQNFWYKKFTSVHSRLARSINEVMSRPEEFPPFLTAGITYLIPKKDTVQDPADTRPITCLPTLYKFITSIISGRINAHLETNNILSEEQKGCRVGSRGCKEQLIIDSVVVGQATRSQRNLFSCYIDYAKAFDSVPHTWLIDILHLYRIDPKLIKFLATVMEGWHTTLSVRTSEGANTSEPIRIRRGIFQGDSLSPLWFCMALNPLSWLLNDARGHGFAIKYGLRAKCELTHLMYLDDIKLYAGTDNHLRSLLRIIDMFSRDIRMEFGLDKCRIQAIRKGHHEPHAGHSIGDLHIEAMTETDFYKYLGILQGTHARVGDLKEALLSEFLRRVKLVLKSHLSGKNKISALNVFAIPSLAYAFGILPWTKTDLENVQRRIRTTMSKFRMHHPKSAVERMNLPRDIGGRGVVDVAAQHHRQVDSLRAYFYSKEQASPLHAAVCKADCGLTPLNLKDRSFNPLSGVKSDQERIEEWKSKAMHGKHVNCLWQPFVDLHLSNRWLCAGELFAETEGFMCAIQDGVVATRAYKKLIMKERVENDQCRMCGSALETLDHLISGCTVMAPVQYITRHNAVCKVIHQNLAYKHGLITGTCPVYRYEPQAVLDSSAYSMYWDRQVLTDRHTAHNKPDVLLVDKTGRSAYIIDVAIPHNSNIERKYVEKKVNYEPLAREIKEIWRLERVVVVPIILSATGIVPKSLTASLDVLGLSHSLVQTMQKYTILHTCSMLRGVLDGFSH

SEQ ID NO: 2004 - protein, 1029 aa, Hermetia illucens
MGAEAAASTTPRRTAGNRFSTRRSTLLHRPAEVSAEVRDEFQRACIEFSDMDPLHRPGIPRLYASPATPGILSQINDEIASRLCTDMSLLQLQSLVYCGAVAAIRLHGQKIRFRVIGLSDKRDPPWKIRLERRRDSLRQDIARLIQISTGSASRRVRNKVQRVYRNYAIPCETPVVEILDTLKQKLSVICSRLRRYGESYSRRVQNATYARNQRSFFRSLNESQQSVQTIQFSVTEAQEYWGGLWELPAQHAEHAEWITAEGTRHANTPGMNFADVTEEEVRRAINSSKNWRGPGLDRVQNFWYKKFTSVHSRLARSINEVMSRPEEFPPFLTAGITYFIPKKDTVQDPADTRPITCLPTLYKFITSIISGRINAHLETNNILSEEQKGCRVGSRGCKEQRIIDSVAVGQATRGQRNLFSCYVDYAKAFDSVPHTWLIDILHLYRIDPKLIKFLATVMEGWHTTLSVRTYEGANTSEPIRIRRGIFQGDSLSPLWFCMALNPLSWLLNDARGHGFAIKYGLRAKCELTHLMYLDDIKLYAGTDDHLRSLLRIIDMFSRDIQMEFGLDKCRIQAIRKGHHEPHAGHSIGDLHIEAMTETDFYKYLGILQGTHARVGDLKEGLLSEFLRRVKLVLKSHLSGKNKISALNVFAIPSLAYAFGILPWTKTDLENVQRRIRTTMSKFRMHHPKSAVERMNLPRDIGGRGVVDVAAQHHRQVDSLRACFYSKEQASPLHAAVCKADCGLTPLNLKDRSFNPLSGVKSDQERIDEWKSKAMHGKHVNCLWQPFVDLHLSNRWLCDGEFFAETEGFMCAIQDGVVATRAYKKLIMKERVENDQCRMCGSALETLDHLISGCTVMAPVQYITRHNAACKVIHQNLAYKHGLIMGTCPVYRYEPQAVLDSSAYSMYWDRQVLTDRHTAHNKPDVLLVDKTGRSAYIIDVAIPHNSNIERKYVEKKVNYEPLAREIKEIWRLERVVVVPIILSATGIVPKSLTASLDVLGPSHSLVQTMQKYTILHTCSMLRGVLDGFSH

SEQ ID NO: 2005 - protein, 1193 aa, Hermetia illucens
MHHQKMRRRRNLRSGTDNRRESSDLVTGSGSRNGQHGVETASRGAVPRLGATTTRSTAPPAAAVSPQSVATTSAGSRRKRMKWTEEMNLFIIRSYYEITAGAGTTSYRPLLHQRFVERFPQFAHVTVQRVADQYRFITRSDTIPATIRERVRLEVIGETGDRESMGAEAAASTTPRRTAGNRFSTRRSTLLHRPAEVSAEVRDEFQRACIEFSDMDPLHRPGIPRLYASPATPGILSQVNDEIASRLCADMSLLQLQSLVYCGAVAAIRLHGQKIRFRVIGLSDKRDPPWKIRLERRRDSLRQDIARLIQISTGNASRRVRNKVQRVYRNYAIPCETPVVEILDTLKQKLSVICSRLRRYGESYSRRVQNATYARNQRSFFRSLNESQQSAQTIQFSVTEAKEYWGGLWGLPAQHAEHAEWITAEGTRHANTPGMNFADVTEEEVRRAINISKNWRGPGLDRVQNFWYKKFTSVHSRLARSINEVMSRPEEFPPFLTAGITYLIPKKDTVQDPADTRPITCLPTLYKFITSIISGRINAHLETNNILSEEQKGCRVGSRGCKEQLIIDSVVVGQATRGQRNLFSCYIDYAKAFDSVPHTWLIDILHLYRIDPKLIKFLATVMEGWHTTLSVRTSEGANTSEPIRIRRGIFQGDSLSPLWFCVALNPLSWLLNDARGHGFAIKYGLRAKCELTHLMYLDDIKLYAGTDNHLRSLLRIIDMFSRDIRMEFGLDKCRIQAIRKGHHEPHAGHSIGDLHIEAMTETDFYKYLGILQGTHARVGDLKEALLSEFLRRVKLVLKSHLSGKNKISALNVFAIPSLAYAFGILPWTKTDLENVQRRIRTTMSKFRMHHPKSAVERMNLPRDIGGRGVVDVAAQHHRQVDSLRAYFYSKEQASPLHAAVCKADCGLTPLNLKDRSFNPLSGVKSDQERIEEWKSKAMHGKHVNCLWQPFVDLHLSNRWLCAGELFAETEGFMCAIQDGVVATRAYKKLIMKERVENDQCRMCGSALETLDHLISGCTVMAPVQYITRHNAVCKVIHQNLAYKHGLITGTCPVYRYEPQAVLDSSAYSMYWDRQVLTDRHTAHNKPDVLLVDKTGRSAYIIDVAIPHNSNIERKYVEKKVNYEPLAREIKEIWRLERVVVVPIILSATCIVPKSLTASLDVLGLSHSLVQTMQKYTILHTCSMLRGVLDGFSH

SEQ ID NO: 2006 - protein, 959 aa, Hermetia illucens
MGAEAAASTTPRRTAGNRFSTRRSTLLHRPAEVSAEVRDEFQRACMEFSDMDPFHRPGIPRFYVSPVTPGILSQINDEIASRLCADMSLLQLQSLVYCGAVAAIRLHGQKIRFRVIGLSDKRDPPWKIRLERRRDSLRQDIARLIQISTGSASRRVRNKVQRVYRNYAIPCETPVVEILDTLKQKLSVICSRVRRYGESYSRRVQNATYARNQRSFFRSLNESQQSAQTIQFSVTEAKEYWGGLWGLPAQHAEWITTESTRHANTPGMNFADVTEEEVRRAINSSKNWRGPGLDQVQNFWYKKFTSVHSRLARSINEVMSRPEEFPPFLTAGITYLIPKKDTVQDPADTRPITSLPTLYKFITSIISGRINAHLETNNILSEEQKDCRVGSRGCKEQLIIDSVVVGQTTRGQRNLFSCYIDYAKAFGSVPHTWLIDILHLYRIDPKLIKFLATVMEGWHTTLSVRIRRGIFQGDSLSPLWFCMALNPLSWLLNDARGHDFAIKYGLRAKCELTHLMYLDDIKLYAGTNNHLRSLLRIIDMFSHDIRMEFGLDKCRIQAIRKGHHEPHAGHSIGDLHIEAMTETDFYKYLGILQGTHARVGDLKEALLSEFLRRVKLVLKSHLSGKNKISALNVFAIPSLAYAFGILPWTKTDLENVQRRIRTTMSKFRMHHPKSAVERMNLPRDIGGRGVVDVAAQHHRQVDSLRAYFYSKEQASPLHAAVCKADYGLTPLNLKDPSFNPLSGLKSDQERIDEWKSKAMHGKYVNCLWQPFVDLHLSNRWLCAGELFAETEGFMCAIQDDVVATRAYKKLIMKERVENDQCRMCGSALETLDHLISGCTVMAPVQYITRHNAVCKVIHQNLAYKHGLITGTCPVYRYEPQAVLDSSAYSMYWDRQILTDRHTAHNKPDILLVDKTGRSAYIIDVAIPHNCNIERKYVEKKVNYEPLAREIKEIWRLEWL

SEQ ID NO: 2007 - protein, 1188 aa, Hermetia illucens
MRRKRNLRSGTDNRRESSDLVTGSGSRNGQHGVETASRGAVRRLGATTTRSTAPPAAAVSPQSVATTSAGSRRKRMKWTEEMNLFIIRSYYEITAGAGITSYRPLLHQRFVERFPQFAHVTVQRVADQYRFITRSDTIPATIRERVRLEVIGETGDRESMGAEAAASTTPRRTAGNRFSTRRSTLLHRPAEVSAEVRDEFQRACIEFSDMDPLHRPGIPRLYASPATPGILSQINDEIASRLCADMSLLQLQSLVYCGAVAAIRLHGQKIRFRVIGLSDKRDPPWKIRLERRRDSLRQDIARLIQISTGNASRRVRNKVQRVYRNYAIPCETPVVEILDTLKQKLSVICSRLRRYGESYSRRVQNATYARNQRSFFRSLNESQQSAQTIQFSVTEAKEYWGGLWGLPAQHAEHAEWITAEGTRHVNTPGMNFADVTEEEVRRAINISKNWRGPGLDRVQNFWYKKFTSVHSRLARSINEVMSRPEEFPPFLTAGITYLIPKKDTVQDPADTRPITCLPTLYKFITSIISGRINAHLETNNILSEEQKGCRVGSRGCKEQLIIDSVVVGQATRGQRNLFSCYIDYAKAFDSVPHTWLIDILHLYRIDPKLIKFLATVMEGWHTTLSVRTSEGANTSESIRIRRGIFQGDSLSPLWFCMALNPLSWLLNDARGHGFAIKYGLRAKCELTHLMYLDDIKLYAGTDNHLRSLLRIIDMFSRDIRMEFGLDKCRIQAIRKGHHEPHAGHSIGDLHIEAMIETDFYKYLGILQGTHARVGDLKEALLSEFLRRVKLVLKSHLSGKNKISALNVFAIPSLAYAFGILPWTKTDLENVQRRIRTTMSKFRMHHPKSAVERMNLPRDIGGRGVVDVAAQHHRQVDSLRAYFYSKEQASPLHAAVCKADCGLTPLNLKDRSFNPLSGVKSDQERIEEWKSKAMHGKHVNCLWQPFVDLHLSNRWLCAGELFAETEGFMCAIQDGVVATRAYKKLIMKERVENDQCRMCGSALETLDHLISGCTVMAPVQYITRHNAVCKVIHQNLAYKHGLITGTCPVYRYEPQAVLDSSAYSMYWDRQVLTDRHTAHNKPDVLLVDKTGRSAYIIDVAIPHNSNIERKYVEKKVNYEPLAREIKEIWRLERVVVVPIILSATGIVPKSLTASLDVLGLSHSLVQTMQKYTILHTCSMLRGVLDGFSH

SEQ ID NO: 2008 - protein, 1188 aa, Hermetia illucens
MRRRRNLRSGTDNRRESSDLVTGSGSRNGQHGVDTASRGAVRLLGATTTRSTAPPAAAVSPQPVATTSAGSRRKRMKWTEEMNLFIIRSYYEITAGAGTTSYRPLLHQRFVERFPQFAHVTVQRVADQYRFITRSDTIPATIRERVRLEVIGETGDRESMGAEAAASTTSRRTAGNRFSTRRSTLLHRPAEVSAEVRDEFQRACIEFSDMDPLHRPGIPRLYASPATPGILSQINDEIASRLCADMSLLQLQSLVYCGAVAAIRLHGQKIRFRVIGLSDKRDPPWKIRLERRRDSLRQDIARLIQISTGNASRRVRNKVQRVYRNYAIPCETPVVEILDTLKQKLSVICSRLRRYGESYSRRVQNATYARNQRSFFRSLNESQQSAQTIQFSVTEAKEYWGGLWGLPAQHAEHAEWITAEGTRHVNTPGMNFADVTEEEVRRAINSSKNWRGPGLDRVQNFWYKKFTSIHSRLARSINEVMSRPEEFPPFLTAGITYLIPKKDTVQDPADTRPITCLPTLYKFITSIISGRINAHLETNNILSEEQKGCRVGSRGCKEQLIIDSVVVGQATRGQRNLFSCYIDYAKAFDSVPHTWLIDILHLYRIDPKLIKFLATVMEGWHTTLSVRTSEAANTSEPIRIRRGIFQGDSLSPLWFCMALNPLSWLLNDARGHGFAIKYGLRAKCELTHFMYLDDIKLYAGTDNHLRSLLRIIDMFSRDIRMEFGLDKCRIQAIRKGHHEPHAGHSIGDLHIEAMTETDFYKYLGILQGTHARVGDLKEALLSEFLRRVKLVLKSHLSGKNKISALNVFAIPSLAYAFGILPWTKTDLENVQRRIRTTMSKFRMHHPKSAVERMNLPRDIGGRGVVDVAAQHHRQVDSLRAYFYSKEQASPLHAAVCKADCGLTPLNLKDRSFNPLSGVKSDQERIEEWKSKAMHGKHVNCLWQPFVDLHLSNRWLCAGELFAETEGFMCAIQDGVVATRAYKKLIMKERVENDQCRMCGSALETLDHLISGCTVMAPVQYITRHNAVCKVIHQNLAYKHGLIAGTCPVYRYEPQAVLDSSAYSMYCDRQVLTDRHTAHNKPDVLLVDKTGRSAYIIDVAIPHNSNIERKYVEKKVNYEPLAREIKEIWRLERVVVVPIILSATGIVPKSLTASLDVLGLSHSLVQTMQKYTILHTCSMLRGVLDGFSH

SEQ ID NO: 2009 - protein, 1193 aa, Hermetia illucens
MHHQKMRRRRNLRSGTDNRRESSDLVTGSGSRNGQHGVETASRGAVRRLGATTTRSTAPPAAAVSPQSVATTSAGSRRKRMKWTEEMNLFIIRSYYEITAGAGTTSYRPLLHQRFVERFPQFAHVTVQRVADQYRFITRSDTIPATIRERVRLEVIGETGDRESMGAEAAASTTSRRTAGNRFSTRRSTLLHRPAEVSAEVRDEFQRACIEFSDMDPLHRPGIPRLYASPATPGILSQINDEIASRLCADMSLLQLQSLVYCGAVAAIRLHGQKIRFRVIGLSDKRDPPWKIRLERRRDSLRQDIARLIQISTGNASRRVRNKVQRVYRNYAIPCETPVVEILDTLKQKLSVICSRLRRYGESYSRRVQNATYARNQRSFFRSLNESQQSAQTIQFSVTEAKEYWGGLWGLPAQHAEHAEWITAEGTRHVNTPGMNFADVTEEEVRGAINSSKNWRGPGLDRVQNFWYKKFTSVHSRLARSINEVMSRPEEFPPFLTAGITYLIPKKDTVQDPADTRPITCLPTLYKFITSIISGRINAHLETNNILSEEQKGCRVGSRGCKEQLIIDSVVVGQATRGQRNLFSCYIDYAKAFDSVPHTWLIDILHLYRIDPKLIKFLATVMEGWHTTLSVRTSEGANTSEPIRIRRGIFQGDSLSPLWFCMALNPLSWLLNDARGHGFAIKYGLRAKCELTHLMYLDDIKLYAGTDNHLRSLLRIIDMFSRDIRMEFGLDKCRIQAIRKGHHEPHAGHSIGDLHIEAMTETDFYKYLGILQGTHARVGDLKEALLSEFLRRVKLVLKSHLSGKNKISALNVFAIPSLAYAFGILPWTKTDLENVQRRIRTTMSKFRMHHPKSAVERMNLPRDIGGRGVVDVAAQHHRQVDSLRAYFYSKEQASPLHAAVCKADCGLTPLNLKDRSFNPLSGVKSDQERIEEWKSKAMHGKHVNCLWQPFVDLHLSNRWLCAGELFAETEGFMCAIQDGVVATRAYKKLIMKERVENDQCRMCGSALETLDHLISGCTVMAPVQYITRHNAVCKVIHQNLAYKHGLITGTCPVYRYEPQAVLDSSAYSMYWDRQVLTDRHTAHNKPDVLLVDKTGRSAYIIDVAIPHNSNIERKYVEKKVNYEPLAREIKEIWRLERVVVVPIILSATGIVPKSLTASLDVLGLSHSLVQTMQKYTILHTCSMLRGVLDGFSH

SEQ ID NO: 2010 - protein, 1193 aa, Hermetia illucens
MHHQKVRRRKNLRSGTDNRRESSDLVTGSGSRNGQHGVETASRGAVQRLGATTTRSTAPPAEAVSPQSVATTSAGSRRKRMKWTEEMNLFIIRSYYEITAGAGTTSYRPLLHQRFVERFPQFAHVTVQRVADQYRFITRSDTIPATIRERVRLEVIGETGDRESIGAEAAASTTPRRTAGNRFSTRRSTLLHRPAEVSAEVRDEFQRACIEFSDMDPLHRPGIPRLYASPATPGILSQINDEIASRLCTDMSLLQLQSLVYCGAVAAIRLHGQKIRFRVIGLSDKRDPPLKIRLERRRDSLRQDIARLIQISTGSASRRVRNKVQRVYRNYAIPCETPVVEILDTLKQKLSVICSRLRRYGESYSRRVQNATYARNQRSFFKSLNESQQSAQTIQFSVTEAKEYWGGLWGLPAQHAEHAEWITAEGTRHANTPGMNCADVTEEEVRRAINISKNWRGPGLDRVQNFWYKKFTSVHSRLARSINEVMSRPEEFPPFLTAGITYLIPKKDTVQDPADTRPITCLPTLYKFITSIISGRINAHLETNNILSEEQKGCRVGSRGCKEQLIIDSVVVGQATRGQRNLFSCYIDYAKAFDSVPHTWLIDILHLYRIDPKLIKFLATVMEGWHTTLSVRTSEGANTSEPIRIRRGIFQGDSLSPIWFCMALNPLSWLLNDARGHGFAIKYGLRAKCELTHLMYLDDIKLYAGTDNHLRSLLRIIDMFSRDIRMEFGLDKCRIQAIRKGHHEPHAGHSIGDLHIEAMTETDFYKYLGILQGTHARVGDLKEALLSEFLRRVKLVLKSHLSGKNKVSALNVFAIPSLAYAFGILPWTKTDLENVQRRIRTTMSKFRMHHPKSAVERMNLPRDIGGRGVVDVAAQHHRQVDSLRAYFYSKEQASPLHAAVCKADCGLTPLNLKDRSFNPLSGVKSDQERIEEWKSKAMHGKHVNCLWQPFVDLHLSNRWLCAGELFAETEGFMCAIQDGVVATRAYKKLIMKERVENDQCRMCGSALETLDHLISGCTVMAPVQYITRHNAVCKVIHQNLAYKHGLITGTCPVYRYEPQAVLDSSAYSMYWDREVLTDRHTAHNKPDVLLVDKTGRSAYIIDVAIPHNSNIERKYVEKKVNYEPLAREIKEIWRLERVVVVPIILSATGIVPKSLTASLDVLGLSHSLVQTMQKYTILHTCSMLRGVLEGFSH

SEQ ID NO: 2011 - protein, 979 aa, Hermetia illucens
MDPLHRPGIPRLCASPATPGILSQINDEIASRLCADMSLLQLQSLVYCGAVAAIRLHGQKIRFRVIGLSDKRDPPWKIRLERRRDSLRQDITRLIQISTGNASRRVRNKVQRIYRNYAIPCETPVVEILDTLKQKLSVICSRLRRYGEIYSRRVQNATYARNQRSFFRSLNESQQSAQTIQFSVTEAKEYWGGLWGLPAQHAEHAEWITAEGTRHVNTPGMNFADVTEEEVRRAINSSKNWRGPGLDRVQNFWYKKFTSVHSRLARSINEVMSRPEEFPPFLTAGITYLIPKKDTVQDPADTRPITCLPTLYKFITSIISGRINAHLETNNILSEEQKGCRVGSRGCKEQLIIDSVVVGQATRGQRNLFSCYIDYAKAFDSVPHTWLIDILHLYRIDPKLIKFLATVMEGWHTTLSVRTSEGANTSEPIRIRRGIFQGDSLSPLWFCMALNPLSWLLNDAKGHGFAIKYGLRAKCELTHLMYLDDIKLYAGTDNHLRSLLRIIDMFSRDIRMEFGLDKCRIQAIRKGHHEPHAGHSIGDLHIEAITETDFYKYLGILQGTHARVGDLKEALLSESLRRVKLVLKSHLSGKNKISALNVFAIPSLAYAFGILSWTKTYLENVQRRIRTAMSKFRIHHPKSAVERMNLLRDIGGRGVVDVAAQHHRQVDSLRAYFYSKEQASPLHAAVCKADCGLTPLNLKDRSFNPLSGVKSDQERIEEWKSKAMHGKHVNCLWQPFVDLHLSNRWLCAGELFAETEGFMCAIQDGVVATRAYKKLIMKERVENDQCRMCGSALETLDHLISGCTVMAPVQYITRHNAVCKAIHQNLAYKHGLITGTCPVYRYEPQAVLDSSAYSMYWDGKVLTDRHTAHNKPDVLLVDKTGRSAYIIDVAIPHNSNIERKYVEKKVNYEPLAREIKEIWRLERVVVVPIILSATGIVPKSLTASLDVLGLSHSLVQTMQKYTILHTCSMLRGVLDGFSH

SEQ ID NO: 2012 - protein, 1188 aa, Hermetia illucens
MRRKRNLRSGTDNRRESSDLVTGSGSRNGQHGVETASRGAVRRLGATTTRSTAPPAAAVSPQSVATTSAGSRRKRMKWTEEMNLFIIRSYYEITAGAGITSYRPLLHQRFVERFPQFAHVTVQRVADQYRFITRSDTIPATIRERVRLEVIGETGDRESMGAEAAASTTPRRTAGNRFSTRRSTLLHRPAEVSAEVRDEFQRACIEFSDMDPLHRPGIPRLYASPATPGILSQINDEIASRLCADMSLLQLQSLVYCGAVAAIRLHGQKIRFRVIGLSDKRDPPWKIRLERRRDSLRQDIARLIQISTGNASRRVRNKVQRVYRNYAIPCETPVVEILDTLKQKLSVICSRLRRYGESYSRRVQNATYARNQRSFFRSLNESQQSAQTIQFSVTEAKEYWGGLWGLPAQHAEHAEWITAEGTRHANTPGMNFADVTEEEVRRAINISKNWRGPGLDRVQNFWYKKFTSVHSRLARSINEVMSRPEEFPPFLTAGITYLIPKKDTVQDPADTRPITCLPTLYKFITSIISGRINAHLETNNILSEEQKGCRVGSRGCKEQLIIDSVVVGQATRGQRNLFSCYIDYAKAFDSVPHTWLIDILHLYRIDPKLIKFLATVMEGWHTTLSVRTSEGANTSEPIRIRRGIFQGDSLSPLWFCMALNPLSWLLNDARGHGFAIKYGLRAKCELTHLMYLDDIKLYAGTDNHLRSLLRIIDMFSRDIRMEFGLDKCRIQAIRKGHHEPHAGHSIGDLHIEAMTETDFYKYLGILQGTHARVGDLKEALLSEFLRRVKLVLKSHLSGKNKVSALNVFAIPSLAYAFGILPWTKTDLENVQRRIRTTMSKFRMHHPKSAVERMNLPRDIGGRGVVDVAAQHHRQVDSLRAYFYSKEQASPLHAAVCKADCGLTPLNLKDRSFNPLSGVKSDQERIEEWKSKAMYGKHVNCLWQPFVDLHLSNRWLCAGELFAETEGFMCAIQDGVVATRAYKKLIMKERVENDQCRMCGSALETLDHLISGCTVMAPVQYITRHNAVCKVIHQNLAYKHGLITGTCPVYRYEPQAVLDSSAYSMYWDRQVLTDRHTAHNKPDVLLVDKTGRSAYIIDVAIPHNSNIERKYVEKKVNYEPLAREIKEIWRLERVVVVPIILSATGIVPKSLTASLDVLGLSHSLVQTMQKYTILHTCSMLRGVLDGFSH

SEQ ID NO: 2013 - protein, 1033 aa, Hermetia illucens
MGAEAAASTTPRRTAGNRFSTRRSTLLHRPAEVSAEVRDEFQRACIEFSDMDPLHRPGIPRLYASPATPGILSQINDEIASRLCADMSLLQLQSLVYCGAVAAIRLHGQKIRFRVIGLSDKRDPPWKIRLERRRDSLRQDIARLIQISTGNASRRVRNKVQRVYRNYAIPCETPVVEILDTLKQKLSVICSRLRRYGESYSRRVQNATYARNQRSFFRSLNESQQSAQTIQFSVTEAKEYWGGLWGLPAQHAEHAEWITAEGTRHVNTPGMNFADVTEEEVRRAINSSKNWRGPGLDRVQNFWYKKFTSVHSRLARSINEVMSRPEEFPPFLTAGITYLIPKKDTVQDPADTRPITCLPTLYKFITSIISGRINAHLETNNILSEEQKDCRVGSRGCKEQLIIDSVVVGQATRGQRNLFSCYIDYAKAFDSVPHTWLIDILHLYRIDPKLIKFLATVMEGWHTTLSVRTSEGANTSEPIRIRRGIFQGDSLSPLWFCMALNPLSWLLNDARGHGFAIKYGLRAKCELTHLMYLDDIKLYAGTDNHLRSLLRIIDMFSRDIRMEFGLDKCRIQAIRKGHHEPHAGHSIGDLHIEAMTETDFYKYLGILQGTHARVGDLKEALLSEFLRRVKLVLKSHLSGKNKIGALNVFAIPSLAYAFGILPWTKTDLENVQRRIRTTMSKFRMHHPKSAVERMNLPRDIGGRGVVDVAAQHHRQVDSLRAYFYSKEQASPLHAAVCKADCGLTPLNLKDRSFNPLSGVKSDQERIEEWKSKAMHGKHVNCLWQPFVDLHLSNRWLCAGELFAETEGFMCAIQDGVVATRAYKKLIMKERVENDQCRMCGSALETLDHLISGCTVMAPVQYITRHNAVCKVIHQNLAYKHGLITGTCPVYRYEPQAVLDSSAYSMYWDRQVLTDRHTAHNKPDVLLVDKTGRSAYIIDVAIPHNSNIERKYVEKKVNYEPLAREIKEIWRLERVVVVPIILSATGIVPKSLTASLDVLGLSHSLVQTMQKYTILHTRRILPLTYHRPPPPVPL

SEQ ID NO: 2014 - protein, 1185 aa, Hermetia illucens
MRRRNLRSGTDNRRESSDLVTGSGSRNGQHGVETASRGAVRRLGATTTRSTAPPAAAVSPQPVATTSVGSRRKRMKWTEEMNLFIIRSYYEITAGAGTTSYRPLLHQRFVERFPQFAHVTVQRVADQYRFITRSDTIPATIRERVRLEVIGETGDRESMGAEAAASTTSRRTAGNRFSTRRSTLLHRPAEVSAEVRDEFQRACIEFSDMDPLHRPGIPRLYASPATPGILSQINDEIASRLCADMSLLQLQSLVYCGAVAAIRLHGQKIRFRVIGLSDKRDPPWKIRLERRRDLLRQDIARLIQISTGSASRRMRNKVQRVYRNYAIPCETPVVEILDTLKQKLSVICSRLRRYGESYSRRVQNATYARNQRSFFRSLNESQQSAQTIQFSVTEAKEYWGGLWGLPAQHAEHAEWITAEGTRHANTPGMNFADVTEEEVRRATNISKRGPGLDRVQNFWYKKFTSIHSRLARSINEVMSRPEEFPPFLTAGITYLIPKKDTVQDPADTRPITCLPTLYKFITSIISGRINAHLETNNILSEEQKGCRVGSRGCQEQLIIDSVVVGQATRGQRNLFSCYIDYAKAFNSVPHTWLIDILHLYRIDPKLIKFLATVMEGWHTTLSVRTSEGANTSEPIRIRRGIFQGDSLSPLWFCMALNPLSWLLNDARGHGFAIKYGLRAKCELTHLMYLDDIKLYAGTDNHLRSLLRIIDMFSRDIRMEFGLDKCRIQAISKGHHEPHAGHSIGDLHIEAMTETDRDKYLGILQGTHARVGDLRETLLSEFLRRVKLVLKSHLSGKNKISALNVFAIPSLAYAFGILPWTKTDLENVQRRIRTTMSKFRMHHPKSAVERMNLPRDIGGRGVVDVAAQHHRQVDSLRAYFYSKEQASPLHAAVCKADCGLTPLNLKDRSFNPLSGVKSDQERIEEWKSKAMHGKHVNCLWQPFVNLHLSNRWLCAGELFAETEGFMCAIQDGVVATRAYKKLIMKERVENDQCRMCGSALETLDHLISGCTVMAPVQYITRHNAVCKVIHQNLAYKHGLITGTCPVYRYEPQAVLDSSACSMYWDRQVLTDRHTAHNKPDVLLVDKTGRSAYIIDVAIPHNSNIERKYVEKKVNYEPLAREIKEIWRLERVVVVPIILSATGIVPKSLTASLDVLGLSHSLVQTMQKYTILHTCSMLRGVLDGFSH

SEQ ID NO: 2015 - protein, 1188 aa, Hermetia illucens
MRRKRNLRSGTDNRRESSDLVTGSGSRNGQHGVETASRGAVRRLGATTTRSTAPPAAAVSPQSVATTSAGSRRKRMKWTEEMNLFIIRSYYEITAGAGITSYRPLLHQRFIERFPQFAHVTVQRVADQYRFITRSDTIPATIRERVRLEVIGETGDRESMGAEAAASTTPRRTAGNRFSTRRSTLLHRPAEVSAEVRDEFQRACIEFSDMDPLHRPGIPRLYASPATPGILSQINDEIASRLCADMSLLQLQSLVYCGAVAAIRFHGQKIRFRVIGLSDKRDPPWKIRLERRRDSLRQDIARLIQISTGNASRRVRNKVQRVYRNYAIPCETPVVEILDTLKQKLSVICSRLRRYGESYSRRVQNATYARNQRSFFRSLNESQQSAQTIQFSVTEAKEYWGGLWGLPAQHAEHAEWITAEGTRHANTPGMNFADVTEEEVRRAINISKNWRGPCLDRVQNFWYKKFTSVHSRLARSINEVMSRPEEFPPFLTAGITYLIPKKDTVQDPADTRPITCLPTLYKFITSIISGRINAHLETNNILSEEQKGCRVGSRGCKEQLIIDSVVVGQATRGQRNLFSCYIDYAKAFDSVPHTWLIDILHLYRIDPKLIKFLATVMEGWHTTLSVRTSEGANTSEPIRIRRGIFQGDSLSPLWFCMALNPLSWLLNDTRGHGFAIKYGLRAKCELTHLMYLDDIKLYAGTDNHLRSLLRIIDMFSRDIRMEFGLDKCRIQAIRKGHHEPHAGHSIGDLHIEAMTETDFYKYLGILQGTHARVGDLKEALLSEFLRRVKLVLKSHLSGKNKISALNVFAIPSLAYAFGILPWTKTDLENVQRRIRTTMSKFRMHHPKSAVERMNLPRDIGGRGVVDVAAQHHRQVDSLRAYFYSKEQASPLHAAVCKADCGLTPLNLKDRSFNPQSGVKSDQERIEEWKSKAMHGKHVNCLWQPFVDLHLSNRWLCAGELFAETEGFMCAIQDGVVATRAYKKLIMKERVENDQCRMCGSALETLDHLISGCTVMAPVQYITRHNAVCKVIHQNLAYKHGLITGTCPVYRYEPQAVLDSSAYSMYWDRQVLTDRHTAHNKPDVLLVDKTGRSAYIIDVAIPHNSNIERKYVEKKVNYEPLAREIKEIWRLERVVVVPIILSATGIVPKSLTASLDVLGLSHSLVQTMQKYTILHTCSMLRGVLDGFSH

SEQ ID NO: 2016 - protein, 1193 aa, Hermetia illucens
MHHQKMRRRRNLRSGTDNRRESSDLVTGSGSRNGQHGVETASRGAVRRLGATTTRSTAPPAAAVSPQSVATTSAGSRRKRMKWTEEMNLFIIRSYYEITAGAGTTSYRPLLHQRFVERFPQFAHVTVQRVADQYRFITRSDTIPATIRERVRLEVIGETGDRESMGAEAAASTTPRRTAGNRFSTRRSTLLHRPAEVSAEIRDEFQRACIEFSDMDPLHRPGIPRLYASPATPGILSQINDEIASRLCADMSLLQLQSLVYCGAVAAIRLHGQKIRFRVIGLSDKRDPPWKIRLERRRDSLRQDIARLIQISTGNASRRVRNKVQRVYRNYAIPCETPVVEILDTLKQKLSVICSRLRRYGESYSRRVQNATYARNQRSFFRSLNESQQSAQTIQFSVTEAKEYWGGLWGLPAQHAEHAEWITAEGTRHVNTPGMNFADVTEEEVRRAINSSKNWRGPGLDRVQNFWYKKFTSVHSRLARSINEVMSRPEEFPPFLTAGITYLIPKKDTVQDPADTRPITCLPTLYKFITSIISGRINAHLETNNILSEEQKGCRVGSRGCKEQLIIDSVVVGQATRGQRNLFSCYIDYAKAFDSVPHTWLIDILHLYRIDPKLIKFLATVMEGWHTTLSVRTSEGANTSEPIRIRRGIFQGDSLSPLWFCMALNPLSWLLNDARGHGFAIKYGLRAKCELTHLMYLDDIKLYAGTDNHLRSLLRIIDMFSRDIRMEFGLDKCRIQAIRKGHHEPHAGHSIGDLHIEAMTETDFYKYLGILQGTHARVGDLKEALLSEFLRRVKLVLKSHLSGKNKISALNVFAIPSLAYAFGILPWTKTDLENVQRRIRTTMSKFRMHHPKSAVERMNLPRDIGGRGVVDVAAQHHRQVDSLRAYFYSKEQASPLHAAVCKADCGLTPLNLKDRSFNPLSGVKSDQERIEEWKSKAMHGKHVNCLWQPFVDLHLSNRWLCAGELFAETEGFMCAIQDGVVATRAYKKLIMKERVENDQCRMCGSALETLDHLISGCTVMAPVQYITRHNAVCKVIHQNLAYKHGLITGTCPVYRYEPQAVLDSSAYSMYWDRQVLTDRHTAHNKPDVLLVDKTGRSAYIIDVAIPHNSNIERKYVEKKVNYEPLAREIKEIWRLERVVVVPIILSATGIVPKSLTASLDVLGLSHSLVQTMQKYTILHTCSMLRGVLDGFSH

SEQ ID NO: 2017 - protein, 885 aa, Hermetia illucens
MQISTGNASRRVRNKVQRVYRNYAIPCETPVVEILDTLKQKLSVICSRLRRYGESYSRRVQNATYARNQRSFFRSLNESQQSAQTIQFSVTEAKEYWGGLWGLPAQHAEHAEWITAEGTRHANTPGMNFADVTEEEVRRAINISKNWRGPGLNRVQNFWYKKFTSVHSRLARSINEVMSRPEEFPPFLTAGITYLIPKKDTVQDPADTRPITCLPTLYKFITSIISGRINAHLETNNILSEEQMGCRVGSRGCKEQLIIDSVVVGQATRGQRNLFSCYIDYAKAFDSVPHTWLIDILHLYRIDPKLIKFLATVMEGWHTTLSVRTSEGANTSEPIRIRRGIFHGDSLSPLWFCMALNPLSWLLNDARGHGFAIKYGLRAKCELTHLMYLDDIKLYAGTDNHLRSLLRIIDMFSRDIRMEFGLDKCRIQAIRKGHHEPHAGHSIGDLHIEAMTETDFYKYLGILQGTHARVGDLKEALLSEFLRRVKLVLKSHLSGKNKISALNVFAIPSLAYAFGILPWTKTDLENVQRRIRTTMSKFRMHHPKSAVERMNLPRDIGGRGVVDVAAQHHRQVDSLRAYFYSKEQASPLHAAVCKADCGLTPLNLKDRSFNPLSGVKSDQERIEEWKSKAMHGKHVNCLWQPFVDLHLSNRWLSAGELFAETEGFMCAIQDGVVATRAYKKLIMKERVENDQCRMCGSALETLDHLISGCTVMAPVQYITRHNAVCKVIHQNLAYKHGLITGTCPVYRYEPQAVLDSSAYSMYWDRQVLTDRHTAHNKPDVLLVDKTGRSAYIIDVAIPHNSNIERKYVEKKVNYEPLAREIKEIWHLERVVVVPIILSATGIVPKSLTASLDVLGLSHSLVQTMQKYTILHTCSMLRGVLDGFSH

SEQ ID NO: 2018 - protein, 959 aa, Hermetia illucens
MHLQQLREFYLKSMMRLCADLSLLQLQSLVYCGAVAAIRLHGQKIRFRVIGLSDKRDPPWKIRLERRRDSLRQDIARLIQISTGNASRRVRNKVQRVYRNYAIPCETPVVEILDTLKQKLSVICSRLRRYGESYSRRVQNATYARNQRSFFRSLNESQQSAQTIQFSVTEAKEYWGGLWGLPAQHAEHAEWITAEGTRHVNTPGMNFADVTEEEVRRAINSSKNWRGPGLDRVQNFWYKKFTSVHSRLARSINEVMSRPEEFPPFLTAGITYLIPKKDTVQNPADTRPITCLPTLYKFITSIISGRINAHLETNNILSEEQKGCRVGSRGCKEQLIIDSVVVGQATRGQRNLFSCYIDYAKAFDSVPHTWLIDILHLYRIDPKLIKFLATVMEGWHTTLSVRTSEGANTSEPIRIRRGIFQGDSLSPLWFCMALNPLSWLLNDARGHGFAIKYGLRAKWELTHLMYLDDIKLYAGTDNHLRSLLRIIDMFSRDIRMEFGLDKCRIQAIRKGHHEPHAGHSIGDLHIEAMTETDFYKYLGILQGTHARVGDLKEALLSEFLRRVKLVLKSHLSGKNKISALNVFAIPSLAYTFGILPWTKTDLENVQRRIRTTMSKFRMHHPKSAVERMNLPRDIGGRGVVDAAAQHHRQIDSLRAYFYSKEQASPLHAAVCKADCGLTPLNLKDRSFNPLSGVKSDQERIVEWKSKAMHGKHVNCLWQPFVDLHLSNRWLCAGELFAETEGFMCAIQDGVVATRAYKKLIMKERVENDQCRMCGSALETLDHLISGCTVMAPVQYITRHNAVCKVIHQNLAYKHGLITGTCPVYRYEPQAVLDSSAYSMYWDRQVLTDRHTAHNKPDVLLVDKTGRSAYIIDVAIPHNSNIERKYVEKKVNYEPLAREIKEIWRLERVVVVPIILSATGIVPKSLTASFDVLGLSHSLVQTMQKYTILHTCSMLRGVLD

SEQ ID NO: 2019 - protein, 1105 aa, Hermetia illucens
MKWTEEMSLFIIRSYYEITAGAGTTSYRPLLHQRFVKRFPQFAHVTMQRVADQYRFITRSDTIPATIRERVRLEVIGETGDRESIGAEAAALTTSRRTAGNRFSTRRSTLLHRPAEVSAEVRDEFQRACIKFPDPLHRPGIPRLYASPATPGILSQINDEIASRLCADMSLLQLQSLVYCGAVAAIRLHSQKIRFRVIGLSDKRDPPWKIRLERRRDSLRQDIARLIQISTGSASRRVRNKVQRVYRNYAIPCETPVVEILDTLKQKLSVICSRLRRYGESYSRRVQNATYARNQRSFFRSLNESQQSAQTIQFSVTEAKEYWGGLWGLPAQHAEHAEWITAEGTRHANTPGMSFADITEEEVRRAINSSKNWRGPGLDRVQNFWYKKFTSVHSRLARSINEVMSRPEEFPPFLTAGITYLIPKKDTVQDPADTRPITCLPTLYKFITSIISGRINAHLETNNILSEEQKGCRVGSRGCKEQLIIDSVVVGQATRGQRNLFSCYIDYAKAFDRVPHTWLIDILHLYRIDPKLIKFLATVMEGWHTTLSVRTSEGANTSEPIRIRRGIFQGDSLSPLWFCMALNPLSWLLNDARGHGFAIKYGLRAKCELTHLMYLDDIKLYAGTDNHLRSLLRIIDMFSRDIRMEFGLDKCRIQAIRKGHHEPHAGHSIGDLHIEAMTETDFYKYLGILQGTHARVGDLEEALLSEFLRRVKLVLKSHLSGKNKISALNVFAIPSLAYAFGILPWTKTDLENVQRRIRTTMSKFRMHYPKSAVERMNLPRDIGGRGVVDVAAQHHRQVDSLRAYFYSKEQASPLHAAVCKADYGLTPLNLKDRSFNPLSGVKSDQERIEEWKSKAMLGKHVNCLWQPFLDLHLSNRWLCAGELFAETEGFMCAIQDGVVATRAYKRLIMKERVENDQCRMCGSALETLDHLISGCTVMAPVQYTTRHNAVCKVIHQNLAYKHGLITGTCPADSSACGMYWDRQVLTDRHTVLCTVWRSHVLLVDKTGRSAYIIDVAIPHNSNIERKYVEKKVNYEPLAREIKEIWRLERVVVVPIILSAAGIVPKSLTASLDVLGLAHSLVETMQKYTILHTCLMLRGVLDGFSH

SEQ ID NO: 2020 - protein, 1029 aa, Hermetia illucens
MGAEAAASTTSRRTAGNRFSTRRSTLLHRPAEVSAEVRDEFQRACIEFSDIDPLHRPGIPRLYASPATPGILSQINDEIASRLCADMSLLQLQSLVYCGAVAAIRLHGQKIRFRVIGLSDKRYPPWKIHLERRRDSLRQDIARLIQISTGNASRRVRNKVQRVYRNYAIPCETPVVEILDTLKQKLSVICSRLRRYGESYSRRVQNATYARNQRSFFRSLNESQQSAQTIQFSVTEAKEYWGGLWGLPAQHAKHAEWITAEGTRHVNTPGMNFADVTEEEVRRAINSLKNWRGPGLDRVQNFWYQKFTSVHSRLALSINEVVSRPEEFPPFLTAGITYLIPKKDTVQDPADTRPITCLPTLYKFITSIISARINAHLETNNILSEEQKGCRVGSRGCKEQLIIDSVVVGQATRSQRNLFSCYIDYAKAFDSVPHTWLIDILHLYSIDPKLIKFLATVMEGWHTTLSVSTSEGANTSEPIRIRRGIFQGDLLSPLWFCMALNPLSWLLNDARGHGFAIKYGLRAKCELTHLMYLDDIKLYAGTDNHLRSLLRIIDMFSRDIRMEFILDKCRIQAIRKGHHEPHAGHSIGDLHIEAMTETDFYKYLGILQGTHARVGDLKEALLSEFLRRVKLVLKSHLSGKNKISALNVFAIPSLAYAFGILPWTKTDLENVQRRIRATMSKFRMHHPKSAVERMNLPRDIGGRGVVDVAAQHHRQVDSLHAYFYSKEQGSPLHAAVCKADCGLTPLNLKDRSFNPLSGVKSDQERIEEWKSKAMHGKHVNCLWQPFVDLHLSNRWLCAGELFAETEGFMCAIQDGVVATRAYKKLIMKERVENDQCRMCGSVLETLDHLISGCTVMAPVQYITRHNAVCKVIHQNLAYKHGLIAGTCPVYRYEPQALLDSSAYSMYWDRQVLTDRHTAHNKPDVLLVDKTGRSAYIIDVAIPHNSNIERKYVEKKVNYEPLARENKEIWRLERVVVVPIILSATGIVPKSLTASLDVLGLSHSLVQTMQKYTILHTCSMLRGVLDGFSH

SEQ ID NO: 2021 - protein, 1193 aa, Hermetia illucens
MHHQKMRRRRNLRSGTDNRRESSDLVTGSGSRNGQHGVETASRGAVRRLGATTTRSTAPPAAAVSPQSVATTSAGSRRKRMKWTEEMNLFIIRSYYEITAGAGITSYRPLLHQRFVERFPQFAHVTVQRVADQYRFITRSDTIPATIRERVLLEVIGETGDRESMGAEAAASTTPRRTAGNRFSTRRSTLLHRPAEVSAEVRDEFQRACIEFSDMDPLHRPGIPRLYASPATPGILSQINDEIASRLCADMSLLQLQSLVYCGAVAAIRLHGQKIRFRVIGLSDKRDPPWKIRLERRRDSLRQDIARLIQISTGNASRRVRNKVQRVYRNYAIPCETPVVEILDTLKQKLSVICSRLRRYGESYSRRVQNATYARNQRSFFRSLNESQQSAQTIQFSVTEAKEYWGGLWGLPAQHAEHAEWITAEATRHANTPGMNFADVTEEEVRRAINISKNWRGPGLDRVQNFWYKKFTSVHSRLARSINEVMSRPEEFPPFLTAGITYLIPKKDTVQDPADTRPIICLPTLYKFITSIISGRINAHLETNNILSEEQKGCRVGSRGCKEQLIIDSVVVGQATKGQRNLFSCYIDYAKAFDSVPHTWLIDILHLYRIDPKLIKFLATVMEGWHTTLSVRTSEGANTSEPIRIRRGIFQGDSLSPLWFCMALNPLSWLLNGARGHGFAIKYGLRAKCELTHLMYLDDIKLYAGTDNHLRSLLRIIDMFSRDIRMEFGLDKCRIQAIRKGHREPHAGHSIGDLHIEAMTETDFYKYLGILQGTHARVGDLKEALLSEFLRRVKLVLKSHLSGKNKISALNVFAIPSLAYAFGILPWTKTDLENVQRRIRTTMSKFRMHHPKSAVERMNLSRDIGGRGVVDVAAQHHRQVDSLRAYFYSKEQASPLHAAVCKADCGLTPLNLKDRPFNPLSGVKSDQERIDEWKSKAMHGKHVNCLWQPFVDLHLSNRWLCAGELFAETEGFMCAIQDGVVATRAYKKLIMKERVENDQCRMCGSALETLDHLISGCTVMAPVQYITRHNAVCKVIHQNLAYKHGLITGTCPVYRYEPQAVLDSSAYSMYWDRQVLTDRHTAHNKPDVLLVDKTGRSAYIIDVAIPHNSNIERKYVEKKVNYEPLAREIKEIWRLERVVVVPIILSATGIVPKSLTASLDVLGLSHSLVQTMQKYTILHTCSMLRGVLDGFSH

SEQ ID NO: 2022 - protein, 1193 aa, Hermetia illucens
MHHQKMRRRRNLRSGTDNRRESSDLVTGSGSRNGQHGVETASRGAVRRLGATTTRSTAPPAAAVSPQSVATTSAGSRRKRMKWTEEMNLFIIRSYYEITAGAGTTSYRPLLHQRFVERFPQFAHVTVQRVADQYRFITRSDTIPATIRERVRLEVIGETGDRESMGAEAAASTTPRRTAGNRFSTRRSTLLHRPAEVSAEVRDEFQRACIEFSDMDPLHRPGIPRLYASPATPGILSQINDEIASRLCADMSLLQLQSLVYCGAVAAIRLHGQKIRFRVIDLSDKRDPPWKIRLERRRDSLRQDIARLIQISTGNASRRVRNKVQRVYRNYAIPCETPVVEILDTLKQKLSVICSRLRRYGESYSRRVQNATYARNQRSFFRSLNESQQSAQTIQFSVTEAKEYWGGLWGLPAQHAEHAEWITAEGTRHANTPGMNFADVTEEEVRRAINISKNWRGPGLDRVQNFWYKKFTSVHSRLARSINEVMSRPEEFPPFLTAGITNLIPKKDTVQDPADTRPITCLPTLYKFITSIISGRINAHLETNNILSEEQKGCRVGSRGCKDQLIIDSVVVGQATRGQRNLFSCYIDYAKAFDSVPHTWLIDILHLYRIDPKLIKFLATVMEGWHTTLSVRTSEGANTSEPIRIRRGIFQGDSLSPLWFCMALNPLSWLLNDARGHGFAIKYGLRAKCELTHLMYLDDIKLYAGTDNHLRSLLRIIDMFSRDIRMEFGLDKCRIQAIRKGHHEPHAGHSIGDLHIEAMTETDFYKYLGILQGAHARVGDLKEALLSEFLRRVKLVLKSHLSGKNKISALNVFAIPSLAYAFGILPWTKTDLENVQRRIRTTMSKFRMHHPKSAVERMNLPRDIGGRGVVDVAAQHHRQVDSLRAYFYSKEQASPLHAAVCKADCGLTPLNLKDRSFNPLSGVKSDQERIEEWKSKAMHGKHVNCLWQPFVDLHLSNRWLCAGELFAETEGFMCAIQDGVVATRAYKKLIMKERVENDQCRMCGSALETLDHLISGCTVMAPVQYITRHNAVCKVIHQNLAYKHGLITGTCPVYRYEPQAVLDSSAYSMYWDRQVLTDRHTAHNKPDVLLVDKTGRPAYIIDVAIPHNSNIERKYVEKKVNYEPLAREIKEIWRLERVVVVPIILSATGIVPKSLTASLDVLGLSHSLVQTMQKYTILHTCSMLRGVLDGFSH

SEQ ID NO: 2023 - protein, 958 aa, Hermetia illucens
MHLQQLREFYLKSMMRLHLDCVRICRCCNYNHLCIVVQKIRFRVIGLSDKRDPPWKIRLERRWDSLRQDIARLIQISTGSASRRVRNKVQRVYRNYAIPCETPVVEILDTLKQKLSVICSRLRRYGESYSRRVQNATYARNQRSFFRSLNESQQSAQTIQFSVTEAKEYWGGLWELPAQHAEHAEWITVEGTRYANTPGMNFADVTEEEVRRTINSSKNWRGPGLDRVQNFWYKKFTSVHSRLARSINEVMSRPEEFPTFLTAGITYLIPKKDTVQDPADTRPITCLPTLYKFITSIISGRINAHLETNNILSEEQKGCRVGSRGCKEQLIIDSVVVGQATRGQRNLFSCYIDYAKAFDSVPHTWLIDILHLYRIDPKLIKFLATVMEGWHTTLSVRTSEGANTSEPIRIRRGIFQGDSLSPLWFCMTLNPLSWLLNDAKGHGFAIKYGLRAKCELTHLMYLDDIKLYAGTDDHLRRLLRIIDMFSRDIRMEFGLDKCRIQAIRKGHHEPHARHSIDDLHIEAMTETDFYKYLGILQGTHARVGDLKEALLSEFLRRVKLVLKSHLSGKNKISALNVFAIPSLAYAFGILPWTKTDLENVQPRIRTTMSKFRMHHPKSAVERMNLPRDIGGRGVVDGAAQHHRQVDSLRAYFYSKEQASPLHAAVCKADCGLTPLNLKDRSFNPLSGVKLDQERIDEWKSKAMHGKHVNCLWQPFVDLHLSNRWLCAGELFAETEGFMCDIQDGVVATRAYKKLIMKERVENDQRRMCGSALKTLDHLISGCTVMAPVQYITRHNAVCKVIHQNLAYKHGLITGTCPVYRYEPQAVLDSSAYNMYWDRQVLTDRHTAHNKPDVLLVDKTGRSAYIIDVAIPHNSNIERKYVEKKVNYEPLAREIKEIWRLERVVVVPIILSATGIVPKSLTASLDVLGLSHSLVQIMQKYTILHTCSMLRGVLDGFSH

SEQ ID NO: 2024 - protein, 943 aa, Hermetia illucens
MSLLQLQSLVYCGAVAAIRLHGQKIRFRVIGLSDKRDPPWKIRLERRRDSLRQDIARLIQISTGNASRRVRNKVQRVYRNYAIPCETPVVEILDTLKQKLSVICSRLRRYGESYSRRVQNATYARNQRSFFRSLNESQQSAQTIQFSVTEAKEYWGGLWGLPAQHAEHAEWITAETTRHANTPGMNFADVTEEEVRRAINISKNWRGPGLDRVQNFWYKKFTSVHSRLARSINEVMSRPEEFPPFLTAGITYLIPKKDTVQDPADTRPITCLPTLYKFITSIISGRINAHLETNNILSEEQKGCRVGSRGCKEQLIIDSVVVGQATRGQRNLFSCYIDYAKAFDSVPHTWLIDILHLYRIDPKLIKFLATVMEGWHTTLSVRTSEGANTSEPIRIRRGIFQGDSLSPLWFCMALNPLSWLLNDARGHGFAIKYGLRAKCELTHLMYLDDIKLYAGTDNHLRSLLRIIDMFSRDIRMEFGLDKCRIQAIRKGHHEPHSGHSIGDLHIEAMTETDFYKYLGILQGTHARVGDLKEALLSEFLRRVKLMLKSHLSGKNKISALNVFAIPSLAYAFGILPWTKTDLENVQRRIRTTMSKFRMHHPKSAVERMNLPRDIGGRGVVDVAAQHHRQVDSLRAYFYSKEQASPLHAAVCKADCGLTPLNLKDRSFNPLSGVKSDQERIEEWKSKAMHGKHVNCLWQPFVDLHLSNRWLCAGELFAETEGIMCAIQDGVVATRAYKKLIMKERVENDQCRMCGSALETLDHLISGCTVMAPVQYITRHNAVCKVIHQNLAYKHGLITGTCPVYRYEPQAVLDSSAYSMYWDRQVLTDRHTAHNKPDVLLVDKTGRSAYIIDVAIPHNSNIERKYVEKKVNYEPLAREIKEIWRLERVVVVPIILSATGIVPKSLTASLDVLGLSHSLVQTMQKYTILHTCSMLRGVLDGFSH

SEQ ID NO: 2025 - protein, 1188 aa, Hermetia illucens
MRRRRNLRSGTDNRRESSDLVTGSGSRNGQHGVETASRGAVRRLGATTTRSTTPPAAAVSPQSVTTTSAGSRRKRMKWTEEMNLFIIRSYYEITAGAGTTSYRPLLHQRFVERFPQFAHVTVQRVADQYRFITRSDTIPATIRERVRLEVIGETGDRESMGAEAAASTTPRRTAGNRFSTRRSTLLHRPAEVSAEVRDEFQRACIEFSDMDPLHRPGIPRLYASPATPGILSQINDEIASRLCADMSLLQLQSLVYCGAVAAIRLHGQKIRFRVIGLSDKRDPPWKIRLERRRDSLRQDIARLIQISTGSASRRVRNKVQRVYRNYAIPCETPVVEILDTLKQKLSVICSRLRRYGESYSRRVQNATYARNQRSFFRSLNESQQSAQTIQFSVTEAKEYWGGLWGLPAQHAEHAEWITAEGTRHANAPGMNFADVTEEEVRRAINISKNWRGPGLDRVQNFWYKKFTSVHSRLARSINEVMSRPEEFPPFLTAGITYLIPKKDTVQDPADTRPITCLPTLYKFITSIISGRINAHLETNNILSEEQKGCRVGSRGCKEQLIIDSVVVGQATRGQRNLFSCYIDYAKAFDSVPHTWLIDILHLYRIDPKLIKFLATVMEGWHTTLSVRTSEGANTSEPIRIRRGIFQGDSLSPLWFCMALNPLSWLLNDARGHGFAIKYGLRAKCELTHLMYLDDIKLYAGTDNHLRSLLRIIDMFSRDIRMEFGLDKCRIQAIRKGHHEPHAGHSIGDLHIEAMTETDFYKYLGILQGTHARVGDLKEALLSEFLRRVKLVLKSHLSGKNKVSALNVFAIPSLAYAFGILPWTKTDLENVQRRIRTTMSKFRMHHPKSAVERMNLPRDIGGRGVVDVAAQHHRQVDSLRAYFYSKEQASPLHAAVCKADCGLTPLNLKDRSFNPLSGVKSDQERIEEWKSKAMHGKHVNCLWQPFVDLHLSNRWLCAGELFAETEGFMCAIQDGVVATRAYKKLIMKERVENDQCRMCGSALETLDHLISGCTVMAPVQYITRHNAVCKVIHQNLAYKHGLITGTCPVYRYEPQAVLDSSAYSMYWDRQVLTDRHTAHNKPDVLLVDKTGRSAYIIDVAIPHNSNIERKYVEKKVNYEPLAREIKEIWRLERVVVVPIILSATGIVPKSLTASLDVLGLSHSLVQTMQKYTILHTCSMLRGVLDGFSH

SEQ ID NO: 2026 - protein, 976 aa, Hermetia illucens
MDPLHRPGIPRLYASPATPGILSQINDEIASRLCADMSLLQLQSLVYCGAVAAIRLHGQKIRFRVIGLSDKRDPPWKIRLERRRDSLRQDIARLIQISTGNASRRVRNKVQRVYRNYAIPCETPVVEILDTLKQKLSVICSRLRRYGESYSRRVQNATYARNQRSFFRSLNESQQSAQTIQFSVTEAKEYWGGLWGLPAQHAEWITAEGTRHVNTPGMNFADVTEEEVRRAINSSKNWRGPGLDRVQNFWYKKFTSVHSRLARSINEVMSRPEEFPPFLTAGITYLIPKKDTVQDPADTRPITCLPTLYKFITSIISGRINAHLETNNILSEEQKGCRVGSRGCKEQLIIDSVVVGQATRGQRNLFSCYIDYAKAFDSVPHTWLIDILHLYRIDPKLIKFLATVMEGWHTTLSVRTSEGANTSEPIRIRRGIFQGDSLSPLWFCMALNPLSWLLNDARGHGFAIKYGLRAKCELTHLMYLDDIKLYAGTDNHLRSLLRIIDMFSRDIRMEFGLDKCRIQAIRKGHHEPHAGHSIGDLHIEAMTETDFYKYLGILQGTHARVGDLKEALLSEFLRRVKLVLKSHLSGKNKMSALNVFAIPSLAYAFGILPWTKTDLENVQRRIRTIMSKFRMHHPKSAVERMNLPRDIGGRGVVDVAAQHHRQVDSLRAYFYSKEQASPLHAAVCKADCGLTPLNLKDRSFNPLSGVKSDQERIEEWKSKAMHGKHVNYLWQPFVDLHLSNRWLCAGELFAETEGFMCAIQDGVVATRAYKKLIMKERVENDQCRMCGSALETLDHLISGCTVMAPVQYITRHNAVCKVIHQNLAYKHGLITGTCPVYRYEPQAVLDSSAYSMYWDRQVLTDRHTAHNKPDVLLVDKTGRPAYIIDVAIPHNSNIERKYVEKKVNYEPLALEIKEIWRLERVVVVPIILSATGIVPKSLTASLDVLGLSHSLVQTMQKYTILHTCSMLRGVLDGFSH

SEQ ID NO: 2027 - protein, 1023 aa, Hermetia illucens
MGAEAAASTTPRRTAGNRFSTRRSTLLHRPAEVSAEVRDEFQRACIEFSDMDPLHRPGIPRLYASPATPGILSQINDEIASRLCADMSLLQLQSLVYCGAVAAIRLHGQKIRFRVIGLSDKRDPPWKIRLERRRDSLRQDIARLIQISTGSASRRVRNKVQRVYRNYAIPCETPVVEILDTLKQKLSVICSRLRRYGESYSRRVQNATYARNQRSFFRSLNESQQSAQTIQFSVTEAKEYWGGLWGLPAQHAEHAEWITAESTRHANTPGMNFADVIEEEVRRAINISKNWRGPGLDRVQNFWYKKFTSVHSRLARSINEVMSRPEEFPPFLTAGITYLIPKKDTVQDPADTRPITCLPTLYKFITSIISGRINNILSEEQKDCRVGSRGCEEQLIIDSVVVGQATRGQRNLFSCYIDYAKAFDSVPHTWLIDILHLYRIDPKLIKFLATVMEGWHTTLSVRTSEGANTSEPIRIRRGIFQGDSLSPLWFCMALNPLSWLLNDARGHGFAIKYGLRAKCELTHLMYLDDIKLYAGTDDHLRSLLRIIDMFSRDIRMEFGLDKCRIQAIRKGHHEPHAGHSIGDLHIEAMTETDFYKYLGILQGTHARVGDLKEALLSEFLRRVKLVLKSHLSGKNKISALNVFAIPSLAYAFGILPWTKTDLENVQRRIRTTMSKFRMHHPKSAVERMNLPRDIGGRGVVDVAAQHHRQVDSLRAYFYSKEQASPLHAAVCKADCRLTPLNLKDRSFNPLSGVKSDQERIEEWKSKAMHGKHVNCLWQPFVDLHLSNRWLCAGELFAETEGFMCAIQDGVVATRAYKKLIMKERVENDQCRMCGSALETLDHLISGCTVMAPVQYITRHNAVCKVIHQNLAYKHGLITGTCPVYRYEPQAVLDSSAYSMYWDRQVLTDRHTAHNKPDVLLVDKTGRSAYIIDVAIPHNSNIERKYVEKKVNYEPLAREIKEIWRLERVVVVPIILSATGIVPKSLTASLDILGLSHSLVQTMQKYTILHTCSMLRGVLDGFSH

SEQ ID NO: 2028 - protein, 1029 aa, Hermetia illucens
MGAEAAASTTSRRTAGNRFSTRRSTLLHRPAEVSAEVRDEFQRACIEFSDMDPLHRPGIRRLYASPATPGILSQINDEIASRLCADMSLLQLQSLVYCGAVAAIRLHGQKIRFRVIGLSDKRDPPWKTRLERRRDSLRQDIARLIQISTGNASRRVRNKVQRVYRNYAIPCESPVVEILDTLKQKLSVICSRLRRYGESYSRRVQNSTYARNQRSFFRSLNESQQSAQTIQFSVTEAKEYWGGLWGLPAQHAEHAEWITAEGTRHVNTPGMNFADVTEEEVRGAINSSKNWRGPGLDRVQNFWYKKFTSVHSRLARSINEVMSRPEEFPPFLTAGITYLIPKKDTVQDPADTRPITCLPTLYKFITSIISGRINAHLETNNILSEEQKGCRVGSRGCKEQLIIDSVVVGQATRGQRNLFSCYIDYAKAFDSVPHTWLIDILHLYRIDPKLIKFLATVMEGWHTTLSVRTSEGANTSEPIRIRRGIFQGDSLSPLWFCMALNPLSWLLNDARGHGFAIKYGLRAKCELTHLMYLDDIKLYAGTDNHLRSLLRIIDMFSRDIRMEFGLDKCRIQAIRKGHHEPHAGHSIGDLHIEAMTETDFYKYLGILQGTHARVGDLKEALLSEFLRRVKLVLKSHLSGKNKISALNVFAIPSLAYAFGILPWTKTDLENVQRRIGTTMSKFRMHHPKSAVERMNLPRDIGGRGVVDVAAQHHRQVDSLRAYFYSKEQASPLHAAVCKADCGLTPLNLKDRSFNPLSGVKSDQERIEEWKSKAMHGKHVNCLWQPFVDLHLSNRWLCAGELFAETEGFMCAIQDGVVATRVYKKFIMKERVENDQCRMCGSALETLDHLISGCTVMAPVQYITRHNAVCKVIHQNLAYKHGLITGTCPVYRCEPQAVLDSSAYSMYWDRQVLTDRHTAHNKPDVLLVDKTGRSAYIIDVAIPHNSNIERKYVEKKVNYEPLAREIKEIWRLERVVVVPIILSATGIVPKSLTASLDVLGLSHSLVQTIQKYTILHTCSMLRGVLDGFSH

SEQ ID NO: 2029 - protein, 1188 aa, Hermetia illucens
MRRKRNLRSGTDNRRESSDLVTGSGSRNGQHGVETASRGAVRRLGATTTRSTAPPAAAVSPQSVATTSAGSRRKRMKWTEEMNLFIIRSYYEITAGAGITSYRPLLHQRFVERFPQFAHVTVQRVADQYRFITRSDTIPATIRERVRLEVIGETGDRESMGAEAAASTTPRRTAGNRFSTRRSTLLHRPAEVSAEVRDEFQRACIEFSDMDPLHRPGIPRLYASPATPGILSQINDEIASRLCADMSLLQLQSLVYCGAVAAIRLHGQKIRFRVIGLSDKRDPPWKIRLERRRDSLRQDIARLIQISTGNASRRVRNKVQRVYRNYAIPCETPVVEILDTLKQKLSVICSRLRRYGESYSRRVQNATYARNQRSFFRSLNESQQSAQTIQFSVTEAKEYWGGLWGLPAQHAEHAEWITAEGTRHANTPGMNFADVTEEEVRRAINISKNWRGPGLDRVQNFWYKKFTSVHSRLARSINEVMSRPEEFPPFLTAGITYLIPKKDTVQDPADTRPITCLPTLYKFITSIISGRINAHLETNNILSEEQKGCRVGSRGCKEQLIIDSVVVGQATRGQRNLFSCYIDYAKAFDSVPHTWLIDILHLYRIDPKLIKFLATVMEGWHTTLSVRTSEGANTSEPIRIRRGIFQGDSLSPLWFCMALNPLSWLLNDARGHGFAIKYGLRAKCELTHLMYLDDIKLYAGTDNHLRSLLRIIDMFSRDIRMEFGLDKCRIQAIRKGHHEPHAGHSIGDLHIEAMTETDFYKYLGILQGTHARVGDLKEALLSEFLRRVKLVLKSHLSGKNKISALNVFAIPSLAYAFGILPWTKTDLENVQRRIRTTMSKFRMHHPKSAVERMNLPRDIGGRGVVDVAAQHHRQVDSLRAYFYSKEQACPLHAAVCKADCGLTPLNLKDRSFNPLSGVKSDQERIDEWKSKAMHGKHVNCLWQPFVDLHLSNRWLCAGELFAETEGFMCAIQDGVVATRAYKKLIMKERVENDQCRMCGSALETLDHLISGCTVMAPVQYITRHNAVCKVIHQNLAYKHGLITGTCPVYRYEPQAVLDSSAYSMYWDRQVLTDRHTAHNKPDVLLVDKTGRSAYVIDVAIPHNSNIERKYVEKKVNYEPLAREIKEIWRLERVVVVPIILSATGIVPKSLTASLDVLGLSHSLVQTMQKYTILHTCSMLRGVLDGFSH

SEQ ID NO: 2030 - protein, 1188 aa, Hermetia illucens
MRRRRNLRSGTDNRRESSDLVTGSGSRNGQHGVETASREAVRRLGATTTRSTAPPAAAVSPQPVATTSAGSRRKRMKWTEEMNLFIIRSYYEITAGAGTTSYRPLLHQRFVERFPQFAHVTVQRVADQYRFITRSDTIPATIRERVRLEVIGETGDRESMGAEAAASTTPRRTAGNRFSTRRSTLLHRPAEVSAEVRDEFQRACIEFSDMDPLHRPGIPRLYASPATPGILSQINDEIASRLCADMSLLQLQSLVYCGAVAAIRLHGQKIRFRVIGLSDKRDPPWKIRLERRRDSLRQDIARLIQISTGNASRRVRNKVQRVYRNYAIPCETPVVEILDTLKQKLSVICSRLRRYGESYSRRVQNATYARNQRSFFRSLNESQQSAQTIQFSVTEAKEYWGGLWGLPAQHAEHAEWITAEGTRHANTPGMNFADVTEEEVRRAINSSKNWRGPGLDRVQNFWYKKFTSVHSRLARSINEVMSRPEEFPPFLTAGITYLIPKKDTVQDPADTRPITCLPTLYKFITSIISGRINAHLETNNILSEEQKGCRVGSRGCKEQLIIDSVVVGQATRGQRNLFSCYIDYAKAFDSVPHTWLIDILHLYRIDPKLIKFLATVMEGWHTTLSVRTSEGANTSEPIRIRRGIFQGDSLSPLWFCMALNPLSWLLNDARGHGFAIKYGLRAKCELTHLMYLDDIKLYAGTDNHLRSLLRIIDMFSRDIRMEFGLDKCRIQAIRKGHHEPHAGHSIGDLHIEAMTETDFYKYLGILQGTHARVGDLKEALLSEFLRRVKLVLKSHLSGKNKISALNVFAIPSLAYAFGILPWTKTDLENVQRRIRTTMSKFRMHHPKSAVERMNLPPDIGGRGVVDVAAQHHRQVDSLRAYFYSKEQASPLHAAVCKADCGLTPLNLKDRSFNPLSGVKSDQERIEEWKSKAMHGKHVNCLWQPFVDLHLSNRWLCAGELFAETEGFMCAIQDGVVATRAYKKLIMKERVENDQCRMCGSALETLDHLISGCTVMAPVQYITRHNAVCKVIHQNLAYKHGLITGTCPVYRYEPQAVLDSSAYSMYWDRQVLTDRHTAHNKPDVLLVDKTGRSAYIIDVAIPHNSNIERKYVEKKVNYEPLAREIKEIWRLERVVVVPIILSATGIVPKSLTASLDVLGLSHSLVQTMQKYTILHTCSMLRGVLDGFSH

SEQ ID NO: 2031 - protein, 1193 aa, Hermetia illucens
MHHQKMRRRRDLRSGTDNRRESSDLVTGSGSRNGQHGVETASRGAVRRLGATTTRSTAPPAAAVSPQSVATTSAGSRRKRMKWTEEMNLFIIRSYYEITAGAGITSYRPLLHQRFVERFPQFAHVTVQRVADQYRFITRSDTIPATIRERVRLEVIGETGDRESMGAEAAASTTPRRTAGNRFSTRRSTLLHRPAEVSAEVRDEFQRACIEFSDMDPLHRPGIPRLYASPATPGILSQINDEIASRLCADLSLRQLQSLVYCGAVAAIRLHGQKIRFRVIGLSDKRDPPWKIRLERRRDSLRQDIARLIQISTGNASRRVRNKVQRVYRNYAIPCETPVVEILDTLKQKLSVICSRLRRYGESYSRRVQNATYARNQRSFFRSLNESQQSAQTIQFSVTEAKEYWGGLWGLPAQHAEHAEWITAEGTRHANTPGMNFADVTEEEVRRAINISKNWRGPGLDRVQNFWYKKFTSVHSRLARSINEVMSRPEEFPPFLTAGITYLIPKKDTVQDPADTRPITCLPTLYKFITSIISGRINAHLETNNVLSEEQKGCRVGSRGCKEQLIIDSVVVGQATRGQRNLFSCYIDYAKAFDSVPHTWLIDILHLYRIDPKLIKFLATVMEGWHTTLSVRTSEGANTSEPIRIRRGIFQGDSLSPLWFCMALNPLSWLLNDARGHGFAIKYGLRAKCELTHLMYLDDIKLYAGTDDHLRSLLRIIQMFSRDIRMEFGLDKCRIQAIRKGHHEPHAGHSIGDLHIEAMTETDFYKYLGILQGTHARVGDLKEALLSEFLRRVKLVLKSHLSGKNKISALNVFAIPSLAYAFGILPWTKTDLENVQRRIRTTMSKFRMHHPKSAVERMNLPRDIGGRGVVDVAAQHHRRVDSLRAYFYSKEQASPLHAAVCKADCGLTPLNLKDRSFNPLSGVRSDQERIEEWKSKAMHGKHVNCLWQPFVDLHLSNRWLCAGELFAETEGFMCAIQDGVVATRAYKKLIMKERVENDQCRMCGSALETLDHLISGCTVMAPVQYITRHNAVCKVIHQNLAYKHGLITGTCPVYRYEPQAVLDSSAYSMYWDRQVLTDRHTAHNKPDVLLVDKTGRSAYIIDVAIPHNSNIERKYVEKKVNYEPLAREIKEIWRLERVVVVPIILSATGIVPKSLTASLDVLGLSHSLVQTMQKYTILHTCSMLRGVLDGFSH

SEQ ID NO: 2032 - protein, 1188 aa, Hermetia illucens
MRRKRNLRSGTDNRRESSDLVTGSGSRNGQHGVETASRGAVRRLGATTTRSTAPPAAAVSPQSVATTSAGSRRKRMKWTEEMNLFIIRSYYEITAGAGITSYRPLLHQRFVERFPQFAHVTVQRVADQYRFITRSDTIPATIRERVRLEVIGETGDRESMGAEAAASTTPRRTAGNRFSTRRSTLLHRPAEVSAEVRDEFQRACIEFSDMDPLHRPGIPRLYASPATPGILSQINDEIASRLCADMSLLQLQSLVYCGAVAAIRLHGQKIRFRVIGLSDKRDPPWKIRLERRRDSLRQDIARLIQISTGNASRRVRNKVQRVYRNYAIPCETPVVEILDTLKQKLSVICSRLRRYGESYSRRVQNATYARNQRSFFRSLNESQQSAQTIQFSVTEAKEYWGGLWGLPAQHAEHAEWITAEGTRHANTPGMNFADVTEEEVRRAINISKNWRGPGLDRVQNFWYKKFTSVHSRLARSINEVMSRPEEFPPFLTAGITYLIPKKDTVQDPADTRPITCLPTLYKFITSIISGRINAHLETNNILSEEQKGCRVGSRGCKEQLIIDSVVVGQATRGQRNLFSCYIDYAKAFDSVPHTWLIDILHLYRIDPKLIKFLATVMEGWHTTLSVRTSEGANTSEPIRIRRGIFQGDSLSPLWFCMALNPLSWLLNDTRGHGFAIKYGLRAKCELTHLMYLDDIKLYAGTDNHLRSLLRIIDMFSRDIRMEFGLDKCRIQAIRKGHHEPHAGHSIGDLHIEAMTETDFYKYLGILQGTHARVGDLKEALLSEFLRRVKLVLKSHLSGKNKISALNVFAIPSLAYAFGILPWTKTDLENVQRRIRTTMSKFRMHHPKSAVERMNLPRDIGGRGVVDVAAQHHRQVDSLRAYFYSKEQASPLHAAVCKADYGLTPLNLKDRSFNPLSGVRSDQERIEEWKSKAMHGKHVNCLWQPFVDLHLSNRWLCAGELFAETEGFMCAIQDGVVATRAYKKLIMKERVENDQCRMCGSALETLDHLISGCTVMAPVQYITRHNAVCKVIHQNLAYKHGLITGTCPVYRYEPQAVLDSSAYSMYWDRQVLTDRHTAHNKPDVLLVDKTGRSAYIIDVAIPHNSNIERKYVEKKVNYEPLAREIKEIWRLERVVVVPIILSATGIVPKSLTASLDVLGLSHSLVQTMQKYTILHTCSMLRGVLDGFSH

SEQ ID NO: 2033 - protein, 1195 aa, Hermetia illucens
MHHQKMRRRRNLRSGTDNRRESSDLVTGSGSRNGQHGVETASRGAVRRLGATTTRSTAPPAAAVSPQSVATTSAGSRRKRMKWTEEMNLFIIRSYYEITAGAGTTSYRPLLHQRFVERFPQFAHVTVQRVADQYRFITRSDTIPATIRERVRLEVIGETGDRESMGAEAAASTTPRRTAGNRFSTRRSTLLHRPAEVSAEVRDEFQRACIEFSDMDPLHRPGIPRLYASPATPGILSQINDEIASRLCADMSLLQLQSLVYCGAVAAIRLHGQKIRFRVIGLSDKRDPPWKIRLERRRDSLRQDIARLIQISTGNASRRVRNKVQRVYRNYAIPCETPVVEILDTLKQKLSVICSRLRRYGESYSRRVQNATYARNQRSFFRSLNESQQSAQTIQFSVTEAKGSEYWGGLWGLPAQHAEHAEWITAEGTRHANTPGMNFADVTEEEVRRAINISKNWRGPGLDRVQNFWYKKFTSVHSRLARSINEVMSRPEEFPPFLTAGITYLIPKKDTVQDPADTRPITCLPTLYKFITSIISGRINAHLETNNILSEEQKGCRVGSRGCKEQLIIDSVVVGQATRGQRNLFSCYIDYAKAFDSVPHTWLIDILHLYRIDPKLIKFLATVMQGWHTTLSVRTSEGANTSEPIRIRRGIFQGDSLSPLWFCMALNPLSWLLNDARGHGFAIKYGLRAKCELTHLMYLDDIKLYAGTDNHLRSLLRIIDMFSRDIRMEFGLDKCRIQAIRKGHHEPHAGHSIGDLHIEAMTETDFYKYLGILQGTHARVGDLKEALLSEFLRRVKLVLKSHLSGKNKISALNVFAIPSLAYAFGIMPWTKTDLENVQRRIRTTMSKFRMHHPKSAVERMNLPRDIGGRGVVDVAAQHHRQVDSLRAYFYSKEQASPLHAAVCKADCGLTPLNLKDRSFNPLSGVKSDQERIEEWKSKAMHGKHVNCLWQPFVDLHLSNRWLCAGELFAETEGFMCAIQDGVVATRAYKKLIMKERVENDQCRMCDSALETLDHLISGCTVMAPVQYITRHNAVCKVIHQNLAYKHGLITGTCPVYRYEPQAVLDSSAYSMYWDRQVLTDRHTAHNKPDVLLVDKTGRSAYIIDVAIPHNSNIERKYVEKKVNYEPLAREIKEIWRLERVVVVPIILSATGIVPKSLTASLDVLGLSHSLVQTMQKYTILHTCSMLRGVLDGFSH

SEQ ID NO: 2034 - protein, 1188 aa, Hermetia illucens
MRRKRNLRSGTDNRRESSDLVTGSGSRNGQHGVETASRGAVRRLGATTTRSTAPPAAAVSPQSVATTSAGSRRKRMKWTEEMNLFIIRSYYEITAGAGITSYRPLLHQRFVERFPQFAHVTVQRVADQYRFITRSDTIPAAIRERVRLEVIGETGDRESMGAEAAASTTPRRTAGNRFSTRRSTLLHRPAEVSAEVRDEFQRACIEFSDMDPLHRPGIPRLYASPATPGILSQINDEIASRLCADMSLLQLQSLVYCGAVAAIRLHGQKIRFRVIGLSDKRDPPWKIRLERRRDSLRQDIARLIQISTGNASRRVRNKVQRVYRNYAIPCETPVVEILDTLKQKLSVICSRLRRYGESYSRRVQNATYARNQRSFFRSLNESQQSAQTIQFSVTEAKEYWGGLWGLPAQHAEHAEWITAEGTRHANTPGMNFADVTEEEVRRAINISKNWRGPGLDRVQNFWYKKFTSVHSRLARSINEVMSRPEEFPPFLTAGITYLIPKKDTVQDPADTRPITCLPTLYKFITSIISGRINAHLETNNILSEEQKGCRVGSRGCKEQLIIDSVVVGQATRGQRNLFSCYIDYAKAFDSVPHTWLIDILHLYRIDPKLIKFLATVMEGWHTTLSVRTSEGANTSEPIRIRRGIFQGDSLSPLWFCMALNPLSWLLNDTRGHGFAIKYGLRAKCELTHLMYLDDIKLYAGTDNHLRSLLRIIDMFSRDIRMEFGLDKCRIQAIRKGHHEPHAGHSIGDLHIEAMTETDFYKYLGILQGTHARVGDLKEALLSEFLRRVKLVLKSHLSGKNKISALNVFAISSLAYAFGILPWTKTDLENVQRRIRTTMSKFRMHHPKSAVERMNLPRDIGGRGVVDVAAQHHRQVDSLRAYFYSKEQASPLHAAVCKADCGLTPLNLKDRSFNPLSGVKSDQERIEEWKSKAMHGKHVNCLWQPFVNLHLSNRWLCAGELFAETEGFMCAIQDGVVATRAYKKLIMKERVENDQCRMCGSALETLDHLISGCTVMAPVQYITRHNAVCKVIHQNLAYKHGLITGTCPVYRYEPQAVLDSSAYSMYWDRQVLTDRHTAHNKPDVLLVDKTGRSAYIIDVAIPHNSNIERKYVEKKVNYEPLAREIKEIWRLERVVVVPIILSATGIVPKSLTASLDVLGLSHSLVQTMQKYTILHTCSMLRGVLDGFSH

SEQ ID NO: 2035 - protein, 1136 aa, Hermetia illucens
MRRRRNLRSGTDNRRESSDLVTGSGSRNGQHGVETASRGAVRRLGATTTRSTAPPAAAVSPQSVATTSAGSRRKRMKWTEEMNLFIIRSYYEIAAGAGTTSYRPLLHQRFVERFPQFAHVTVQRVADQCRFITRSDTIPATIRERVRLEVIGETGDRESMGAEAAASTTPRRTAGNRFSTRRSTLLHHPAEVSAEVRDEFQRACIEFSDMDPLHRPGIPRLYASPATPGILSQINDEIASRLCADMSLLQLQSLVYCGAVAAIRLHGQKIRFRVIGLSDKRDPPWKIRLERRRDSLRQDIARLIQISTGSASRRVRNKVQRVYRNYAIPCETPVVEILDTLKQKLSVICSRLRRYGESYSRRVQNATYARNQRSFFRSLNESQQSAQTIQFSVTEAKEYWGGLWGLPAQHAEHAEWITAEGTRHANTPGMSFADVTEEEVRRAINSSKNWRGPGLDRVQNFWYKKFTSVHSRLARSINEVMSRPEEFPPFLTAGITYLIPKKDTGQDPADTRPITCLPTLYKFITSIISGRINAHLETNNILSEEQKGCRVGSRGCKEQLIIDSVVVGPATRGQRNLFSCYIDYAKAFDSVPHTWLIDILHLYRIDPKLIKFLATVMEGWHTTLSVRTSEGANTSEPIPIRRGIFQGDSLSPLWFCMALNPLSWLLNDARGHRFAIKYGLRAKFELTHLMYLDDIKLYAGTDNHLRSLLRIIDMFSRDIRMEFGLDKCRIQAIRKGHHEPHAGHSIGDLHIEAMTETDFYKYLGILQGTHARVDDLKEALLSEFLRRVKLVLKSHLSGKNKISALNVFAIPSLAYAFGILPWTKTDLENVQRRIRTTMSKFRMHHPKSAVERMNLPRDIGGRGVVDVAAQHHRQVDSLRAYFYSKEQASPLHAAVCKADCGLTPLNLKDRSFNPLSGVKSDQERTDEWKSKAMHGKHVNCLWQPFVDLHLSNRWLCAGELFAETEGFMCAIQDGVVATRAYKKLIMKERVENDQCRMCGSALETLDHLISGCTVMAPVQYITRHNAVCKVIHQNLAYKHGLITGTCPVYRYEPQAVLDSSAYSMYWDRQVLTDRHTAHNKPDVLLVEKTGRSAYIIDVAIPHNSNIERKYVEKKVNYEPLAREIKEIWRLERVVVL

SEQ ID NO: 2036 - protein, 1188 aa, Hermetia illucens
MRRRRNLRSGTDNRRESSDLVTGSGSRNGQHGVETASRGAVRRLGATTTRSTAPPAAAVSPQPVATTSAGSRRKRMKWTEEMNLFIIRSYYEITAGAGTTSYRPLLHQRFVERFPQFAHVTVQRVADQYRFITRSDTIPATIRERVRLEVIGETGDRESMGAEAAASTTSRRTAGNRFSTRRSTLLHRPAEVSAEVRDEFQRACIEFSDMDPLHRPGIPRLYASPATPGILSQINDEIASRLCADMSLLQLQSLVYCGAVAAIRLHGQKIRFRVIGLSDKRDPPWKIRLERRRDSLRQDIARLIQISTGNASRRVRNKVQRVYRNYAIPCETPVVEILDTLKQKLSVICSRLRRYGESYSRRVQNATYARNQRSFFRSLNESQQSAQTIQFSVTEAKEYWGGLWGLPAQHAEHAEWITAEGTRHVNTPGMNFADVTEEEVRRAINSSKNWRGPGLDRVQNFWYKKFTSVHSRLARSINEVMSRPEEFPPFLTAGITYLIPKKDTVQDPADTRPITCLPTLYKFITSIISGRINAHLETNNILSEEQKGCRVGSRGCKEQLIIDSVVVGQATRGQRNLFSCYIDYAKAFDSVPHTWLIDILHLYRIDPKLIKFLATVMEGWHTTLSVRTSEGANTSEPIRIRRGIFQGDSLSPLWFCMALNPLSWLLNDARGHGFAIKYGLRAKCELTHLMYLDDIKLYAGTDNHLRSLLRIIDMFSRDIRMEFGLDKCRIQAIRKGHHEPHAGHSIGDLHIEAMTETDFYKYLGILQGTHARVGDLKEALLSEFLRRVKLVLKSHLSGKNKISALNVFAIPSLAYAFGILPWTKTDLENVQRRIRTTMSKFRMHHPKSAVERMNLPRDIGGRGVVDVAAQHHRQVDSLRAYFYSKEQASPLHAAVCKADCELTPFNFKDRSFNPLSGVKSDQERIEEWKSKAMHGKHVNCLWQPFVDLHLSNRWLCAGELFAEMEGFMCAIQDGVVATRAYKKLIMKERVENDQCRMCGSALETLDHLISGCTVMAPVQYITRHNAVCKVIHQNLAYKHGLITGTCPVYRYEPQAVLDSSAYSMYWDRQVLTDRHTAHNKPDVLLVDKTGRSAYIIDVAIPHNSNIERKYVEKKVNYEPLAREIKEIRRFERVVVVPIILSPTGIVPKSLTASLDVLGLSHSLVQTMQKYTILHTCSMLRGVLDGFSH

SEQ ID NO: 2037 - protein, 1029 aa, Hermetia illucens
MGAEAAASTTPRRTAGNRFSTRRSTLLHRIAEVSAEVRDEFQKACIEFSDMDPLHRPGIPRLYASPATPGILSQINDEIASRLCADMSLLQLQSLVYCGAVAAIRLHGQKIRFRVIGLSDKRDPPWKIRLERRRDSLRQDIARLIQISTGNASRRGRNKVQRVYRNYVIPCETPVVEILDTLKQKLSVICSRLRRYGESYSRRVQNATYARNQRSFFRSLNESQQSAQTIQFSVTEAKEYWGGLWGLPAQHAEHAEWITAEGTRHANTPGMNFADVTEEEVRRAINISKNWRGPGLDRVQNFWYKKFTSVHSRLARSINEVMSRPEEFPPFLTAGITYLIPKKDTVQDPADTRPITSLPTLYKFITSIISGRINAHLETNNILSEEQKGCRVGSRGCKEQLIIDSVVVGQATRGQRNLFSCYIDYAKAFDSVPHTWLIDILHLYRIDPKLIKFLATVMEGWHTTLSVRTSEGANTSEPIRIRRGIFQGDSLSPLWFCMALNPLSWLLNNARGHGFAIKYGLRAKCELTHLMYLDDIKLYAGTDNHLRSLLRIIDMFSRDIRMEFGLDKCRIQAIRKGHHEPHAGHSIDDLHIEAMTETDFYKYLGILQGTHARVGDLKEALLSEFLRRVKLVLKSHLSGKNKISALNVFAIPSLAYAFGILPWTKTDLENVQRRIRTTMSKFRMHHPKSAVERMNLPRDIGGRGVVHVAAQHHRQVDSLRAYFYSKEQASPLHAAVCKADCGLTPLNLKDRSFNPLSGVKSDQERIEEWKSKAMHGKHVNCLWQPFVDLHLSNRWLCAGELFAETEGFMCAIQDGVVATRAYKKLIMKERVENDQCRMCGSALETLDHLISDCTVMAPVQYITRHNAVCKVIHQNLAYKHGLITGTCPVYRYEPQAVLDSSAYSMYWDRQVLTDRHTAHNKPDVLLVDKTGRSAHIIDVAIPHNSNIERKYVEKKVNYEPLAREIKEIWRLERVVVVPIILSATGIVPKSLTASLDVLGLSHSLVQTMQKYTILHTCSMLRGVLDGFSH

SEQ ID NO: 2038 - protein, 943 aa, Hermetia illucens
MSLLQLQSLVYCGAVAAIRLHGQKIRFRVIGLSDKRDPPWKIRLERRRDSLRQDIARLIQISTGNASRRVRNKVQRVYRNYAIPCETPVVEILDTLKQKLSVICSRLRRYGESYSRRVQNATYARNQRSFFRSLNESQQSAQTIQFSVTEAKEYWGGLWGLPAQHAEHAEWITAEGTRHANTPGMNFADVTEEEVRRAINISKNWRGPGLDRVQNFWYKKFTSVHSRLARSINEVMSRPEEFPPFLTAGITYLIPKKDTVQDPADTRPITCLPTLYKFITSIISGRINAHLETNNILSEEQKGCRVGSRGCKEQLIIDSVVVGQATRGQRNLFSCYIDYAKAFDSVPHTWLIDILHLYRIDPKLIKFLATVMEGWHTTLSVCTSEGANTSEPIRIRRGIFQGDSLSPLWFCMALNPLSWLLNDARGHGFAIKYGLRAKCELTHLMYLDDIKLYAGTDNHLRSVLRIIDMFSRDIRMEFGLDKCRIQAIRKGHHEPHAGHSIGDLHIEAITETDFYKYLGILQGTHARVGDLKEALLSEFLRRVKLVLKSHLSGKNKISALNVFAIPSLAYAFGILPWTKTDLENVQRRIRTTMSKFRMHHPKSAVERMNLPRDIGGRGVVDVAAQHHRQVDSLRAYFYSKEQASPLHAAVCKADCGLTPLNLKDRSFNPLSGVKSDQERIHEWKSKAIHGKHVNCLWQPFVDLHLSNRWLCAGELFAETEGFMCAIQDGVVATRAYKKLIMKERVENDQCRMCGSALETLDHLISGCTVMAPVQYITRHNAVCKVIHQNLAYKHGLITGTCPVYRYEPQAVLDSSAYSMYWDRQVLTDRHTAHNKPDVLLVDKTGRSAYIIDVATPHNSNIERKYVEKKVNYEPLAREIKEIWRLERVVVVPIILSATGIVPKSLTASLDVLGLSHSLVQTMQKYTILHTCSMLRGVLDGFSH

SEQ ID NO: 2039 - protein, 1183 aa, Hermetia illucens
MRRRRNLRSGTDNRRESSDLVTGSGSRNGQHGVETASLGAVRRLGTTTTRSTAPPAAAVSPQSVATTSAGSRRKRMKWTEEMNLFIIRSYYEITAGTTSYRPLLHQRFVERFPQFAHVTVQRVADQYRFITRSDTIPATIRERVRLEVIGETGDRESMGASTTPRRTAGNRFCTRRSTLLHRPAEVSAEVRDEFQRACIEFSDMDPLHRPGIPRLYASPASPRILSQINDEIASRWCTDMSLLQLQSLHCTCGAVAAIRLHGQKIRFRVIGLSDKRDPPWKIRLERRRDSLRQDIARLIQISTGNASRRVRNKVQRVYRNYAIPCETPVVEILDTLKQKLSVICSRLRRYGESYSRRVQNATYARNQRSFFRSLNESQQSAQTIQFSVTEAKEYWGGLWGLPAQHAEHAEWITAEGTRHANTPGMNFADVTEEEVRRAINISKNWRGPGLDRVQNFWYKKFTSVHSRLARSINEVMSRPEEFPPFLTAGITYLIPKKDTVQDPADTRPITCLPTLYKFITSIISGRINAHLETNNILSEEQKGCRVGSRGCKEQLIIDSVVVGQATKGQRNLFSCYIDYANAFDSVPHTWLIDILHLYRIDPKLMKFLATVMEGWHTTLSVRTSEGANTSEPIRIRRGIFQGDSLSPLWFCIALNPLLWLLNDARGHGFAIKYGLRAKCELTHLMYLDDIKLYAGTDNHLRSLLRIIDMLSRDIRMEFGLDKCRIQAIRKGHHEPHAGHSIGDLHIEAMTETDFYKYLGILQATHARVGDLKEALLSEFLRRVKQVLKSHLSGKNKISALNVFAIPSLAYAFGILPWTKTDLENVQRRIRTTMSKFRMHHPKSAVERMNLPRDIGGRGVVDVAAQHHRQVDSLRAYFYSKEQASPLHAAVCKADCGLTPLNLKDRSFNPLSGLKSDQERIEEWKSKAMYGKHVNCLWQPFVDLHLSNRWLCAGELFAETEGFMCAIQDDVVTTRAYKKLIMKERVENDQCRMCGSALETLDHLISGCTVMAPVQYITRHNAVCKVIHQYLAYKHGLIAGTCSVYRYEPQAVLDSSAYSMYWDRQVLTDRHTAHNKPDVLLVDKTGRSTYIIDVAIPHNSNIERKYVEKKVNYEPLAREIKEIWRLERVVVVPIILSATGIVPKSLTASLDVLGLSHSLVQTMQKYTILHTCSMLRGVLDGFSH

SEQ ID NO: 2040 - protein, 1119 aa, Hermetia illucens
MHHQKMRRRRNLRAGTDNRRESSDLVTGSGSRNGQHGVETASRGAVRRLGATTTRSTAPPAAAVSPQPVATTSAGSRRKRMKWTEEMNLFIIRSYYEITAGAGTTSYRPLLHQRFVERFPQFAHVTVQRVADQYRFITRSDTIPATIRERVRLEVIGETGDRESMGAEAAASTTPRRTTGNRFSTRRSTLLHRPAEVPAEVRDEFETACIEFSDMDPLHRPGIPRLYASPATPGILSQINDEIASRLCADMSLLQLQSLVYCGAVAAIRLHGQKIRFRVIGLSDKRDPPWKIRLEHRRDSLRQDIARLIQISTGNASRRVRNKVQRVYRNYAIPCETPVVEILDTPKQKLSVICSRLRRYGESYSRRVQNATYVRNQGSFFRSLNESQQSAQTIQFSVTEAKEYWGGLWGLPAQHAEHAEWITAEGTRHANTPGVNFADVTEEEVRRAINISKNWRGPGLDRVQNFWYKKFTSVHSRLARSINEVMSRPEEFPPFLTAGITYLIPKKDTVQDPADTRPITCLPTLYKFITSIISGRINAHLETNNILSEEQKGCRVGSRGCKEQLIIDSVVVGQATRGQRNLFSCYIDYAKAFDSVPHTWLIDILHLYRIDPKLIKFLATVMEGWHTTLSVRTSEGANTSEPIRIRRGIFQGDSLSPLWFCMALNPLSWLLNDARGHGFAIKYGLRAKCELTHLMYLDDIKLYAGTDNHLRSLLRIIDMFSRDIRMEFGLDKCRIQAIRKGHHEPHAGHSIGDLHIEAMTETDFYKYLGILQGTHARVGDLKEALLSEFLRRVKLVLKSHLSGKNKISALNVFAIPSLAYAFGILPWTKTDLENVQRRIRTTMSKFRMHHPKSAVERMNLPRDIGGRGVVDVAAQHHRQVDSLRAYFYSKEQASPLHAAVCKADCGLTPLNLKDRSFNPLSGVKSDQERIEEWKSKAMHGKHVNCLWQPFVDLHLSNRWLCAGELFAETEGFMCAIQDGVVATRAYKKLIMKERVENDQCRMCGSALETLDDLISGCTVMAPVQYITRHNAVCKVIHQNLAYKHGLITGTCPVYRYEPQAVLDSSAYSMYWDRQVLTDRHTAHNKPDVLLVDKTGRSAYIIDVATPNIATLNGNTCKRR

SEQ ID NO: 2041 - protein, 1094 aa, Hermetia illucens
MKWTEEMNLFIIHSYYEITAGAGTASYRPLLHQRFVERFPQFAHVTVQRVADQYRFITRSNTIPATIRERVQLEVFRETGDRESMGAKAASSTTPRRTAGNRFSTRRSTLLHRPAEVSAEVRDEFQRACIEFSDMDPLHRPGIPRLYASPATPGILSQINDEIASRLCADMSLLQLQSLVYCGAVAAIKLHGQKIRFRVIGLSDKRDPPWKIRLERRRDSLRQDIARLIQISTGNASRRVRNKVQRVYRNYAIPCETPVVEILDTLKQKLSVICSRLRRYGESYSRRVQNATYARNQRSFFRSLNESQQSAQTIQFSVTEAKEYWGGLWGLPAQHAEHPEWITTEGTRHANTPGMNFVDVTEEEVRRAINISKNWRGPGLDRVQNFWYKKFTSVHSRLAHSINEVMSRPEEFPPFLTARITYLISKKDTVQDPADTRPITCLPTLYKFITSIVSGWINAHLETNNILSEEQMGCRVGSRGCKEQLIIDSVVVGQATRGQRNLFSCYIDYAKAFDNVPHTWLIDILYLYRIDPKLIKFLATVMEGWHTTLSVRTSEGANTSEPIRIRRGIFQGYLLSPLWLCMALNPLSWLLNDARGHGFAIKYGLCANCELTYLMYLDDIKLYAGTDNHLRSLLRIIDMFSRDIRMEFGLDKCRIQAIRKGHDEPHAGHSIGDLHIEAITETDFYKYLGVLQGTHARVGDLKEALLSEFLRRVKLVLKSHLSGKNKISALNVFAIPSLAYAFGILPWTKTDLENVQRQMRTTMSKFRMHHPKSAVERMNLPRDIGGRGVVDVAAQHHRQVDSLRIYFYSKEQASALHAAVCKADCGLTPLNLKDRSFNPLSGVKSDQERIDEWKSKAMHDKHVNCLWQPFVDLHLSNRWLCAGELFAETEGFMCAIQDGVVATRAYKKLIMKERVENDQCRMCGSALETLDHLISGCTVMAPVQYITRHNAVCKVIHQNLAYKHRLITGTCPVYRYEPQAVLDSSAYSMYWDRQVLTDRHTAHNKPDVLLVDKTGRSAYIIDVCIPRNSNVERKYVEKKVNYEPLAREIKEIWRLERVVVVPIILSATGIVPKSLTASLDVLGLSHSLVQTMQK

SEQ ID NO: 2042 - protein, 1188 aa, Hermetia illucens
MRRRRNLRSGTDNRRESSDLVTGSGSRNGQHGVETASRGAVRRLGATTTRSTAPPAAAVSPQPVAATSAGSRRKRMKWTEEMNLFIIRSYYEITAGAGTTSYRPLLHQRFVERFPQFAHVTVQRVADQYRFITRSDTIPATIRERVRLEVIGETGDRESMGAEATASTTPRRTAGNRFSTRRSTLLHRPAEVSAEVRDEFQRACIEFSDMDPLHRPGIPRLYASPATPGILSQINDEIASRLCADMSLLQLQSLVYCGAVAAIRLHGQKIRFRVIGLSDKRDPPWKIRLERRRDSLRQDIARLIQISTGSASRRVRNKVQRVYRNYAIPCETPVVEILDTLKQKLSVICSRLRRYGESYSRRVQNATYARNQRSFFRSLNESQQSAQTIQFSVTEAKEYWGGLWGLPAQHAEHAEWITAEGTRHVNTPGMNFADVTEEEVRRAINSSKNWRGPGLDRVQNFWYKKFTSVHSRLARSINEVMSRPEEFPPFLTAGITYLIPKKDTVQDPADTRPITCLPTLYKFITSIISGRINAHLETNNILSEEQKGCRVGSRGCKEQLIIDSVVVGQATRGQRNLFSCYIDYAKAFDSVPHTWLIDILHLYRIDPKLIKFLATVMEGWHTTLSVRTSEGANTSEPIRIRRGIFQGDSLSPLWFCMALNPLSWLLNDARGHGFAIKYGLRAKCELTHLMYLDDIKLYAGTDNHLRSLLRIIDMFSRDIRMEFGLDKCRIQAIRKGHHEPHAGHSIGDLHIEAMTETDFYKYLGILQGTHARVGDLKEALLSEFLRRVKLVLKSHLSGKNKIGALNVFAIPSLAYAFGILPWTKTDLENVQRRIRTTMSKFRMHHPKSAVERMNLPRDIGGRGVVDVAAQHHRQVDSLRAYFYSKEQASPLHAAVCKADCGLTPLNLKDRSFNPLSGVKSDQERIEEWKSKAMHGKHVNCLWQPFVDLHLSNRWLCAGELFAETEGFMCAIQDGVVATRAYKKLIMKERVENDQCRMCGSALETLDHLISGCTVMAPVQYITRHNAVCKVIHQNLAYKHGLITGTCPVYRYEPQAVLDSSAYSMYWDRQVLTDRHTAHNKPDVLLVDKTGRSAYIIDVAIPHNSNIERKYVEKKVNYEPLAREIKEIWRLERVVVVPIILSATGIVPKSLTASLDVLGLSHSLVQTMQKYTILHTCSMLRGVLDGFSH

SEQ ID NO: 2043 - protein, 1193 aa, Hermetia illucens
MHHQKMRRRRNLRSGTDNRRESSDLVTGSGSRNGQHGVETASRGAVRRLGATTTRSTAPPAAAVSPQSVATTSAGSRRKRMKWTEEMNLFIIRSYYEITAGAGTTSYRPLLHQRFVERFPQFAHVTVQRVADQYRFITRSDTIPATIRERVQLEVIGETGDRESMGAEAAASTTPRRTAGNRFSTRRSTLLHRPAEVSAEVRDEFQRACIEFSDMDPLHRPGIPRLYASPATPGILSQINDEIASRLCADMSLLQLQSLVYCGAVAAIRLHGQKIRFRVIGLSDKRDPPWKIRLERRRDSLRQDIARLIQISTGNASRRVRNKVQRVYRNYAIPCETPVVEILDTLKQKLSVICSRLRRYGESYSRRVQNATYARNQRSFFRSLNESQQSAQTIQFSVTEAKEYWGGLWGLPAQHAEHAEWITAEGTRHANIPGMNFADVTEEEVRRAINISKNWRGPGLDRVQNFWYKKFTSVHSRLARSINEVMSRPEEFPPFLTAGITYLIPKKDTVQDPADTRPITCLPTLYKFITSIISGRINAHLETNNILSEEQKGCRVGSRSCKEQLIIDSVVVGQATRGQRNLFSCYIDYAKAFDSVPHTWLIDILHLYRIDPKLIKFLATVMEGWHTTLSVRTSEGANTSEPIRIRRGIFQGDTLSPLWFCMALNPLSWLLNDARGHGFAIKYGLRAKCELTHLMHLDDIKLYAGTDNHLRSLLRIIDMFSRDIRMEFGLDKCRIQAIRKGHHEPHAGHSIGDLHIEAMTETDFYKYLGILQGTHARVGDLKEALLSEFLRRVKLVLKSHLSGKNKISALNVFAIPSLAYAFGILPWTKTDLENVQRRIRTTMSKFRMHHPKSAVERMNLPRDIGGRGVVDVAAQHHRQVDSLRAYFYSKEQASPLHAAVCKADCGLTPLNLKDRTFNPLSGVKSDQERIEEWKSKAMHGKHVNCLWQPFVDLHLSNRWLCAGELFAETEGFMCAIQDGVVATRAYKKLIMKERVENDQCRMCGSALETLDHLISGCTVMAPVQYITRHNAVCKVIHQNLAYKHGLITGTCPVYRYEPQAVLDSSAYSMYWDRQVLTDRHTAHNKPDVLLVDKTGRSAYIIDVAIPHNSNIERKYVEKKVNYEPLAREIKEIWRLERVVVVPIILSATGIVPKSLTASLDVLGLSHSLVQTMQKYTILHTCSMLRGVLDGFSH

SEQ ID NO: 2044 - protein, 1183 aa, Hermetia illucens
MHHQKMRRRRDLRSGTDNRRESSDLVTGSGSRNGQHGVETASRGAVRRLGATTTRSTAPPAAAVSPQSVATTSAGSRRNRMKWTEEMNLFIIRSYYEITAGAGITSYRPLLHQRFVERFPQFAHVTVQRVADQYRFTCSRVRLEVIGETGDRESMGAEAAASTTPRRTAGNRFSTRRSTLLHRPAEVSAEVRDEFQRACIEFSDMDPLHRPGIPRLYASPATPRILSQINDEIASRLCADMSLLQLQSLVYCGAVAAIRLHGQKIRFRVIGLSDKRDPPWKIRLERRRDSLRQDIARLIQISTGNASRRVRNKVQRVYRNYAIPCETPVVEILDTLKQKLSVICSRLRRYGESYSRRVQNATYARNQRSFFRSLNESQQSAQTIQFSVTEAKEYWGGLWGLPAQHAEHAEWITAEGTRHANTPGMNFADVTEEEVRRAINISKNWRGPGLDRVQNFWYKKFTSVHSRLARSINEVMSRPEEFPPFLTAGITYLIPKKDTVQDPADTRPITCLPTLYKFITSIISGRINAHLETNNILSEEQKGCRVGSRGCKEQLIIDSVVVGQATRGQRNLFSCYIDYAKAFDSVPHTWLIDILHLYRIDPKLIKFLATVMEGWHTTLSVRTSEGANTSEPIRIRRGIFQGDSLSPLWFCMALNPLSWLLNDARGHGFAIKYGLRAKCELTHLMYLDDIKLYAGTDNHLRSLLRIIDMFSRDIRMEFGLDKCRIQAIRKGHHEPHAGHSIGDLHIEAMTETDFYKYLGILQGTHARVGDLKEALLSEFLRRVKLVLKSHLSGKNKISALNVFAIPSLAYAFGILPWTKTDLENVQRRIRTTMSKFRMHHPKSAVERMNLPRDIGGRGVVDVAAQHHRQVDSLRAYFYSKEQASPLHAAVCKADCGLTPLNLKDRSFNPLSGVKSDQERIEEWKSKAMHGKHVNCLWQPFVDLHLSNRWLCAGELFAETEGFMCAIQDGVVATRAYKKLIMKERVENDQCRMCGSALETLDHFISGCTVMAPVQYITRHNAVCKVIHQNLAYKHGLITGTCPVYRYEPQAVLDSSAYSMYWDRQVLTDRYTAHNKPDVLLVDKTGRSAYIINVAIPHNSNIERKYVEKKVNYEPLAREIKEIWRLERVVVVPIILSATGIVPKSLTACLDVLGLSHSLVQTMQKYTILHTCSMLRGVLDGFSH

SEQ ID NO: 2045 - protein, 1053 aa, Hermetia illucens
MRRRRNLRSGTDNRRESSDLVTGSGCRNGQHGVETASRGAVRRLGATTTRSTAPPAAAVSPQSVTTTSAGSRRKRMKWTEEMNLFIIRSYYEITAGAGTTSYRPLLHQRFVERFPQFAHVTVQRVADQYRFITRSDTIPATIRERVRLEVIGETGDRESMRAEAAASTTSRRTAGNRFSTCRSTLLHHPAEVSAEVRDEFQRACIEFSDMDPLHRPGIPRLYASPATPGILSQINDEIASRLCADMSLLQLQSLVYCGAVAAIRLHGQKIRFRVIGLSDKRDPPWKIRLERRRDSLRQDIARLIQISTGNASRRVRNKVQRVYRNYAIPCETPVVEILDTLKQKLSVICSRLRRYGESYSRRVQNATYARNQRSFFRSLNESQQSAQTIQFSVTEAKEYWGGLWGLPAQHAEHAAWITAEGTRHANTPGMNFADVTEEEVRRAINISKNWRGPGLDRVENFWYKKFTSVHSRLARSINEVMSRPEEFPPFLTAGITYLIPKKDTAQDPADTRPITCLPTLYKFITSIISGRINAHLETNNILSEEQKGCRVGSRGCKGQLIIDSVVVGQATRGQRNLFSCYIDYAKAFDSVPHTWLIDILHLYRIDPKLIKFLATVMEGWHTTLLVRTSEGANTSEPIRIRRGIFRGDSLSPLWFCMALNPLSWLLNDARGHGFAIKYGLRAKCELTHLMYLDDIKLYAGTDNHLRSVLRIIDMFSRDIRMEFGLDKCRIQAIRKGHHEPHAGHSIGDLHIEAMTETDFYKYLGILQGTHARVGDLKEALLSEFLRRVKLVLKSHLSGKNKISALNVFAIPSLAYAFGILPWTKTDLENVQRRIRTTMSKFRMHHPKSAVERMNLPRDIGGRGVVDVAAQHHRQVDSLRAYFYSKEQASLLHAAVCKADCGLTPLNLKDRSFNPLTGVKSDQERIEEWKSKAMHGKHVNCLWQPFVDLHLSNRWLCAGELFAETEGFMCAIQDGVVATRAYKKLIMKERVENDQCRMCGSALETLDHLISGCTVMAPVQYITRHNAVCKVIHQNLAYKHGLITGTCPVYRYEP

SEQ ID NO: 2046 - protein, 1193 aa, Hermetia illucens
MHHQKMRRRRNLRSGTDNRRESSDLVTGSGSRNGQHGVETASRGAVRRLGATTTRSTAPLAAAVSPQSVATTSAGSRRKRMKWTEEMNLFIIRSYYEITAGAGTTSYRPLLHQRFVERFPQFAHVTVQRVADQYRFITRSDTIPATIRERVRLEVIGETGDRESMGAEAAASTTSRRTAGNRFSTRRSTLLHRPAEVSAEVRDEFQRACIEFSDMDPLHRPGIPRLYASPATPGILSQINDEIASRLCADMSLLQLQSLVYCGAVAAIRLHGQKIRFRVIGLSDKRDPPWKIRLERRRDSLRQDIARLIQISTGNASRRVRNKVQRVYRNYAIPCETPVVEILDTLKQKLSVICSRLRRYGESYSRRIQNATYARNQRSFFRSLNESQQSAQTIQFSVTEAKEYWGGLWGLPAQHAENAEWITAEGTRHVNTPGMNFADVTEEEVRGAINSSKNWRGPGLDRVQNFWYKKFTSVHSRLARSINEVMSRPEEFPPFLTAGITYLIPKKDTVQDPADTRPITCLPTLYKFITSIISGRINAHLETNNILSEEQKGCRVGSRGCKEQLIIDSVVVGQATRGQRNLFSCYIDYAKAFDSVPHTWLIGILHLYRIDPKLIKFLATVMEGWHTTLSVRTSEGANTSEPIRIRRGIFQGDSLSPLWFCMALNPLSWLLNDARGHGFAIKYGLRAKCELTHLMYLDDIKLYAGTDNHLRSLLRIIDMFSRDIRMEFGLDKCRIQAIRKGHHEPHAGHSIGDLHIEAMTETDFYKYLGILQGTHARVGDLKEALLSEFLRRVKLVLKSHLSGKNKISALNVFAIPSLAYAFGILPWTKTDLENVQRRIRTTMSKFRMHHPKSAVERMNLPRDIGGRGVVDVAAQHHRQVDSLRAYFYSKEQASPLHAAVCKADCGLTPLNLKDRSFNPLSGVKSDQERIEEWKSKAMHGKHVNCLWQPFVDLHLSNRWLCAGELFAETEGFMCAIQDGVVATRAYKKLIMKERVENDQCRMCGSALETLDHLISGCTVMAPVQYITRHNAVCKVIHQNLAYKHGLITGTCPVYRYEPQAVLDSSAYSMYWDRRVLTDRHTAHNKPDVLLVDKTGRSAYIIDVAIPHNSNIERKYVEKKVNYEPLAREIKEIWRLERVVVVPIILSATGIVPKSLTASLDVLGLSHSLVQTMQKYTILHTCSMLRGVLDGFSH

SEQ ID NO: 2047 - protein, 1193 aa, Hermetia illucens
MHHQKMRRRRNLRAGTDNRRESSDLVTGSGSRNGQHGVETASRGAVRRLGATTTRSTAPSAAAVSPQPVATTSAGSRRKRMKWTEEMNLFIIRSYYEITAGAGTTSYRPLLHQRFVERFPQFAHVTVQRVADQYRFITRSDTIPATIRERVRLEVIGETGDRESLGAEAAASTTPRRTAGNRFSTRRSTLLHRPAEVSAEVRDEFQRACIEFSDMDPLHRPGIPRLYASPATPGILSQINDEIASRLCADMSLLQLQSLVYCGAVAAIRLHGQKVRFRVIGLSDKRGPPWKIRLERRRDSLRQDIARLIQISTGNASRRVRNKVQRVYRNYAIPCETPVVEILDTLKQKLSVICSRLRRYGESYSRRVQNATYARNQRSFFRSLNESQQSAQTIQFSVTEAKEYWGGLWGLPAQHAEHAEWITAEGTRHANTPGMNFADVTEEEVRRAINSSKNWRGPGLDRVQNFWYKKFTSVHSQLARSINEVMSRPEEFPPFLTAGITYLIPKKDTVQDPADTRPITCLPTLYKFITSIISGTINAHLETNNILSEEQKGCRVGSRGCKEQLIIDSVVVGQATRGQRNLFSCYIDYAKAFDSVPHTWLIDILHLYRIDPKLIKFLATVMEGWHTTLSVRTSEGANTSEPIHIRRGIFQGDSLSPLWFCVALNPLSWLLNDARGHGFAIKYGLRAKCELTHLMYLDDIKLYAGTDNHLRSLLRIIDMFSRDIRMEFGLDKCRIQAIRKGHHEPHAGHSIGDLHIEAMTETDFYKYLGILQGTHARVGDLKEALLSEFLRRVKLVLKAHLSGKNKISALNVFAIPSLAYAFGILPWTKTDLENVQRRIRTTMSKFRMHHPKSAVERMKLHRDIGGRGVVDVAAQHHRQVDSLRAYFYSKEQASPLHAAVCKADCGLTPLNLKDRSFNPLSGVKSDQERIEEWKSKATHGKHVNCLWQPFVDLHLSNRWLCAGELFAETEGFMCAIQDGVVATRAYKKLIMKERVENDQCRMCGSALETLDHLISGCTVMAPVQYITRHNAVCKVIHQNLAYKHGLITGTCPVYRYEPQAVLDSSAYSMYWDRQVLTDRHTAHNKPDVLLVDKTGRSAYIIDVAIPHNSNIERKYVEKKVNYEPLAREIKDIWRLERVVVVPIILSATGIVPKSLTASLDVLGLSHSLVQTMQKYTILHTCSMLRGVLDEFSH

SEQ ID NO: 2048 - protein, 1105 aa, Hermetia illucens
MRRRRNLRFGTDNRRESSDLVTGSGSRNGQHGVETASRGAVRRLGATTTRSTAPPAAAVSPQPVATTSAGSRRKRMKWTEEMNLFIIRSYYEITAGAGTTSYRPLLHQRFVERFPQFAHVTVQRVADQYRFITRSDTIPATIRERVRLEVIGETGDRESMGAEAAASTTSRRTAGNRFSTRRSTLLHRPAEVSAEVRDEFQRACIEFSDMDPLHRPGIPRLYASPATPGILSQINDEIASGLCADMSLLQLQSLVYCGAVAAIRLHGQKIRFRVIGLSDKRDPPWKIRLERRRDSLRQDIARLIQISTGNASRRVRNKVQRVYRNYAIPCETPVVEILDTLKQKLSVICSRLRRYGESYSRRVQNATYARNQRSFFRSLNESQQSTQTIQFSVTEAKEYWGGLWGLPAQHAEHAEWITAEGTRHVNTPGMNFADVTEEEVRRAINSSKNWRGPGLDRVQNFWYKKFTSVHSRLARSINEVMSRPEEFPPFLTAGITYLIPKKDTVQDPADTRPITCLPTLYKFITSIISGRINAHLETNNILSEEQKGCRVGSRGCKEQLIIDSVVVGQATRGQRNLFSCYIDYAKAFDSVPHTWLIDILHLYRIDPKLIKFLATVMEGWHTTLSVRTSEGANTSEPIRIRRGIFQGDSLSPLWFCMALNPLSWLLNDARGHGFAIKYGLRAKCELTHLMYLDDIKLYAGTDNHLRSLLRILDMFSRDIRMEFGLDKCRIQAIRKGHHEPHAGHSIGDLHIEAMTETDFYKYLGILQGTHARFGDLKEALLSEFLRRVKLVLKSHLSGKNKISALNVFAIPSLAYAFGILPWTKTDLENVQRRIRTTMSKFRMHHPKSAVERMNLPRDIGGRGVVDVAAQHHRQVDSLRAYFYSEEQASPLHAAVCKADCGLTPLNLKDRSFNPLSGVKSGQERIEEWKSKAMHGKHVNCLWQPFVDLHLSNRWLCAGELFAETEGFMCAIQDGVVATRAYKKLIMKERVENNQCRMCGSALETLDHLISGCTVMAPVQYITRHNAVCKVIHQNLAYKHGLITGTCPVYRYEPQAVLDSSAYSMYWDRQGLTDRHTAHNKPDVRNLASRAGGCSSHNIVSYRYCT

SEQ ID NO: 2049 - protein, 1193 aa, Hermetia illucens
MHHQKMRRRRNLRSGTDNRRESSDLVTGSGSRNGQHGVETASRGAVRRLGATTTRSTAPPAAAVSPQSVATTSAGSRRKRMKWTEEMNLFIIRSYYEITAGAGTTSYRPLLHQRFVERFPQFAHVTVQRVADQYRFITRSDTIPATIRERVRLEVIGETGDRESMGAEAAASTTPRRTAGNSFSTRRSTLLHRPAEVSAEVRDEFQRACIEFSDMDPLHRPGIPRLYASPATPGILSQINDEIASRLCADMSLLQLQSLVYCGAVAAIRLHGQKIRFRVIGLSDKRDPPWKIRLERRRDSLRQDIARLIQISTGNASRRVRNKVQRVYRNYAIPCETPVVEILDTLKQKLSVICSRLRRYGESYSRRVQNATYARNQRSFFRSLNESQQSAQTIQFSVTEAKEYWDGLWGLPAQHAEHAEWITAEGTRHVNTPGMNFADVTEEEVRGAINSSKNWRGPGLDRVQNFWYKKFTSVHSRLARSINEVMSRPEEFPPFLTAGITYLIPKKDTVQDPADTRPITCLPTLYKFITSIISGRINAHLETNNILSEEQKGCRVGSRGCKEQLIIDSVVVGQATRGQRNLFSCYIDYAKAFDSVPHTWLIDILHLYRIDPKLIKFLATVMEGWHTTLSVRTSEGANTSEPIRIRRGIFQGDSLSPLWFCMALNPLSWLLNDARGHGFAIKYGLRAKCELTHLMYLDDIKLYAGTDNHLRSLLRIIDMFSRDIRMEFGLDKCRIQAIRKGHHEPHAGHSIGDLHIEAMTETDFYKYLGILQGTHARVGDLKEALLSEFLRRVKLVLKSHLSGKNKISALNVFAIPSLAYAFGILPWTKTDLENVQRRIRTTMSKFRMHHPKSAVERMNLPRDIGGRGVVDVAAQHHRQVDSLRAYFYSKEQASPLHAAVCKADCGLTPLNLKDRSFNPLSGVKSDQERIEEWKSKAMHGKHVNCLWQPFVDLHLSNRWLCAGELFAETEGFMCAIQDGVVATRAYKMLIMKERVENDQCRMCGSALETLDHLISGCTVMAPVQYITRHNAVCKVIHQNLAYKHGLITGTCPVYRYEPQAVLDSSAYSMYWDRQVLTDRHTAHNKPDVLLVDKTGRSAYIIDVAIPHNSNIERKYVEKKVNYEPLAREIKEIWRLERVVVVPIILSATGIVPKSLTASLDVLGLSHSLVQTMQKYTILHTCSMLRGVLDGFSH

SEQ ID NO: 2050 - protein, 1029 aa, Hermetia illucens
MGAEAAASTTSRRTAGNRFSTRRSTLLHRPAEVSAEVRDEFQRACIEFSDMDPLHRPGIPRLYASPATPGILSQINDEIASRLCADMSLLQLQSLVYCGAVAAIRLHGQKIRFRVIGLSDKRDPPWKIRLERRRDSLRQDIARLIQISTGNASRRVRNKVQRVYRNYAIPSETPVVEILETLKQKLSVICSRLRRYGESYSRRVQNATYARNQRSFFRSLNESQQSAQTIQFSVTEAKEYWGGLWGLPAQHAEHAEWITAEGTRHANTPGMSFADVTEEEVRRAINSSKNWRGPGLDRVQNFWYKKFTSVHSRLARSINEVMSRPEEFPPFLTAGITYLIPKKDTVQDPADTRPITCLPTLYKFITFIISGRINAHLETNNILSEEQKGCRVGSRGCKEQLIIDSVAVGQATRGQRNLFSCYIDYAKAFDSVPHTWLIDILHLYRIDPKLIKFLATVMEGWHTTLSVRTSEGANTSEPIRIRRGIFQGDSLSPLWFCMAQNPLSWLLNDARGHGFAIKYGLRAKCELTHLMYLDDIKLYAGTDNHLRSLLRIIDMFSRVIRMKFGLDKCRIQAIRKGHHEPHAGHSIGDLHIEAMTETDFYKYLGILQGTHARVGDLKEALLSEFLRRVKLVLKSHLSGKNKISALNVFAIPSLAYAFGILPWTKTDLENVQRRIRTTMSKFRMHHPKSAVERMNLPRDIGGRGVVDVAAQHHRQVDSLRAYFYSKEQASPLHAAVCKADCGLTPLNLKDRSFNPLSGVKSDQERIDEWKSKAMHGKHVNCLWQPFVDLHLSNRWLCAGELFAETEGFMCAIQDGVVATRAYKKLIMKERVENDQCRMCGSALETLDHLISGCTVMAPVQYITRHNSVSKVIHQNLAYKHGLITGTCPVYRYEPQAVLDSSAYSMYWDRQVLTDRHTAHNKPDVLLVDKTGRSAYIIDVAIPHNSNIERKYVEKKVNYEPLAREIKEIWRLERVVVVPIILSATGIVPKSLTASLDVLGLSHSLVQTMQKYTILHTCSMLRGVLDGFSH

SEQ ID NO: 2051 - protein, 1182 aa, Hermetia illucens
MRRRRNLRSGTDNRRESSDLVTGSGSRNGQHDVETASRGAVRRLGATTTRSTAPPAAAVSPQPVATTSAGSRRKRMKWTEEMNLFIIRSYYEITAGAGTTSYRPLLHQRFVERFPQFAHVTVQRVADQYRFITRSDTIPATIRERVRLEVIGETGDRESMGAEAAASTTPRRTAGNRFSTRRSTLLHRPAEVSAEVRDEFQRACIEFSDMDPLHRPGIPRLYASPATPGILSQINDEIASRLCADMSLLQLQSLVYCGAVAAIRLHGQKIRFRVIGLSDKRDPPWKIRLERRRDSLRQDIARLIQISTGSASRRVRNKVQRVYRNYAIPCETPVVEVLDTLKQKLSVICSRLRRYGESYSRRVQNATYARNQRSFFRSLNESQQSAQTIQFSVTEAKENWGGLWGLPAQHAEHAEWITAEGTRHVNTPGMNFADVTEEEVRRAINSSKNWRGPGLDRVQNFWYKKFTSVHSQLARSINEVMSRPEEFPPFLTAGITYLIPKKDTVQDPADTRPITCLPTLYKFITSIISGRINAHLETNNILSEEQKGCRVGSRGCKEQLIIDSVVVGQATTGQRNLFSCYIDYAKAFDSVPHTWLIDILHLYRIDPKLIKFLPTVMEGWHTTLSVRTSEGANTSEPIRIRRGIFQGDSLSPLWFCVALNPLSWLLNDARGHGFAIKYGLRAKCELTHLMYLDDIKLYAGTDNHLRSLLRIIDMFSRDIRMEFGLDKCRIQAIRKGHHEPHAGHSIGDLHIEAMTETDFYKYLGILQGTHARVGDLKEALLSEFLRRVKLVLKSHLSGKNKISALNVFAIPSLAYAFGILPWTKTDLENVQGRIRTTMSKFRMHHPKSAVERMNLPRDIGGRGVVDVAAQHHRQVDSLRAYFYSKEQASPLHAAVCKADCGLTPLNLKDRSFNPLSGVKSDQERIEEWKSKAMHGKHVNCLWQPFVDLHLSNRWLCAGELFAETEGFMCAIQDGVVATRAYKKLIMKERVENDQCRMCGSALETLDHLISGCTVMAPVQYITRHNAVCRVIHQNLAYKHGLITGTCPVYRYEPQAVLDSSAYSMYWDRQVMTDRHTAHNKPDVLLVDKTGRSAYIIDVAIPHNSNIERKYVEPLAREIKEIWRLERVVVVPIILSATGIVPKSLTASLDVLGLSHSLVQTMQKYTILHTCSMLRGVLDGFSH

SEQ ID NO: 2052 - protein, 1029 aa, Hermetia illucens
MGAEAAASTTSRRTAGNRFSTRRSTLLHRPAEVSAEVRDEFQRACIEFSDMDPLHRPGIPRLYASPATPGILSQINDEIASRLCADMSLLQLQSLVYCGAVVAIRLHGQKICFRVIGLSDKRDPPWKIRLERRRDSLRQDIARLIQISTGNASRRVRNKVQRVYRNYAIPCETPVVEILDTLKQKLSVICSRLRRYGESYSRRVQNATYARNQRSFFRSLNESQQSAQTIQFSVTEAKEYWGGLWGLPAQHAEHAEWITAEGTRHVNTPGMNFADVTEEEVRRAINSSKNWRGPGLDRVQNFWYKKFTSVHSRLARSINEVMSRPEEFPPFLTAGITYLIPKKDTVQDPADTRPITCLPTLYKFITSIISGRINAHLETNNILSEEQKDCRVGSRGCKEQLIIDSVVVEQATRGQRNLFSCYIDYAKAFDSVPHTWLIDILHLYRIDPKLIKFLATVMEGWHTTLSVRTSEGANTSEPIRIRRGIFQGDSLSPLWFCMALNPLSWLLNDARGHGFAIKYGLRAKCELTHLMYLDDIKLYAGTDDHLRSLLRIIDMFSRDIRMKFGLDKCRIQAIHKGHHEPHAGHSIGDLHIEAMTETDFYKYLGILQGTHARVGDLKEALLSEFLRRVKLVLKSHLSGKNKISALNVFAIPSLAYAFGILPWTKTNLENVQRRIRTTMSKFRMHHPKSAVERMNLPRDIGGRGVVDVAVQHHRQLDLLRAYFYSKEQESPLHAAVCKADCGLTPLNLKDRSFNPLSGVKSDQERIEEWKSKAMRGKHVNCLWQPFVDLHLPNRWLCAGELFAETEGFMCAIQDGVVATRAYKKLIMKERVENDQCRMCGSALETLDHLISGCTVMVPVQYITRHNAVCKVIYQNLAYKHGLITGTCPVYRYEPQAVLDSSAYSMYWDRQVLTDRHTAHNKPGVLLVDKTGRSAYIIDVAIPHNSNIERKYVEKKVNYESLAREIKEIWRLERVVVVPIILSATGIVLKSLTACLDVLGLSHSLVQTMQKYTILHTCSMLRGVLDGFSH

SEQ ID NO: 2053 - protein, 1190 aa, Hermetia illucens
MHHQKMRRRRNLRSGTDNRRESSDLVTGSGSRNGQHGVETASRGAVRRLGATTTRSTAPPAAAVSPQSVATTSAGSRRKRMKWTEEMNLFIIRSYYEITAGAGTTSYRPLLHQRFVERFPQFAHVTVQRVADQYRFITRSDTIPATIRERVRLEVIGETGDRESMGAEAAASTTSRRTAGNRFSTRRSTLLHRPAEVSAEVRDEFQRACIEFSDMDPLHRPGIPRLYASPATPGILSQINDEIASRLCADMSLLQLQSLVYCGAVAAIRLHGQKIRFRVIGLSDKRDPPWKIRLERRRDSLRQDIARLIQISTGNASRRVRNKVQRVYRNYAIPCETPVVEILDTLKQKLSVICSRLRRYGESYSRRVQNATYARNQRSFFRSLNESQQSAQTIQFSVTEAKEYWGGLWGLPAQHAEHAEWITAEGTRHANTPGMNFADVTEEEVRRAINISKNWRGPGLDRVQNFWYKKFTSVHSRLARSINEVMSRPEEFPPFLTAGITYLIPKKDTVQDPADTRPITCLPTLYKFITSIISGRINAHLETNNILSEEQKGSRVGSRGCKEQLIIDSVVVGQATRGQRNLFSCYIDYAKAFDSVPHTWLIDILHLYRIDPKLIKFLATVMEDTLSVRTSEGANTSEPIRIRRGIFQGDSLSPLWFCMALNPLSWLLNDARGHGFAIKYGLRAKCELTHLMYLDDIKLYAGTDNHLRSLLRIIDMFSRDIRMEFGLDKCRIQAIRKGHHEPHAGHSIGDLHIEAMTETDFYKYLGILQGTHARVGDLRETLLSEFLRRVKLVLKSHLSGKNKISALNVFAIPSLAYAFGILPWTKTDLENVQRRIRTTMSKFRMHHPKSAVERMNLPRDIGGRGVVDVAAQHHRQVDSLRAYFYSKEQASPLHAAVCKADCGLTPLNLKDRSFNPLSGVKSDQERIEEWKSKAMHGKHVNCLWQPFVDLHLSNRWLCAGELFAETEGFMCVIQYGVVATRAYKKLIMKERVENDQYRMCGSALETLDHLISGCTVMAPVQYITRHNAVCKVIHQNLAYKHGLITGTCPVYRYEPQAVLDSSAYSMYWDRQVLTDRHTAHNKPDVLLVDKTGRSAYIIGVAIPHNSNIERKYVEKKVNYEPLAREIKEIWRLERVVVVPIILSATGIVPKFLTASLDVLGLSHSLVQTMQKYTILHTCSMLRGVLDGFSH

SEQ ID NO: 2054 - protein, 943 aa, Hermetia illucens
MSLLQLQSLVYCGAVAAIRLHGQKIRFRVIGLSDKRDPPWKIRLERRRDSLRQDIARLIQISTGNASRRVRNKVQRVYRNYAIPCETPVVEILDTLKQKLSVICSRLRRYGESYSRRVQNATYARNQRSFFRSLNESQQSAQTIQFSVTEAKEYWGGLWGLPAQHAEHAEWITAEGTRHANTPGMNFADVTEEEVRRAINISKNWRGPGLDRVQNFWYKKFTSVHSRLARSINEVMSRPEEFPPFLTAGITYLIPKKDTVQDPADTRPITCLPTLYKFITSIISGRINAHLETNNILSEEQKGCRVGSRGCKEQLIIDSVVVGQATRGQRNLFSCYIDYAKAFDSVPHTWLIDILHLYRIDPKLIKFLATVMEGWHTTLSVRTSEGANTSEPIRIRRGIFQGDSLSPLWFCMALNPLSWLLNDTRGHGFAIKYGLRAKCELTHLMYLDDIKLYAGTDNHLRSLLRIIDMFSRDIRMEFGLDKCRIQAIRKGHHEPHAGHSIGDLHIEAMTETDFYKYLGILQGTHARVGDLKEALLSEFLRRVKLVLKSHLSGKNKVSALNVFAIPSLAYAFGILPWTKTDLENVQRRIRTTMSKFRMHHPKSAVERMNLPRDIGGRGVVDVAAQHHRQVDSLRAYFYSKEQASPLHAAVCKADCGLTPLNLKDRSFNPLSGVKSDQERIEEWKSKAMHGKHVNCLWQPFVDLHLSNRWLCAGELFAETEGFMCAIQDGVVATRAYKKLIMKERVENDQCRMCGSALETLDHLISGCTVMAPVQYITRHNAVCKVIHQNLAYKHGLITGTCPVYRYEPQAVLDSSAYSMYWDRQVLTDRHTAHNKPDVLLVDKTGRSAYIIDVAIPHNSNIERKYVEKKVNYEPLAREIKEIWRLERVVVVPIILSATGIVPKSLTASLDVLGLSHSLVQTMQKYTILHTCSMLRGVLDGFSH

SEQ ID NO: 2055 - protein, 1193 aa, Hermetia illucens
MHHQKMRRRRNLRSGTDNRRESSDLVTGSGSRNGQHGVETASRGAVRRLGATTTRSTAPPAAAVSPQSVATTSAGSRRKRMKWTEEMNLFIIRSYYEITAGAGTTSYRPLLHQRFVERFPQFAHVTVQRVADQYRFITRSDTIPATIRERVRLEVIGETGDRESMGAEAAASTTPRRTAGNRFSTRRSTLLHRPAEVSAEVRDEFQRACIEFSDVDPLHRPGIPRLYAFPATPGILSQINDEIASRLCADMSLLQLQSLVYCGAVAAIRLHGQKIRFRVIGLSDKRDPPWKIRLERRRDSLRQDIARLIQISTGNASRRVRNKVQRVYRNYAIPCETPVVEILDTLKQKLSVICSRLRRYGESYSRRVQNATYARNQRSFFRSLNESQQSAQTIQFSVTEAKEYWGGLWGLPAQHAEHAEWITAEGTRHANTPGMNFADVTEEEVRRAINSSKNWRGPGLDRVQNFWYKKFTSVHSRLARSINEVMSRPEEFPPFLTAGITYLIPKKDTVQDPADTRPITCLPTLYKFITSIISGRINAHLETNNILSEEQKGCRVGSRGCKEQLIIDSVVVGQATRGQRNLFSCYIDYAKAFDSVPHTWLIDILHLYRIDPKLIKFLATVMEGWHTTLSVRTSEGANTSEPIRIRRGIFQGDSLSPLWFCMALNPLSWLLNDARGHGFAIKYGLRAKCELTHLMYLDDIKLYAGTDNHLRSLLRIIDMFSRDIRMEFGLDKCRIQAIRKGHHEPHAGHSIGDLHIEAMTETDFYKYLGILQGTHARVGDLKEALLSEFLRRVKLVLKSHLSGKNKISALNVFAIPSLAYAFGILPWTKTDLENVQRRIRTTMSKFRMHHPKSAVERMNLPRDIGGRGVVDVAAQHHRQVDSLRAYFYSKEQASPLHAAVCKADCGLTPLNLKDRSFNPLSGVKSDQERIEEWKSKAMHGKHVNCLWQPFVDLHLSNRWLCAGELFAETEGFMCAIQDGVVATRAYKKLIMKERVENDQCRMCGSALETLDHLISGCTVMAPVQYITRHNAVCKVIHQNLAYKHGLITGTCPVYRYEPQAVLDSSACSMYWDRQVLTDRHTAHNKPDVLLVDKTGRSAYIIDVAIPHNSNIERKYVEKKVNYEPLAREIKEIWRLERVVVVPIILSATGIVPKSLTASLDVLGLSHSLVQTMQKYTILHTCSMLRGVLDGFSH

SEQ ID NO: 2056 - protein, 1188 aa, Hermetia illucens
MRRRRNLRSGTDNRRESSDLVTGSGSRNGQHGVDTASRGAVRRLGATTTRSTAPPAAAVSPQPVATTSAGSRRKRMKWTEEMNLFIIRSYYEITAGAGTTSYRPLLHQRFVERFPQFAHVTVQRVADQHRFITRSDTIPATIRERVRLEVIGETGDRESMGAEAAASTTSRRTAGNRFSTRRSTLLHRPAEVSAEVRDEFQRACIEFSDMDPLHRPGIPRLYASPATPGILSQINDEIASRLCADMSLLQLQSLVYCGAVAAIRLHGQKIRFRVIGLSDKRDPPWKIRLERRRDSLRQDIARLIQISTGNASRRVRNKVQRVYRNYAIPCETPVVEILDTLKQKLSVICSRLRRYGESYSRRVQNATYARNQRSFFRSLNESQQSAQTIQFSVTEAKEYWGGLWGLPAQHAEHAEWITAEGTRHVNTPGMNFADVTEEEVRRAINSSKNWRGPGLDRVQNFWYKKFTSVHSQLARSINEVMSRPEEFPPFLTAGITYLIPKKDTVQDPADTRPITCLPTLYKFITSIISGRINAHLETNNILSEEQKGCRVGSRGCKEQLIIDSVVVGQATTGQRNLFSCYIDYAKAFDSVPHTWLIDILHLYRIDPKLIKFLATVMEGWHTTLSVRTSEGANTSEPIRIRRGIFQGDSLSPLWFCMALNPLSWLLNDARGHGFAIKYGLRAKCELTHLMYLDDIKLYAGTDNHLRSLLRIIDMFSRDIRMEFGLDKCRIQAIRKGHHEPHAGHSIGDLHIEAMTETDFYKYLGILQGTHARVGDLKEALLSEFLRRVKLVLKSHLSGKNKISALNVFAIPSLAYAFGILPWTKTDLENVQRRIRTTMSKFRMHHPKSAVERMNLPRDIGGRGVVDVAAQHHRQVDSLRAYFYSKEQASPLHAAVCKADCGLTPLNLKDRSFNPLSGVKSDQERIEEWKSKAMHGKHVNCLWQPFVDLHLSNRWLCAGELFAETEGFMCAIQDGVVATRAYKKLIMKERVENDQSRMCGSALETLDHLISGCTVMAPMQYITRHNAVCKVIHQNLAYKHGLITGTCPVYRYEPQAVLDSSAYSMYWDRQVLTDRHTAHNKPDVLLVDKTGRSAYIIDVAIPHNSNIERKYVEKKVNYEPLAREVKEIWRLERVVVVPIILSATGIVPKSLTASLDVLGLSHSLVQTMQKYTILHTCSMLRGVLDGFSH

SEQ ID NO: 2057 - protein, 1121 aa, Hermetia illucens
MHHQKMRRRRNLRSGTDNRRESSDLVTGSGSRNGQHGVETASHGAVRRLGATTTRSTAPPAAAVSPQSVATTSAGSRRKRMKWTEEMNLFIIRSYYEITAGAGTASYRPLLHQRFVERFPQFSIRRSTLLHRPAEVSAEVRDEFQRACIEFSDMDPLHRPGIPRLYASPATPGILSQINDEIASRLCADMSLLQLQSLVYCGAVAAIRLHGQKIHFRVIGLSDKRDPPWKIRLERRRDSLKQDIARLIQISTGNASRRVRNKVQRVYRNYAIPCETPVVEILDTLKQKLSVICNRLRRYGESYSRRVQNATYARNQRSFFRSLNESQQSAQTIQFSVTEAKEYWGGLWGLPAQHAEWITAEGTRHANTPGMNFADVTEEEVRRAINISKNWRGPGLDRVQNFWYKKFTSVHSRLARSTNEVMSRPEEFPPFLTAGITYLIPKKDTVQDPADTRPITCLPTLYKFITSIISGRINAHLETNNILSEEQKGCRVGSRGCKEQLIIDSVVVGQATKGQRNLFSCYIYYAKAFDSVPHTWLIDILHLYRIDPKLIKFLATVMEGWHTTLSVRTSEGANTSEPIRIRRGIFQGDSLSPLWFCMALNPLPWLLNDARGHGFAIKYGLRAKCELTHLMYLDDIKLYAGTDNHLRSLLRIIDMFSRDIRMEFGLDKCRIQAIRKGHHEPHVGHSIGDLHIEAMTETDFYKYLGILQGTHARVGDPKEALLPEFLRRAKLVLKSHLSGKNKISALNVFAIPSLAYAFGILPWTKTDLENVQRRIRITMSKFRMHHPKSAVERMNLPRDIGGRGVVDVAAQHHRQVDSLRAYFYSKEQASPLHAAVCKADCGLTPLNLKDRSFNPLSGVKSDQERIEEWKSKAMHGKHVNCLWQPFVDLHLSNRWLYAGELFAETEGFMCAIQDGAVATRAYKKLIMKERVENDQCRMCGSALETLDHLISGCTVMAPVQYITRHNAVCKVIHQNLAYKHGLMTGTCPVYRYEPQAVLDSSAYSMYWDRQVLTDRHTAHNKTGRSAYIIDVAIPHNSNIERKYVEKKVNYEPLAREIKEIWRLERVVVVPIILSATGIVPKSLTASIDVLQLSHYPVQTMQKYTILHTCSMLRGVLDGFSH

SEQ ID NO: 2058 - protein, 1188 aa, Hermetia illucens
MRRRRNLRSGTDNRRESSDLVTGSGSRNGQHGVETASRGAVRRLGATTTRSTAPPAAAVSPQPVATTSAGSRRKRMKWTEEMNLFIIRSYYEITAGAGTTSYRPLLHQRFVERFPQFAHVTVQRVADQYRFITRSDTIPATIRERVRLEVIGETGDRESMGAEAAASTTSRRTAGNRFSTRRSTLLHRPAEVSAEVRDEFQRACIEFSDMDPLHRPGIPRLYASPATPGILSQINDEIASRLCADMSLLQLQSLVYCGAVAAIRLHGQKIRFRVIGLSDKRDPPWKIRLERRRDSLRQDIARLIQISTGNASRRVRNKVQRVYRNYAIPCETPVVEILDTLKQKLSVICSRLRRYGESYSRRVQNATYARNQRSFFRSLNESQQSAQTIQFSVTEAKEYWGGLWGLPAQHAEHAEWITAEGTRHVNTPGMNFADVTEEEVRRAINSSKNWKGPGLDRVQNFWYKKFTSVHSRLARSINEVMSRPEEFPPFLTAGITYLIPKKDTVQDPADTRPITCLPTLYKFITSIISGRINAHLETNNILSEEQKGCRVGSRGCKEQLIIDSVVVGQATRGQRNLFSCYIDYANAFDSVPHTWLIDILHLYRIDPKLIKFLATVMEGWHTTLSVRTSEGANTSEPIRIRRGIFQGDSLSPLWFCMALNPLSWLLNDARGHGFAIKYGLRAKCELTHLMYLDDIKLYAGTDNHLRSLLRIIDMFSRDIRMEFELDKCRIQAIRKGHHEPHAGHSIGDLHIEAMTETDFYKYLGILQGTHARVGDLKEALLSEFLRRVKLVLKSHLSGKNKISALNVFAIPSLAYAFGILPWTKTDLENVQRRIRTTMSKFRMHHPKSAVERMNLPRDIGGRGVVDVAAQHHRQVDSLCAYFYSKEQASPLHAAVCKADCGLTPLNLKDRSFNPLSGVRSDQERIEEWKSKAMHGKHVNCLWQPFVDLHLSNRWLCAGELFAETEGFMCAIQDGVVATRAYKKLIMKERVENDQCRMCGSALETLDHLISGCTVMAPVQYITRHNAVCKVIHQNLAYKHGLITGTCPVYRYEPQAVLDSSACSMYWDRQVLTDRHTAHNKPDVLLVDKTGRSAYIIDVAIPHNSNIERKYVEKKVNYEPLAREIKEIWRLERVVVVPIILSATGIVPKSLTASLDVLGLSHSLVQTMQKYTILHTCSMLRGVLDGFSH

SEQ ID NO: 2059 - protein, 979 aa, Hermetia illucens
MDPLHRPGIPRLYASPATPGILSQINDEIAPRLCADMSLLQLQSLVYCGAVAAIRLHGQKIRFRVIGLSDKRDPTWKILLERRRDSLRQDIARLIQISTGNDSRRVRNKVQRVYWNYAIPCETPVVEILDTLKQKLSVICSRLRRYGESYSRRVQSATYARNQRSFFRSLNESQQSAQTIQFSVTEAKEYWGGLWGLPAQHAEHAEWITAEGTRYVNTPGMNFADVTEEEVRRAINSSKNWRGPGLDRVQNFWYRKFTSVHSRLPRSINEVMSRPEEFPPFLTAGITYLIPKKDTVQDPADTRPITCLPTLYKFITSIISGRINAHLETNNILSEEQKGCRVGSKGCKEQLIIDSVVVGQATRGQRNLFSCYIDYAKAFDSVPHTWLIDILHLYRIDPKLIKFLATVMEGWHTTLSVRTSEGANTSEPIRIRRGIFQGDSLSPLWFYMALNPLSWLLNDARGHGFAIKYGLRAKCELTHLIYLDDIKLYAGTDNHLRSLLRIIDMFSRDIRMEFGLDKCRIQAIRKGHHEPHAGHSIGDLHIEAMTETDFYKYLGILQGTHARVGNLKEALLSEFLRRVKLVLKSHLSGKNKISALNVFAIPSLVYAFGILPWTKTDLENVQRRIRTTMSKFRMHHPKSAVERMNLPRDIGGRGVVDVAAQHHRQVDSLRAYFYSKEQASPLHAAVCKADCGLTPLNLKDRSFNPLSGVKSDQERIEEWKSKAMHGKYVNCLWQPFVDLHLSNRWLCAGELFTETEGFMCAIQDGVVATRAYKKLIMKERVENDQCRMCGSALETLDHLISGCTVMAPVQYITRHNAVCKVIHQNLAYKHGLITGTCPVYRYEPQAVLDSSAYSMYWDRQVLTDRHTAHNKPDVLLVDKTGRSAYIIDVAIPHNSNIERKYVEKKVNYEPLAREIKEIWRLERVVVVPIILSATGIVPKSLTASLDVLGLSHSLVQAMQKYTILHTCSMLRGVLDGFSH

SEQ ID NO: 2060 - protein, 976 aa, Hermetia illucens
MDPLHRPGIPRLYASPATPGILSQINDEIASRLCADMSLLQLQSLVYCGAVAAIRLHGQKIRFRVIGLSDKRDPPWKIRLERRRDSLRQDIARLIQISTGNASRRVRNKVQRVYRNYAIPCETPVVEILDTLKQKLSVICSRLRRYGESYSRRVQNATYARNQRSFFRSLNESQQSAQTIQFSVTEAKEYWGGLWGLPAQHAEWITAEGTRHANTPGMNFADVTEEEVRRAINISKNWRGPGLDRVQNFWYKKFTSVHSRLARSINEVMSRPEEFPPFLTAGITYLIPKKDTVQDPADTRPITCLPILYKFITSIISGRINAHLETNNILSEEQKGCRVGSRGCKEQLIIDSVVVGQATRGQRNLFSCYIDYAKAFDSVPHTWLIDILHLYRIDPKLIKFLATVMEGWHTTLSVRTSEGANTSEPIRIRRGIFQGDSLSPLWFCMALNPLSWLLNDARGHGFAIKYGLRAKCELTHLMYLDDIKVYAGTDNHLRSLLRIIDMFSRHIRMEFGLDKCRIQAIRKGHHEPHAGHSIGDLHIEAMTETDFYKYLGILQGTHARVGDLKEALLSEFLRRVKLVLKSHLSGKNKISALNVFAIPSLAYAFGILPWTKTDLENVQRRIRTTMSKFRMHHPKSAVERMNLPRDIGGRGVVDVAAQHHRQVDSLRAYFYSKEQASPLHAAVCKADCGLTPLNLKDRSFNPLSGVKSDQERIEEWKSKAMHGKHVNCLWQPFVDLHLSNRWLCAGELFAETEGFMCAIQDGVVATRAYKKLIMKERVENDQCRMCGSALETLDHLISGCTVMAPVQYITRHNAVCKVIHQNLAYKHGLITGTCPVYRYEPQAVLDSSAYSMYWDRQVLTDRHTAHNKPDVLLVDKTGRSAYIIDVAIPHNSNIERKYVEKKVNYEPLAREIKEIWRLERVVVVPIILSATGIVPKSLTASLDVLGLSHSLVQTMQKYTILHTCSMLRGVLDGFSH

SEQ ID NO: 2061 - protein, 1114 aa, Hermetia illucens
MRRRRNLRSGTDNRRESSDLVTGSGSRNGQHGVETASRGAVRRLGATTTRSTAPPAAAVSPQPVATTSAGSRRKRMKWTEEMNLFIIRSYYEITAGAGTTSYRPLLHQRFVERFPQFAHVTVQRVADQYRFITRSDTIPATIRERVRLEVIGETGDRESMGAEAAASTTSRRTAGNRFSTRRSTLLHRPAEVSAEVRDEFQRACIEFSDMDPLHRPGIPRLYASPATPGILSQINDEIASRLCADMSLLQLQSLVYCGAVAAIRLHGQKIRFRVIGLSDKRDPPWKIRLERRRDSLRQDIARLIQISTGNASRRVRNKVQRVYRNYAIPCETPVVEILDTLKQKLSVICSRLRRYGESYSRRVQNATYARNQRSFFRSLNESQQSAQTIQFSVTEAKEYWGGLWGLPAQHAEHAEWITAEGTRHANTPGMNFADVTEEEVRRAINSSKNWRGPGLDRVQNFWYKKFTSVHSRLARSINEVMSRPEEFPPFLTAGITYLIPKKDTVQDPADTRPITCLPTLYKFITSIISGRINAHLETNNILSEEQKGCRVGSRGCKEQLIIDSVVVGQATRGQRNLFSCYIDYAKAFDSVPHTWLIDILHLYRIDPKLIKFLATVMEGWHTTLSVRTSEGANTSEPIRIRRGIFQEDSLSPLWFCMALNPLSWLLNDARGHGFAIKYGLRAKCELTHLMYLDDIKLYAGTDNHLRSLLRIIDMFSRDVRMEFGLDKCRIQAIRKGHHEPHAGHSIGDLHIEAMTETDFYKYLGILQGTHARVGDLKEALLSEFLRRVKLVLKSHLSGKNKISALNVFAIPSLAYAFGILPWTKTDLENVQRRIRTTMSKFRMHHPKSAVERMNLPRDIGGRGVVDVAAQHHREVDSLRAYFYSKEQASPLHAAACKADCGLTPLNLKDRSFNPLSGVKSDQERIEEWKSKAMHGKHVNCLWQPFVDLHLSNRWLCAGELFAETEGFMCAIQDGVVATRAYKKLIMKERVENDQCRMCGSALETLDHLISGCTVMAPVQYITRHNAVCKVIHQNLAYKHGLITGTCPVYRYEPQAVLDSSAYSMYWDRQVLTDRHTAHNKPDVLLVDKTGRSAYIIDVAIPHNSNIERKYVEKK

SEQ ID NO: 2062 - protein, 1193 aa, Hermetia illucens
MHHQKMRRRKNLRSGTDNRRESSDLVTGSGSRNGQHGVETASRGAVRRLGATTTRSTAPPAAAVSPQPVATTSAGSRRKRMKWTEEMNLFIIRSYYEITAGAGTTSYRPLLHQRFVERSPQFAHVTVQRVADQYRFITRSDTIPVTIRERVRLEVIGETGDRESMGADAAASTTPRRTAGNRFSTRRSTLLHRPAEVSAEVRDEFQRACIEFSDMDPLHRPGIPRLYASPATPGILSQINDEIASRLCADMSLLQLQSLVYCGAVAAIRLHGQKIRFRVIGLSGKRDPPWKIRLERRRDSLRQDIARLIQISTGNASRRVRNKVQRVYRNYAIPCETPVVEILDTLKQKLFVICSRLRRYGESYSRRIQNATYARNQRSFFRSLNESQQSAQTIQFSVTEAKEYWGGLWGLPAQHAEHAEWITAEGTRHANTPGMNFADVTEEEVRRAINISKNWRGPGLDRVQNFWYKKFTSVHSRLARSINEVMSWPEEFPPFLTAGITYLIPKKDTVQDPADTRPITCLPTLYKFITSIISGRINAHLETNNILSEEQKGCRVGSRGCKEQLIIDSVVVGQATRGQRNLFSCYIDYAKAFDSVLHTWLIDILHLYRIDPKLIKFLATVMEGWHTTLSVRTSEGANTSEPIRIRRGIFQGDSLSPLWFCMALNPLSWLLNDARGHGFAIKYGLRAKCELTHLMYLDDIKLYAGTDNHLRSLLRIIDMFSRDIRMEFGLGKCRIQAIRKGHHEPHAGHCIGDLHIEAMTETDFYKYLGILQGTHARVGDLKEALLSEFLRRVKLVLKSHLSGKNKISALNVFAIPSLAYAFGILPWTKTDLENVQRRIRTTISKFLMHHPKSAVERMNLPRDIGGRGVVDVAAQHHRQVDSLRAYFYSKEQASPLHAAVCKADCGLTPLNLKDRSFNPLIGVKSDQERIEEWKSKAMHGKHVNCLWQPFVDLHLSNRWLCAGELFAETEGFMCAIQDGVVATRAYKKLIMKERVENDQCRMCGSALETLDHLISGCTVMAPVQYITRHNAVCKVIHQNLAYKHGLITGTCPVYRYEPQAVLDSSAYSMYWDRQVLTDRHTAHNKPDVLLVDKTGRSAYIIDVAIPHNSNIERKYVEKKVNYEPLAREIKEIWRLERVVVVPIILSATGIVPKCLTASLDVLGLSHSLVQTMQKYTILHTCSMLRGVLDGFSH

SEQ ID NO: 2063 - protein, 1188 aa, Hermetia illucens
MRRRRNLRSGTDNRRESSDLVTGSGSRNGQHGVETASRGAVRRLGATTTRSTAPPAAAVSPQPVATTSAGSRRKRMKWTEEMNLFIIRSYYEITAGAGTTSYRPLLHQRFVERFPQFAHVTVQRVADQYRFITRSDTIPATIRERVRLEVIGETGDRESMGAEAAASTTSRRTAGNRFSTRRSTLLHRPAGVSAEVRDEFQRACIEFSDMDPLHRPGIPRLYASPATPGILSQINDEIASRLCADMSLLQLQSLVYCGAVAAIRLHGQKIRFRVIGLSDKRDPPWKIRLERRRDSLRQDIARLIQISTGNAIRRVRNKVQRVYRNYAIPCETPVVEILDTLKQKLSVICSRLRRYGESYSRRVQNATYARNQRSFFRSLNESQESAQTIQFSVTEAKEYWGGLWGLPAQHAEHAEWITAEGTRHANTPGMNFADVTEEEVRRAINISKNWRGPGLDRVQNFWYKKFTSVHSRLARSINEVMSRPEEFPPFLTAGITYLIPKKDTVQDPADTRPITSLPTLYKFITSIISGRINAHLETNNILSEEQKGCRVGSRGCKEQLIIDSVVVGQATRGQRNLFSCYIDYAKAFDSVPHTWLIDILHLYRIDPKLIKFLATVMEGWHTTLSVRTSEGANTSEPIRIRRGIFQGDSLSPLWFCMALNPLSWLLNDARGHGFAIKYGLRAKCELTHLMYLDDIKLYAGTDNHLRSLLRIIDMFSRDIRMEFGLDKCRIQAIRKGHHEPHAGHSIGDLHIEAMTETDFYKYLGILQGTHARVGDLKEALLSEFLRRVKLVLKSHLSGKNKISALNVFAIPSLAYAFGILPWTKTDLENVQRRIRTTMSKFRMHHPKSAVERMNLPRDIGGRGVVDVAAQHHRQVDSLRAYFYSKEQASPLHAAVCKADCGLTPLNLKDRSFNPLSGVKSDQERIEEWKSKAMHGKHVNCLWQPFVDLHLSNRWLCAGELFAETEGFMCAIQDGVVATRAYKKLIMKERVENDQCRMCGSALETLDHLISGCTVMAPVQYNTRHNAVCKVIHQNLAYKHGLITGTCPVYRYEPQAVLDSSAYSMYWDRQVLTDRHTAHNKPDVLLVDKTGRSAYIIDVAIPHNSNIERKYVEKKVNYEPLAREIKEICRLERVVVVPIILSATGIVPKSLTASLDVLGLSHSLVQTMQKYTILHTCSMLRGVLDGFSH

SEQ ID NO: 2064 - protein, 1190 aa, Hermetia illucens
MHHQKMRRRRNLRSGTDNRRESSDLVTGSGSRNGQHGVETASRGVVRRLGATTTRSTAPPAATVSPQSVATTSAGSRRKRIKWTEEMNLFIIRSYYEITAGAGTTSYRPLLHQRFVERFPQFAHVTVQRVADQYRFITRSDTIPATIRERVRLEVIGETGDRESMGAEAAASTTPRRTAGNRFSTRRSTLLHRPAEVSAEVRDEFQRACIEFSDMDPLHRPGIPRLYASPATPGILSQINDEIASRLCADMSLLQLQSLVYCGAVAAIRLHGQKIRFRVIGLSDKRDPPWKIRLERRRDSLRQDIARLIQISTGNASRRVRNKVQRVYRNYAIPCETPVVEILDTLKQKLSVICSRLRRYGESYSRRVQNATYARNQRSFFRSLNESQQSAQTIQFSVTEAKEYWGGLWGLPAQHAEWITAEGTRHANTPGMNFADVTEEEVRRAINISKNWRGPGLDRVQNFWYKKFTSVHSRLARSINEVMSRPEEFPPFLTAGITYLIPKKDTVQDPADTRPITCLPTLYKFITSIISGRINAHLETNNILSEEQKGCRVGSRGCKEQLIIDSVVVGQATRGQRNLFSCYIDYAKAFDSVPHTWLIDILHLYRIDPKLIKFLATVMEGWHTTLSVRTSEGANTSEPIRIRRGIFQGDSLSPLWFCMALNPLSWLLNDARGHGFAIKYGLRAKCELTHLMYLDDIKVYTGTDNHLRSLLRIIDMFSRDIRMEFGLDKCRIQAIREGHHEPHAGHSIGDLHIEAMTETDFYKYLGILQGTHARVGDLKEALLSEFLRRVKLVLKSHLSGKNKISALNVFAIPSLAYAFGILRWTKTDLENVQRRIRTTMSKFRMHHPKSAVERMNLPRDIGGRGVVDVAAQHHRQVDSLRAYFYSKEQASPLHAAVCKADCGLTPLNLKDRSFNPLSGVKSDQERIEEGKSKAMHGKHVNCLWQPFVDLHLSNRWLCAGELFAETEGFMCAIQDGVVATRAYKKLIMKERVENDQCRMCGSALETLDHLISGCTVMAPVKYITRHFAVCKVIHQNLAYKHGLITGTCPVYRYEPQAVLDSSAYSMYWDRQVLTDRHTAHNKPDVLLVDKTGRSAYIIDVAIPHNSNIERKYVEKKVNYEPLAREIKEIWRLERVVVVPIILSATGIVPKSLTASLDVLGLSHSLVQTMQKYTILHTCSMLRGVLDGFSH

SEQ ID NO: 2065 - protein, 1188 aa, Hermetia illucens
MRRRRNLRSGTDNRRESSDLVTGSGSRNGQHGVETASRGAVRRLGATTSRSTAPPAAAVSPQSVATTSAGSRRKRMKWTEEMNLFIIRSYYEITAGAGITSYRPLLHQRFVVRFPQFAHVTVQRVADQYRFITRSDTIPATIRERVRLEVIGETGDRESMGAEAAASTTPRRTAGNRFSTRRSTLLHRPAEVSAEVRDEFQRACIEFSDMDPLHRPGIPRLYASPATPGILSQINDEIASRRCADMSLLQLQSLVYCGAVAAITLHGQKIRFRVIGLSDKRDPPWKIRLERRRDSLRQDIARLIQISTGNASRWVRNKVQRVYRNYAIPCETPVIEILDTLKQKLSVICSRLRRYGESYSRRVQNATYARNQRSFFRSLNESQQSAQTIQFSVTEAKEYWGGLWGLPAQHAEHAEWITAEATRHANTPGMNFADVTEEEVRRAINISKNWRGPGLDRVQNFWYKKFTSVHSRLARSINEVMSRPEEFPPFLTAGISYLIPKKDTVQDPADTRPITCLPTLYKFITSIISGRINVHLETNNILSEEQKGCRVGSRGCKEQLIIGSVVVGQATRGQRNLFSCYVDYAKAFDSVPHTWLIDILHLYRIDPKLIKFLATVMEGWHTTLSVRTSEGANTSEPIRIRRGIFQGDSLSPLWFCMALNPLSWLLNDARGHGFAIKYGLRAKCELTHLMYLDDIKLYAGTDNHLRSLLRIIDMFSRDIRMEFGLDKCRIQAIRKGHHEPHAGHSIGDLHIEAMTETDFYKYLEILQGTHARVGDLKEALLSEFLRRVKVVLKSHLSGKNKISALNVFAIPSLAYAFGILPCTKTDLENVQRRIRTTMSKFRMHHPKSAVERMNLPRDIGGRGVVDVAAQHHRQVDSLRAYFYSKEQASPLHAAACKADCGLTPLNLKDRSFNPLSGVRSDQERIEEWKSKAMHGKHVNCLWQPFVDLHLSNRWLCAGELFAETEGFMCAIQDGVVATRAYKKLIMKERVENDQCRMCGSALETLDHLISGCTVMAPVQYITRHNAVCKVIHQNLAYKHGLITGTCPVYRYEPQAVLDSSAYSMYWDRQVLTDRHTAHNKPDVLLVDKTGRSAYIIDVAIPHNSNIERKYVEKKVNYEPLAREIKEIWRLERVVVVPIILSATGIVPKSLTASLDVLGLSHSLVQTMQKYTILHTCSMLRGVLDGFSH

SEQ ID NO: 2066 - protein, 1189 aa, Hermetia illucens
MHHQKMRRRRNLRSGTDNRRESSDLVTGSGSRNGQHGVETASRGAVRRLGATTTRSTAPPAAAVSPQSVATTSAGSRRKRMKWTEDMNLFIIRSYYEITAGAGITSYRPLLHQRFVERFPQFAHVTVQRVADQYRFITRSDTIPATIRELVRVEVIGETGDRESMGAEAAASTIPRRTAGNRFSTRRSTLLHRPAEVSAEVRDEFQRACIEFSDMDPLHRPGIPRLYASPATPGILSQINDEIASRLCAYMSLLQLQSLVYCGAVAAIRLHGQKIRFRVIGLSDKRDPPWKIRLERRRDSLRQDIARLIQISTGNASRRVRNKVQRVYRNYAIPCETPVVEILDTLKQKLSVICSRLRRYGESYSRRVQNATYARNQRSFFRSLNESQQSAQTIQFSVTEAKEYWGGLWGLPAQHAEWITAEGTRHANTPGMNFADVTEEEVRRTINISKNWRGPGLDRVQNFWYKKFTSVHSRLARSINEVMSRPEEFPPFLTAGITYLIPKKDTVQDPADTRPITCLPTLYKFITSIISGRINAHLETNNILSEEQKGCRVGSRGCKEQLIIDSVVVGQATRGQRNLFSCYIDYAKVFDSVPHTWLIDILHLYRIDPKLIKFLATVMEGWHTTLSVRTSEGANTSEPIRIRRGIFQGDSLSPLWFCMALNPLSWLLNDARGHGFAIKYGLRAKCELTHLMYLDDIKLYAGTDNHLRSLLRIIDMFSRDIRMEFGLDKCRIQAIRKGHHEPHAGHSIGDLHIEAMTETDFYKYLGILQGTHARVGDLKEALLSEFLRRVKLVLKSHLSGKNKISALNVFAIPSLAYAFGILPWTKTDLENVQRRIRTTMSKFRMHHPKSAVQRMNLPRDIGGRGVVDVAAQHHRQVDSLRAYFYSKEQASPLHAAVCKADCGLTPLNLKDRSFNPLSGVKSDQERIDEWKSKAMHGKHVNCLWQPFVDLHLSNRWLCAGELFAETEGFMCVIQDGVVATRAYKKLIMKERVENDQCRMCGSALETYDHLISGCTVMAPVQYITRHNAVCKVIHQNLAYKHGLITGTCPVYRYEPQAVLDSSAYSMYWDRQVLTDRHTAHNKPDVLLVDKTGRSAYIIDVAIPHNSNIERKYVEKVNYEPLAREIKEIWRLERVVVVPIILSATGIVPKSLTASLDVLGLSHSLVQTMQKYTILHTCSMLRGVLDGFSH

SEQ ID NO: 2067 - protein, 1193 aa, Hermetia illucens
MHHQKMRRRRDLRSGTDNRRESSDLVTGSGSRNGQHGVETASRGAVRRLGATTTRSTAPPAAAVSPQSVATTSAGSRRKRMKWTEEMNLFIIRSYYEITAGAGITSYRPLLHQRFVERFPQFAHVTVQRVADQYRFITRSDTIPATIRERVRLEVIGETGDRESIGAEAAASTTPRRTAGNRFSTRRSTLLHRPAEVSAEVRDEFQRACIEFSDMDPLHRPGIPRLYASPATPGILSQINDEIASRLCADMSLLQLQSLVYCGAVAAIRLHGQKIRFRVIGLSDKRDPPWKIRLERRRDSLRQDIARLIQISTGNASRRVRNKVQRVYRNYAIPCETPVVEILDTLKQKLSVICSRLRRYGESYSRRVQNATYARNQRSFFRSLNESQQSAQTIQFSVTEAKEYWGGLWGLPAQHAEHAEWITAEGTRHANTPGMNFADVTEEEVRRAINISKNWRGPGLDRVQNFWYKKFTSVHSRLARSINEVMSRPEEFPPFLTAGITYLIPKKDTVQDPADTRPITCLPTLYKFITSIISGRINAHLETNNILSEEQKGCRVGSRGCKEQLIIDSVVVGQATRSQRNLFSCYIDYAKAFDSVPHTWLIDILHLYRIDPKLIKFLATVMEGWHTTLSVRTSEGVNTSEPIRIRRGIFQGDSLSPLWFCMALNPLSWLLNDARGHGFAIKYGLRAKCELTHLMYLDDIKLYAGTDDHLRSLLRIIDMFSRDIRMEFGLDKCRIQAIRKGHHEPHAGHSIGDLHIEAMTETDFYKYLGILQGTHARVGDLKEALLSEFLRRVKLVLKSHLSGKNKISALSVFAIPSLAYAFGILPWTKTDLENVQRRIRTTMSKFRMHHPKSAVERMNLPRDIGGRGVVDVAAQHHRQVDSLRAYFYSKEQASPLHAAVCKADCGLTPLNLKDRSFNPLSGVKSDQERIEEWKSKAMHGKHVNCLWQPFVDLHLSNRWLCAGELFAETEGFMCAIQDGVVATRAYKKLIMKERVENDQCRMCGSALETLDHLISGCTVMAPVQYITRHNAVCKVIHQNLAYKHGLITGTCPVYRYEPQAVLDSSAYSMYWDRQVLTDRHTAHNKPDVLLVDKTGRSAYIIDVAIPHNSNIERKYVEKKVNYEPLAREIKEIWRLERVVVVPIILSATGIVPKSLTASLDVLGLSHSLVQTMQKYTILHTCSMLRGVLDGFSH

SEQ ID NO: 2068 - protein, 1193 aa, Hermetia illucens
MHHQKMRRRRNLRSGTDNRRESSDLVTGSGSRNGQHGVETASRGAVRRLGATTTRSTAPPAVAVSPQSVATTSAGSRRKRMKWTEEMNLFIIRSYYEITAGAGITSYRPLLHQRFVERFPQFAHVTVQRVADQYRFIIRSDTIPATIRERVRLEVIGETGDRESMGAEAAASTTPRRTAGNRFSTRRSTLLHRPTEVSAEVRNEFQRACIEFSDMDPLHRPGIPRLYASPATPGILSQINDEIASRLCADMSLLQLQSLVYCGAVAAIRLHGQKIRFRVIGLSDKRDPPWKIRLERRRDSLRQDIARLIQISTGNASRRVRNKVQRVYRNYAIPCETPVVEILDTLKQKLSVICSRLRRYGESYSRRVQNATYARNQRSFFRSLNESQQSAQTIQFSVTEAKEYWGGLWGLPAQHAEHAEWITAEDTRHANTPGMIFADVTEEEVRRAINISKNWRGPGLDRVQNFWYKKFTSVHSRLARSINEVMSRPEEFPPFLTAGITYLIPKKDTVQDPADTRPITFLPTLYKFITSIISGRINAHLETNNILSEEQKGCRVGSRGCKEQLIIDSVVVGQATRGQRNLFSCYIDYAKAFDSVPHTWLIDILHLYRIDPKLIKFLATVMEGWHTTLSVRTSEGANTSEPIRIRRGIFQGDSLSPLWFCMALNPLSWLLNDARGHGFAIKYGLRAKCELTHLMYLDDIKLYAGTDNHLRSLLRIIDMFSRDIRMEFGLDKCRIQAIRKGHHEPLAGHSIGDLHIEAMTETDFYKYLGILQGTHARVGDLKEALLSEFLRRVKLVLKSHLSGKNKVGALNVFAIPSLAYAFGILPWTKTDLENVQRRIRATMSKFRMHHPKSAVERMNLPRDIGGRGVVDVAAQHHRQVDSLRAYFYSKEQASPLHAAVCKADCGLTPLNLKGRSFNPLSGVKSDQERIEEWKSKAMHGKHVNCLWQPFVDLHLSNRWLCVGELFAETEGFMCAIQDGVVATRAYKKLIMKERVENDQCRMCGSALETLDHLISGCTVMAPVQYITRHNAVCKVIHQNLAYKHGLITGTCPVYRYEPQAVLDSSTYSMYWDRQVLTDRHTAHNKPDVLLVDKTGRSAYIIDVAIPHNSNIERKYVEKKVNYEPLAREIKEIWRLERVVVVPIILSATGIVPKSLTASLDVLGLSHSLVQTMQKYTILHTCSMLRGVLDGFSH

SEQ ID NO: 2069 - protein, 1193 aa, Hermetia illucens
MHHQKMRRRRDLRSGTDNRRESSDLVTGSGSRNGQHGVETASRGAVRRLGATTTRSTAPPAAAVSPQSVATTSAGSRRKRMKWTEEMNLFIIRSYYEITAGAGITSYRPLLHQRFVERFPQFAHVTVQRVADQYRFITRSDTIPATIRERVRLEVIGETGDRESMGAEAAASTTPRRTAGNRFSTRRSTLLHRPAEVSAEVRDEFQRACIEFSDMDPLHRPGIPRLYASPATPGILSQINDEIASRLCADMSLLQLQSLVYCGAVAAIRLHGQKIRFRVIGLSDKRDPPWKIRLERRRDSLRQDIARLIQISTGNASRRVRNKVQRVYRNYAIPCETPVVEILDTLKQKLSVICSRLRRYGESYSRRVQNATYARNQRSFFRSLNESQQSAQTIQFSVTEAKEYWGGLWGLPAQHAEHAEWITAEGTRHANTPGMNFADVTEEEVRRAINISKNWRGPGLDRVQNFWYKKFTSVHSRLARSINEVMSRPEEFPPFLTAGITYLIPKKDTVQDPADTRPITCLPTLYKFITSIISGRINAHLETNNILSEEQKGCRVGSRGCKEQLIIDSVVVGQATRGQRNLFSCYIDYAKAFDSVPHTWLIDILHLYRIDPKLIKFLATVMEGWHTTLSVRTSEGANTSEPIRIRRGIFQGDSLSPLWFCMALNPLSWLLNDARGHGFAIKYGLRAKCELTHLMYLDDIKLYAGTDDHLRSLLRIIDMFSRDIRMEFGLDKCRIQAIRKGHHEPHAGHSIGDLHIEAMTETDFYKYLGILQGTHARVGDLKEALLSEFLRRVKLVLKSHLSGKNKISALNVFAIPSLAYAFGILPWTKTDLENVQRRIRTTMSKFRMHHPKSAVERMNLPRDIGGRGVVDVAAQHHRQVDSLRAYFYSKEQASPLHAAVCKADCGLTPLNLKDRSFNPLSGVKSDQERIEEWKSKAMHGKHVNCLWQPFVDLHLSNRWLCAGELFAETEGFMCAIQDGVVATRAYKKLIMKERVENDQCRMCGSALETLDHLISGCTVMAPVQYITRHNAVCKVIHQNLAYKHGLITGTCPVYRYEPQAVLDSSAYSMYWDRQVLTDRHTAHNKPDILLVDKTGRSAYIIDVAIPHNSNIERKYVEKKVNYEPLAREIKEIWRLERVVVVPIILSATGIVPKSLTASLDVLGLSHSLVQTMQKYTILHTCSMLRGVLDGFSH

SEQ ID NO: 2070 - protein, 1188 aa, Hermetia illucens
MRRRRNLRSGTDNRRESSDLVTGSGSRNGQHGVETASRGAVRRLGATTTRSTAPPAAAVSPQPVATTSAGSRRKRMKWTEEMNLFIIRSYYEITAGAGTTSYRPLLHQRFVERFPQFAHVTVQRVADQYRFITRSDTIPATIRERVRLEVIGETGDRESMGAEAAASTTPRRTAGNRFSTRRSTLLHRPAEVSAEVRDEFQRACIEFSDMDPLHRPGIPRLYASPATPGILSQINDEIASRLCADMSLLQLQSLVYCGAVAAIRLHGQKIRFRVIGLSDKRDPPWKIRLERRRDSLRQDIARLIQISTGNASRRVRNKVQRVYRNYAIPCETPVVEILDTLKQKLSVICSRLRRYGESYSRRVQNATYARNQRSFFRSLNESQQSAQTIQFSVTEAKEYWGGLWGLPAQHAEHAEWITAEGTRHANTPGMNFADVTEEEVRRAINSSKNWRGPGLDRVQNFWYKKFTSVHSRLARSINEVMSRPEEFPPFLTAGITYLIPKKDTVQDPADTRPITCLPTLYKFITSIISGRINAHLETNNILSEEQKGCRVGSRGCKEQLIIDSVVVGQATRGQRNLFSCYIDYAKAFDSVPHTWLIDILHLYRIDPKLIKFLATVMEGWHTTLSVRTSEGANTSEPIRIRRGIFQGDSLSPLWFCMALNPLSWLLNDARGHGFAIKYGLRAKCELTHLMYLDDIKLYAGTDNHLRSLLRIIDMFSRDIRMEFGLDKCRIQAIRKGHHEPHAGHSIGDLHIEAMTETDFYKYLGILQGTHARVGDLKEALLSEFLRRVKLVLKSHLSGKNKISALNVFAIPSLAYAFGILPWTKTDLENVQRRIRTTMSKFRMHHPKSAVERMNLPRDIGGRGVVDVAAQHHRQVDSLRAYFYSKEQASPLHAAVCKADCGLTPLNWKDRSFNPLSGVKSDQERIEEWKSKAMHGKHVNCLWQPFVDLHLSNRWLCAGELFAETEGFMCAIQDGVVATRAYKKLIMKERVENDQCRMCGSALETLDHLISGCTVMAPVQYITRHNAVCKVIHQNLAYKHGLITGTCPVYRYEPQAVLDSSAYSMYWDRQVLTDRHTAHNKPDVLLVDKTGRSAYIIDVAIPHNSNIERKYVEKKVNYEPLAREIKEIWRLERVVVVPIILSATGIVPKSLTASLDVLGLSHSLVQTMQKYTILHTCSMLRGVLDGFSH

SEQ ID NO: 2071 - protein, 1188 aa, Hermetia illucens
MRRRRNLRSGTDNRRESSDLVTGSGSRNGQHGVETASRGAVRRLGATTTRSTAPPAATVSPQPVATTSAGSRRKRMKWTEEMNLFIIRSYYEITAGAGTTSYRPLLHQRFVERFPQFAHVTVQRVADQYRFITRSDTIPATIRERVRLEVIGETGDRESMGAEAAASTTPRRTAGNRFSTRRSTLLHRPAEVSAEVRDEFQRACIEFSDMDPLHRPGIPRLYASPATPGILSQINDEIASRLCADMSLLQLQSLVYCGAVAAIRLHGQKIRFRVIGLSDKRDPPWKIRLERRRDSLRQDIARLIQISTGNASRRVRNKVQRVYRNYAIPCETPVVEILDTLKQKLSVICSRLRRYGESYSRRVQNATYARNQRSFFRSLNESQQSAQTIQFSVTEAKEYWGGLWGLPAQHAEHAEWITAEGTRHVNTPGMNFADVTEEEVRGAINSSKNWRGPGLDRVQNFWYKKFTSVHSRLARSINEVMSRPEEFPPFLTAGITYLIPKKDTVQDPADTRPITCLPTLYKFITSIISGRINAHLETNNILSEEQKGCRVGSRGCKEQLIIDSVVVGQATRGQRNLFSCYIDYAKAFDSVPHTWLIDILHLYRIDPKLIKFLATVMEGWHTTLSVRTSEGANTSEPIRIRRGIFQGDSLSPLWFCMALNPLSWLLNDARGHGFAIKYGLRAKCELTHLMYLDDIKLYAGTDNHLRSLLRIIDMFSRDIRMEFGLDKCRIQAIRKGHHEPHAGHSIGDLHIEAMTETDFYKYLGILQGTHARVGDLKEALLSEFLRRVKLVLKSHLSGKNKIGALNVFAIPSLAYAFGILPWTKTDLENVQRRIRTTMSKFRMHHPKSAVERMNLPRDIGGRGVVDVAAQHHRQVDSLRAYFYSKEQASPLHAAVCKADCGLTPLNLKDRSFNPLSGVKSDQERIEEWKSKAMHGKHVNCLWQPFVDLHLSNRWLCAGELFAETEGFMCAIQDGVVATRAYKKLIKKERVENDQCRMCGSALETLDHLISGCTVMAPVQYITRHNAVCKVIHQNLAYKHGLITGTCPVYRYEPQAVLDSSAYSMYWDRQVLTDRHTAHNKPDVLLVDKTGRSAYIIDVAIPHNSNIERKYVEKKVNYEPLAREIKEIWRLERVVVVPIILSATGIVPKSLTASLDVLGLSHSLVQTMQKYTILHTCSMLRGVLDGFSH

SEQ ID NO: 2072 - protein, 1070 aa, Hermetia illucens
MHHQKMRRRRNLRSGTDNRRESSDLVTGSGSRNGQHGVETASRGAVRRLGATTTRSTAPPAAAVSPQSVATTSAGSRRKRMKWTEEMNLFIIRSYYEITAGAGTTSYRPLLHQRFVERFPQFAHVTVQRVADQYRFITRSDTIPATIRERVRLEVIGETGDRVSMGAEAAASTTPRRTAGNRFSTRRSTLLHRPAGVSAEVRDEFQRACIEFSDMDPLHRPGIPRLYASPATPGILSQINDEIASRLCADMSLLQLQSLVYCGAVAAIRLHGQKIRFRVIGLSDKRDPPWKIRLERRRDSLRQDIARLIQISTGNASRRVRNKVQRVYRNYAIPCETPVVEILDTLKQKLSVICSRLRRYGESYSRRVQNATYARNQRSFFRSLNESQQSAQTIQFSVTEAKEYWGGLWGLPVQHAEHAEWITAEGTRHVNTPGMNFADVTEEEVRRAINISKNWRGPGLDRVQNFWYKKFTSVHSRLARSINEVMSRPEEFPPFLTAGITYLIPKKDTVQDPADTRPITCLPTLYKFITSIISGRINAHLETNNILSEEQKGCRVGSKGCKEQLIIDSVVVGQATRGQRNLFSCYIDYAKAFDSIPHTWLIDILHLYRIDPKLIKFLATVMEGWHTTLSVRTSEGANTSEPIRIRRGIFQGDSLSPLWFCMALNPLSWLLNDARGHGFAIKYGLRAKCELTHLMYLDDIKLYAGTDNHLRSLLRIIDMFSRDIRMEFGLDECRIQAIRKGHHEPHAGHSIGDLHIEAMTETDFYKYLGILQGTHARVGDLKEALLSEFLRRVKLVLKSHLSGKNKISALNVFAIPSLAYAFGILPWTKTDLENVQRRIRTTMSKFRMHHPKSAVERMNLPRDIGGRGVVDVAAQHHRQADSLRAYFYSKEQASPLHAAVCKADCGLTPLNLKDRSFNPLSGVKSDQERIEEWKSKAMHGKHVNCLWQPFVDLHLSNRWLCAGELFAETEGFMCAIQDGVVATRAYKKLIMKERVENDQCRMCGSALETLDHLISGCTVMAPVQYITRHNAVCKVIHQNLAYKHGLITGTCPVYRYEPQAVLDSSAYSMY

SEQ ID NO: 2073 - protein, 1193 aa, Hermetia illucens
MHHQKMRRRRNLRSGTDNRRESSDLVTGSGSRNGQHGVETASRGAVRRLGATTTRNTAPPAAAVSPQSVATTSAGSRRKRMKWTEEMNLFIIRSYYEITAGAGTTSYRPLLHQRFVERFPQFAHVTVQRVADQYRFITRSDTIPATIRERVRLEVIGETGDRESMGAEAAASTTPRRTAGNRFSTRRSTLLHRPAEVSAEVRDEFQRACIEFSDMDPLHRPGIPRLYASPATPGILSQINDEIASRLCADMSLLQLQSLVYCGAVAAIRLHGQKIRFRVIGLSDKRDPPWKIRLERRRDSLRQDIARLIQISTGNASRRVRNKVQRVYRNYAIPCETPVVEILDTLKQKLSVICSRLRRYGESYSRRVQNATYARNQRSFFRSLNESQQSAQTIQFSVTEAKEYWGGLWGLPAQHAEHAEWITAEGTRHANTPGMNFADVTEEEVRRAINISKNWRGPGLDRVQNFWYKKFTSVHSRLARSINEVMSRPEEFPPFLTAGITYLIPKKDTAQDPADTRPITCLPTLYKFITSIISGRINAHLETNNILSEEQKGCRVGSRGCKEQLIIDSVVVGQATRGQRNLFSCYIDYAKAFDSVPHTWLIDVLHLYHIDPKQIKFLATVMEGWHTTLSVRTSEGANTSEPIRIRRGIFQGDSLSPLWFCMALNPLSWLLNDARGHGFAIKYGLRAKCELTHLMYLDDIKLYAGTDNHLRSLLRIRDMFSRDIRMEFGLDKCRIQAIRKGHHEPHAGHSIGDLHIEAMTETDFYKYLGILQGTHARVGDLKDALLSEFLRRVKLVLKSHLSGKNKISALNVFAIPSLAYAFGILPWTKTDLENVQRRIRTTMSKFRMHHPKSAVERMNLPRDIGGRGVVDVAAQHHRQVDSLRAYFYSKEQASPLHAAVCKADCGLTPLNLKDRSFNPLSGVKSDQERIEEWKSKAMHGKHVNCLWQPFVDLHLSNRWLCAGELFAETEGFMCAIQDGVVATRAYKKLIMKERVENDQCRMCGSALETLDHLISGCTVMAPVQYITRHNAVCKVIHQNLAYKHGLITGTCPVYRYEPQAVLDSSAYSMYWDRQVLTDRHTAHNKPDVLLVDKTGRSAYIIDVAIPHNSNIERKYVEKKVNYEPLAREIKEIWRLERVVVVPIILSATGIVPKSLTASLDVLGLSHSLVQTMQKYTILHTCSMLRGVLDGFAH

SEQ ID NO: 2074 - protein, 1188 aa, Hermetia illucens
MRRKRNLRSGTDNRRESSDLVTGSGSRNGQHGVETASRGEVRRLGATTTRSTAPPAAAVSPPSVATTSAGSRRKRMKWTEEMNLFIIRSYYEITAGAGITSYRPLLHQRFVERFPQFAHVTVQRVADQYRFITRSDTIPATIRERVRLEVIGETGDRESMGAEAAASTTPRRTAGNRFSTRRSTLLHRPAEVSAEVRDEFQRACIEFSDMDPLHRPGIPRLYASPATPGILSQINDEIASRLCADMSLLQLQSLVYCGAVAAIRLHGQKIRFRVIGLSDKRDPPWKIRLERRRDSLRQDIARLIQISTGNASRRVRNKVQRVYRNYAIPCETPVVEILDTLKQKLSVICSRLRRYGESYSRRVQNATYARNQRSFFRSLNESQQSAQTIQFSVTEAKEYWGGLWGLPAQHAEHAEWITAEGTRHANTPGMNFADVTEEEVRRAINISKNWRGPGLDRVQNFWYKKFTSVHSRLARSINEVMSRPEEFPPFLTAGITYLIPKKDTVQDPADTRPITCLPTLYKFITSIISGRINAHLETNNILSEEQKGCRVGSRGCKEQLIIDSVVVGQATRGQRNLFSCYIDYAKAFDSVPHTWLIDILHLYRIDPKLIKFLATVMEGWHTTLSVRTSEGANTSEPIRIRRGIFQGDSLSPLWFCMALNPLSWLLNDTRGHGFAIKYGLRAKCELTHLMYLDDIKLYAGTDNHLRSLLRIIDMFSRDIRMEFGLDKCRIQAIRKGHHEPHAGHSIGDLHIEAMTETDFYKYLGILQGTHARVGDLKEALLSEFLRRVKLVLKSHLSGKNKISALNVFAIPSLAYAFGILPWTKTDLENVQRRIRTTMSKFRMHHPKSAVERMNLPRDIGGRGVVDVAAQHHRQVDSLRAYFYSKEQASPLHAAVCKADCGLTPLNLKDRSFNPLSGVKSDQERIEEWKSKAMHGKHVNCLWQPFVDLHLSNRWLCAGELFAETEGFMCAIQDGVVATRAYKKLIMKERVENDQCRMCGSALETLDHLISGCTFMAPVQYITRHNAVCKVIHQNLAYKHGLITGTCPVYRYEPQAVLDSSAYSMYWDRQVLTDRHTAHNKPDVLLVDKTGRSAYIIDVAIPHNSNIERKYVEKKVNYEPLAREIKEIWRLERVVVVPIILSATGIVPKSLTASLDVLGLSHSLVQTMQKYTILHTCSMLRGVLDGFSH

SEQ ID NO: 2075 - protein, 1126 aa, Hermetia illucens
MRRRRNLRSGTDNRRESSDLVTGSGSRNGQHGFETASRGAVRRLGATTTRSTAPPAAAVSPQSVATTSAGSRRKRMKWTEEMNLFIIRSYYEITAGAGTTSYRPLLHQRFVEHFPQFAHVTMQRVADQYRFITRSDTIPATIRERVRLEVIGETGDRESMGAEAAASTTPCRTAGNRFSTRRSTLLHRPAEVSAEVRDEFQRACIEFSDMDPLHRPGIPRLYASPATPGILSKINDEIASRLCADMSLLQLQSLVYCGAVAANRLHGQKIRFRVIGFSDKRDPPWKIRLERRRDSLRQDIARLIQISTGNASRRVRNKVQRVYRNYAIPCETPVVEILNTLKQKLSVICSRLRRYGESYSRRLQNATYARNQWSFFRSLNESQQSAQTIQFPVTEAKEYWGGLWGLPAQHAEHAEWITAEGTRHANTPGMNFADVTEEEVRRAINSSKNWRGPGLDRAQNFWYKKFTSVHIRLARSINEVMNLKEFPPFLTAGITYLIPKKDTVQDPADTRPITCLPTLYKFITSIISGRINAHLETNNILSEEQKGCRVGSRGCKDQLIIDSVVVGQATRGQRNVFSCYIDYAKAFDSVPHTWLIVILHLYRIDPKLIKFLATVMEGWHTTLSVRTSEGANTSEAIRIRRGIFQGDSLSPLWFCMALNPLSWLLNDARGHGFAIKYGLRAKCELTHLMYLDEIKLYAGTDNHIRSLLRIIDMFSRDIQMEFGLDKCRIQAIRKGHHELHAGHSIGDLHIEAMTETDFYKYLGILQGTHARVGDLKEALLSEFLRRVKLVLKSHLSGKNKISALNVFAIPSLAYAFGILPWTKTDLENVQRRIRTTMSKFRMHHPKSAVERMNLPRDIGGRGVVDVAAQHHRQVDSLRACFYSKEQASPLHAAVCKADCGLTPLNLKDRSFNPLSGVKSDQERIEEWKSKAMHGKHVNCLWQPFVDLHLSNRWLCAGELFAETEGFMCAIQDGVVATRAYKKLIMKERVENDQCRMCGSALETLDHLISGCTVMAPVQYITRHNAVCKVIHQNLAYKHELITGTCPVYRYEPQAVLDSSAYSMYWDRQVLTDRHTAHNKPDVLLVDKTGRSAYIIDVAIPHNSNIERKYVEKKVNYESLAREIKEI

SEQ ID NO: 2076 - protein, 1188 aa, Hermetia illucens
MRRKRNLRSGTDNRRELSDLVTGSGSRNGQHGVETASRGAVRRLGATTTRSTAPPAAAVSPQSVATTSAGSRRKRMKWTEEMNLFIIRSYYEITAGAGITSYRPLLHQRFVERFPQFAHVTVQRVADQYRFITRSDTIPATIRERVRLEVIGETGVRESMGAEAAASTTPRRTAGNRFSTRRSTLLHRPAEVSAEVRDEFQRACIEFSDMDPLHRPGIPRLYASPATPGILSQINDEIASRLCADMSLLQLQSLVYCGAVAAIRLHGQKIRFRVIGLSDKRDPPWKIRLERRRDSLRQDIARLIQISTGNASRRVRNKVQRVYRNYAIPCETPVVEILDTLKQKLSVICSRLRRYGESYSRRVQNATYARNQRSFFRSLNESQQSAQTIQFSVTEAKEYWGGLWGLPAQHAEHAEWITAEGTRHANTPGINFADVTEEEVRRAINISKNWRGPGLDRVQNFWYKKFTSVHSRLARSINEVMSRPEEFPLFLTAGITYLIPKKDTVQDPADTRPITCLPTLYKFITSIISGRINAHLETNNILSEEQKGCRVGSRGCKEQLIIDSVVVGQATRGQRNLFSCYIDYAKAFDSIPHTWLIDILHLYRIDPKLIKFLATVMEGWHTTLSVRTSEGANTSQPIRIRRGIFQGDSLSPLWFCMALNPLSWLLNDARGHGFAIKYGLRAKCELTHLMYLDDIKLYAGTDNHLRSLLRIIDMFSRDIRMEFGLDKCRIQAIRKGHHEPHAGHSIGDLHIEAMTETDFYKYLGILQGTHARVGDLKEALLSEFLRRVKLVLKSHLSGKNKISALNVFAIPSLAYAFGILPWTKTDLENVQRRIRTTMSKFRMHHPKSAVERMNLPRDIGGRGVVDVAAQHHRQVDSLRAYFYSKEQASPLHAAVCKADCGLTPLNLKDRSFNPLSGVKSDQERIEEWKSKAMHGKHVNCLWQPFVDLHLSNRWLCAGELFAETEGFMCAIQDGVVATRAYKKLIMKERVENDQCRMCSSALETLDHLISGCTVMAPVQYITRHNAVCKVIHQNLAYKHGLITGTCPVYRYEPQAVLDSSAYSMYWDRQVLTDRHTAHNKPDVLLVDKTGRSAYIIDVAIPHNSNIERKYVEKKVNYEPLAREIKEIWRLERVVVVPIILSATGIVPKSLTASLDVLGLSHSLVQTMQKYTILHTCSMLRGVLDGFSH

SEQ ID NO: 2077 - protein, 1188 aa, Hermetia illucens
MRRRRNLRSGTDNRRESSDLVTGSGSRNGQHGVETASRGAVRRLGATTTRSTAPPAAAVSPQPVATTSAGSRRKRMKWTEEMNLFIIRSYYEITAGAGTTSYRPLLHQRFVERFPQFAHVTVQRVADQYRFITRSDTIPATIRERVRLEVIGETGDRESMGAEAAASTTPRRTAGNRFSTRRSTLLHRPAEVSAEVRDEFQRACIEFSDMDPLHRPGIPRLYASPATPGILSQINDEIASRLCADMSLLQLQSLVYCGAVAAIRLHGQKIRFRVIGLSDKRDPPWKIRLERRRDSLRQDIARLIQISTGNASRRVRNKVQRVYRNYAIPCETPVVEILDTLKQKLSVICSRLRRYGESYSRRVQNATYARNQRSFFRSLNESQQSAQTIQFSVTEAKEYWGGLWGLPAQHAEHAEWITAEGTRHANTPGMNFADVTEEEVRRAINSSKNWRGPGLDRVQNFWYKKFTSVHSRLARSINEVMSRPEEFPPFLTAGITYLIPKKDTVQDPADTRPITCLPTLYKFITSIISGRINAHLETNNILSEEQKGCRVGSRGCKEQLIIDSVVVGQATRGQRNLFSCYIDYAKAFDSVPHTWLIDILHLYRIDPKLIKFLATVMEGWHTTLSVRTSEGANTSEPIRIRRGIFQGDSLSPLWFCMALNPLSWLLNDARGHGFAIKYGLRAKCELTHLMYLDDIKLYAGTDNHLRSLLRIIDMFSRDIRMEFGLDKCRIQAVCKGHHEPHAGHSIGDLHIEAMPETDFYKYLGILQGTHARVGDLKEALLSEFLRRVKLVLKSHLSGKNKISALNVFAIPSLAYAFGILPWTKTDLENVQRRIRTTMSKFRMHHPKSAVERMNLPRDIGGRGVVDVAAQHHRQVDSLRAYFYSKEQASPLHAAVCKADCGLTPLNLKDRSFNPLSGVKSDQERIEEWKSKAMHGKHVNCLWQPFVDLHLSNRWLCAGKLFAETEGFMCAIQDGVVATRAYKKLIMKERVENDQCRMCGSALETLDHLISGCTVMAPVQYITRHNAICKVIHQNLAYKHGLITGTCPVYRYEPQAVLDSSAYSMYWDRQVLTDRHTAHNKPDVLLVDKTGRSAYIIDVAIPHNSNIERKYVEKKVNYEPLAREIKEIWRLERVVVVPIILSATGIVPKSLTASLDVLGLSHSLVQTMQKYTILHTCSMLRGVLDGFSH

SEQ ID NO: 2078 - protein, 1193 aa, Hermetia illucens
MHHQKMRRRRNLRSGTDNRRESSDLVTGSGSRNGQHGVETASRGAVRRLGATTTRSTAPPAAAVSPQSVATTSAGSRRKRMKWTEEMNLFIIRSYYEITAGAGTTSYRPLLHQRFVERFPQFAHVTVQRVADQYRFITRSDTIPATIRERVRLEVIGETGDRESMGAEAAASTTPRRTAGNRFSTRRSTLLHRPAEVSAEVRDEFQRACIEFSDMDPLHRPGIPRLYASPATPGILSQINDEIASRLCADMSLLQLQSLMYCGAVAAIRLHGQKIRFRVIGLSDKRYPPWKIRLERRRDSLRQDIARLIQISTGNASRWVRNKVQRVYRNYAIPCETPVVEILDTLKQKLSVICSRLRWYGESYSRRVQNATYARNQRSFFRSLNESQQSAQTIQFSVTEAKEYWGGLWGLPAQHAEHAEWITAEGTRHANTPGMSFADITEEKVRRAINSSKNWRGPGLDRVQNFWYKKFTSVHSRLARSINEVMSWPEEFPPFLTAGITYLIPKKDTVQDPADTRPITCLPTLYKFITSIISGRINAHLETNNILSEEHKGCRVGSRGCKEQLIIDSVAVGQATRGQRNLFSCYIDYAKAFDSVPHTWLIDILHLYRIDPKLIKFLATVMEGWHTTLSVRTSEGANTSEPIRIRRGIFQGDSLSPLWFCMALNPLSWLLNDARGHGFAIKYGLRAKCELTHLMYLDDIKLYAGTDNHLRSLLRIIDMFSRDIRMEFGLDKCRIQAIRKGHHERHAGHSIGDLHIEAMTETDFYKYLGILQGTHARVGDLKGALLSEFLRRVKLVLKSHLSGKNKISALNVFAIPSLAYAFGILPWTKTDLENVQRRIRTTMSKFRMHHPKSAVERMNLPRDIGGRGVVDVAAQHHRQVDSLRAYFYSKEQASPLHAAVNKADCGLTPLNLKDRSFNPLSGVKSDQERIDEWKSKAMHGKHVNCLWQPFVDLHLSNRWLCAGELFAETEGFMWAIQDGVVATRAYKKLIMKERVENDQCRMCGSALETLDHLISGCTVMAPVQYITRHNAVCKVIHQNLAYKHGLITGTCPVYRYEPQAVLDSSAYSMYWDRQVLTDRHTAQNKPDVLLVDKTGRSAYIIDVAIPHNSNIERKYVEKKVNYEPLACEIKGIWRLERVVVVPIILSATGIVPKSLTASLDVLGFSHSLVQTMQKYTILHTCSMLRGVLDGFSH

SEQ ID NO: 2079 - protein, 1193 aa, Hermetia illucens
MHHQKMRRRRNLRSGTDDRRESSDLVTGSGSRNGQHGVETASRGAVRRLGATTTRSTAPPAAAVSPQSVATTSAGSRRKRMKWTEEMNLFIIRSYYEITAGAGTTSYRPLLHQRFVERFPQFAHVTVQRVADQYRFITRSDTIPATIRERVRLEVIGETGDRESMGAEAAASTTSRRTAGNRFSTRRSTLLHRPAEVSAEVRDEFQRACIGFSDMDPLHRPGIPRLYASPATPGILSQINDEIASRLCADMSLLQLQSLVYCGAVAAIRLHGQKIRFRVIGLSDKRDPPWKIRLERRRDSLRQDIARLIQISTGNASRRVRNKVQRVYRNYAIPCETPVVEILDTLKQKLSVICSRLRRYGESYSRRVQNATYARNQRSFFRSLNESQQSAQTIQFSVTEAKEYWGGLWGLPAQHDEHAEWITAEGTRHVNTPGMNFADVTEEEVRGAINSSKNWRGPGLDRVQNFWYKKFTSVHSRLARSINEVMSRPEEFPPFLTAGITYLIPKKDTVQDPADTRPITYLPTLYKFITSIISGRINAHLETNNILSEEQKGCRVGSRGCKEQLIIDSVVVGQATRGQRNLFSCYIDYAKAFDSVPHTWLIDILHLYRIDPKLIKFLATVMEGWHTTLSVRTSEGANTSEPIRIRRGIFQGDSLSPLWFCMALNPLSWLLNDARGHGFAIKYGLRAKCELTHLMYLDDIKLYAGTDNHLRSLLRIIDMFSRDIRMEFGLDKCRIQAIRKGHHEPHAGHSIGDLHIEAMTETDFYKYLGILQGTHARVGDLKEALLSEFLRRVKLVLKSHLSGKNKISALNVFAIPSLAYAFGILPWTKTDLENVQRRIRTTMSKFRMHHPKSAVERMNLPRDIGGRGVVDVAAQHHRQVDSLRAYFYSKEQASPLHAAVCKADCELTPLNLKDRSFNPLSGVKSDQERIEEWKSKAMHGKHVSCLWQPFVDLHLSKRWLCAGELFAETEGFMCAIQDGVVATRAYKKLIMKERVENDQCRMCGSALETLDHLISGCTVMAPVQYITRHNAVCKVIHQNLAYKHGLITGTCPVYRYEPQAVLDSSAYSMYWDRQVLTDRHTAHNKPDVLLVDKTGRSAYIIDVAIPHNSNIERKYVEKKVNYEPLAREIKEIWRLERVVVVPIILSATGIVPKSLTASLDVLGLSHSLVQTMQKYTILHTCSMLRGVLDGFSH

SEQ ID NO: 2080 - protein, 1180 aa, Hermetia illucens
MHHQKMRRRRNLRSGTDNRRESSDLVTGSGSRNGQHGVETASRGAVRRLGATTTRSTAPPAAAVSPQSVATTSAGSRRKRMKWTEEMNLFIIRSYYEITAGAGTTSYRPLLHQRFVERFPQFAHVTVQRVADQYRFITRSDTIPATIRERVRLEVIGETGDRESMGAEAAASTTPRRTAGNRFSTRRSTLLHRPAEVSAEVRDEFQRACIEFSDMDPLHRPGIPRLYASPATPGILSQINGEIASRLCADMSLLQLQSLVYCGAVAAIRLHGQKIRFRVIGLSDKRDPPWKIRLEGRRDSLRQDIARLIQISTGNASRRVRNKVQRVYRNYAIPCETPVVEILDTLKQKLSVICSRLRRYGESYSRRVQNATYARNQRSFFRSLNESQQSAQTIQFSVTEAKEYWGGLWGLPAQHAEHAEWITAEGTRHANTPGMNFADVTEEEVRRAINISKNWRGPGLDRVQNFWYKKFTSVHSRLARSINEVMSRPEEFPPFLTAGITYLIPKKDTVQDPADTRPITCLPTLYKFITSIISGRINAHLETNNILSEEQKGCRVGSRGCKEQLIIDSVVVGQATRGQRNLFSCCIDYAKAFDSVPHTWLIDILHLCHIDPKLIKFLATLMEGWHTTLSVRTSGGSNTSEPIRIRRGIFQGDSLSPLWFCMALNPLSWLLNDARGHGFVIKYGLRAKCELTHLMYLDDIKLYAGTDNHLRSLLRIIDMFSRDIRMEFGLDKCRIQAIRKGHHEPHAGHSIGDLHIEAMTETDFYKYLGILQGTHARVGDLKEALLSEFLRRVKLVLKSHLSGKNKISALNVFAIPSLAYAFGILPWTKTDLENVQRRIRTTMSKFRMHHPKSAVERMNLPRDIGGRGVVDVAAQHHRQVDSLRAYFYSKEQASPMHAAVCKADCGLTPLNLKDRSFNPLSGVKSDQERIDEWKSKAMHGKHVNCLWQPFVDLHLSNRWLCAGELFAETEGFMCAIQDGVVATRAYKKLIMKERVENDQCRMCGSALETLDHLISRCTVMAPVQYITRHNAVFKVIHQNLTYKHGLITGTCPVYRYEPQAVLDSSAYSMYWDRQVLTDRHTAHNKPDVLLVDKTGRSAYIIDVAIPHNSNIERKYVEKKMNYEPLAREIKEIWRLERVVVVPIILSATGIVPKSLTASLDVLGLSHSLVQTMQKYTILHT

SEQ ID NO: 2081 - protein, 1188 aa, Hermetia illucens
MRRRRNLRSGTDNRRESSDLVTGSGSRNGQHGVETASRGAVRRLGATTTRSTAPPAAAVSPQPVATTSAGSRRKRMKWTEEMNLFIIRSYYEITAGAGTTSYRPLLHQRFVERFPQFAHVTVQRVADQYRFITRSDTIPATIRERVRLEVIGETGDRESMGAEAAASTTPRRTAGNRFSTRRSTLLHRPAEVSAEVRDEFQRACIEFSDMDPLHRPGIPRLCASPATPGILSQINDEIASRLCADMSLLQLQSLVYCGAVAAIRLHGQKIRFRVIGLSDKRDPPWKIRLERRRDSLRQDIARLIQISTGNASRRVRNKVQRVYRNYAIPCETPVVEILDTLKQKISVICSRLRRYGESYSRRVQNATYARNQRSFFRSLNESQQSAQTIQFSVTEAKEYWGGLWGLPAQHAEHAEWITAEGTRHANTPGMNFADVTEEEVRRAINSSKNWRGPGLDRVQNFWYKKFTSVHSRLARSINEVMSRPEEFPPFLTAGITYLIPKKDTVQDPADTRPITCLPTLYKFITSIISGRINAHLETNNILSEEQKGCRVGSRGCKEQLIIDSVVVGQATRGQRNLFSCYIDYAKAFDSVPHTWLIDILHLYRIDPKLIKFLATVMEGWHTTLSVRTSEGANTSEPIRIRRGIFQGDSLSPLWFCMALNPLSWLLNDARGHGFAIKYGLRAKCELTHLMYLDDIKLYAGTDNHLRSLLRIIDMFSRDIRMEFGLDKCRIQAIRKGHHEPHAGHSIGDLHIEAMTETDFYKYLGILQGTHARVGDLKEALLSEFLRRVKLVLKSHLSGKNKISALNVFAIPSLAYAFGILPWTKTDLENVQRRIRTTMSKFRMHHPKSAVERMNLPRDIGGRGVVDVAAQHHRQVDSLRAYFYSKEQASPLHAAVCKADCGLTPLNLKDRSFNPLSGVKSDQERIEEWKSKAMHGKHVNCLWQPFVDLHLSNRWLCAGELFAETEGFMCAIQDGVVATRAYKKLIMKERVENDQCRMCGSALETLDHLISGCTVMAPVQYITRHNAVCKVIHQNLAYKHGLITGTCPVYRYEPQAVLDSSAYSMYWDRQVLTDRHTAHNKPDVLLVDKTGRSAYIIDVAIPHNSNIERKYVEKKVNYEPLAREIKEIWRLERVVVVPIILSATGIVPKSLTASLDVLGLSHSLVQTMQKYTILHTCSMLRGVLDGFSH

SEQ ID NO: 2082 - protein, 1193 aa, Hermetia illucens
MHHQKMRRRRNLRSGTDNRRESSDLVTGSGSRNGQHGVETASRGAVRRLGATTTRSTAPPAAAVSPQSVATTSAGSRRKRMKWTEEMNLFIIRSYYEITAGAGTTSYRPLLHQRFVERFPQFAHVTVQRVADQYRFITRSDTIPATIRERVRLEVIGETGDRESMGAEAAASTTSRRTAGNSFSTRRSTLLHRPAEVSAEVRDEFQRACIEFSDMDPLHRPGIPRLYASPATPGILSQINDEIASRLCADMSLLQLQSLVYCGAVAAIRLHGQKIRFRVIGLSDKRDPPWKIRLERRRDSLRQDIARLIQISTGNASRRVRNKVQRVYRNYAIPCETPVVEILDTLKQKLSVICSRLRRYGESYSKRVQNATYARNQRSFFRSLNESQQSAQTIQFSVTEAKEYWGGLWGLPAQHAEHAEWITAEGTRHVNTPGMNFADVTEEEVRGAINSSKNWRGPGLDRVQNFWYKKFTSVHSRLARSINEVMSRPEEFPPFLTAGITYLIPKKDTVQDPADTRPITCLPTLYKFITSIISGRINAHLETNNILSEEQKGCRVGSRGCKEQLIIDSVVVGQATRGQRNLFSCYIDYAKAFDSVPHTWLIDILHLYRIDPKLIKFLATVMEGWHTTLSVRTSEGANTSEPIRIRRGIFQGDSLSPLWFCMALNPLSWLLNDARGHGFAIKYGLRAKCELTHLMYLDDIKLYAGTDNHLRSLLRIIDMFSRDIRMEFGLDKRRIQAIRKGHHEPHAGHSIGDLHIEAMTETDFYKYLGILQGTHARVGDLKEALLSEFLRRVKLVLKSHLSGKNKISALNVFAIPSLAYAFGILPWTKTDLENVQRRIRTTMSKFRMHHPKSAVERMNLPRDIGGRGVVDVAAQHHRQVDSLRAYFYSKEQASPLHAAVCKADCGLTPLNLKDRSFNPLSGVKSDQERIEEWKSKAMHGKHVNCLWQPFVDLHLSNRWLCAGELFAETEGFMCAIQDGVVATRAYKKLIMKERVENDQCRMCGSALETLDHLISGCTVMAPVQYITRHNAVCKVIHQNLAYKHGLITGTCPVYRYEPQAVLDSSAYSMYWDRQVLTDRHTAHNKPDVLLVDKTGRSAYIIDVAIPHNSNIERKYVEKKVNYEPLAREIKEIWRLERVVVVPIILSATGIVPKSLTASLDVLGLSHSLVQTMQKYTILHTCSMLRGVLDGFSH

SEQ ID NO: 2083 - protein, 976 aa, Hermetia illucens
MDPLHRSGIPRLYASPATPGILSQINDEIASRLCADMSLLQLQSLVYCGAVAAIRLHGQKIRFRVIGLSDKRDPPWKIRLERRRDSLRQDIARLIQISTGNASRRVRNKVQRVYRNYAIPCETPVVEILDTLKQKISVIFSRLRRYGESYSRRVQNATYARNQRSFFRSLNESQQSAQTIQFSVTEAKEYWGGLWGLPAQYAEWITAEGTRHANTPGMNFADVTEEEVRRAINISKNWRGPGLDRVQNFWYKKFTSVHSRVARSINEVMSRPEEFPPFLTAGITYLIPKKDTVQDPADTRPITCLPTLYKFITSIISGRINAHLETNNILSEEQKGCRVGSRGCKEQLIIDSVVVGQATRGQRNLFSCYIDYAKAFDSVPHTWLIDILHLYRIDPKLIKFLATVMEGWHTTLSVRTSEGVNTSEPIRIRRGIFQGDSLSPLWFCMALNPLSWLLNDARGHGFAIKYGLRAKCELTHLMYLDDIKLYAGTDNHLRSLLRIIDMFSRDIRMEFGLDKCRIQAIRKGHHESHAGHSIGDLHIEAMTETDFYKYLGILQGTHARVGDLKEALLSEFLRRVKLVLKSHLSGKNKISALNVFAIPSLAYAFGILPWTKTDLENVQRRIRTTMSKFRMHHPKSAVERMNLPRDIGGRGVVDVAAQHHRQVDSLRAYFYSKEQASPLHAAVCKADCGLAPLTLKDRSFNPLSGVKSDQERIEEWKSKAMHGKHVNCLWQPFVDLHLSNRWLCAGELFAETEGFMCAIQDSVVATRAYKKLIMKERLENDQCRMCGSALETLDHLISGCTVMTPVQYITRHNAVCKVTHQNHAYKHGLITGTCPVYRYEPQAVLDSSAYSMYWDRQVLTDRHTAHNKPDVLLVDNTGRSAYIIDVAIPHNSNIERKYMEKKVNYESLAREIKEIWRLERVVVVPIILSATGIVPKSLTASLDVLGLSHSLVQTMQKYTILHTCSMLRGVLDGFSH

SEQ ID NO: 2084 - protein, 759 aa, Hermetia illucens
MNFADVTEEEVRRAINSSKNWRGPGLDRVQNFWYEKFTSVHIRLARSINEVMSRPEEFPPFLTAGITYLIPKKDTVQDPADTRPITCLPTLYKFITSIISGRINAHLETNNILSEEQKGSRGGSRGCKEQLIIDSVVVGQATRGQRNLFSCYIDYAKAFDSVPHTWLINILHLYRIDPKLIKFLVTVMEGWHTTLSVRTSEGANTSEPIRIRRGIFQGDSLSPLWFCMALNPLSWLLNDARGHGFAIKYGLRAKCELTHLMYLDDIKLYAGTDDHLRSLLRIIDMFSRDIRMEFGLDKCRIQAIRKGHHEPHAGHSIGDLHIEAMTETDFYKYLGILQGTHARVGDLKEALLSEFLRRVKLVLKSHLSGKNKISTLNVFAIPSLAYAFGILPWTKTDLENVQRRIRTTMSKFRMHHPKSAVERMNLPRDIGGRGVVDVAAQHHRQVDSLRACFYSKEQASPLHAAVCKADCGLTPLNLKDRSFNPLSGVKSDQERIEEWKSKAMHGKHVNCLWQPFVDLHLSNRWLCAGELFAETEGFMCAIQDGVVATRAYKKLIMKERVENDQCRMCGSALETLDHLISGCTVMAPVQYITRHNAVCKVIHQNLAYKHELITGTCPVYRYEPQAVLDSSAYSMYWDRQVLTDRHTAHNKPDVLLVDKTGRSAYIIDVAIPHNNNIERKYVEKKVNYEPLAREIKEIWRLERVVVVPIILSTTGIVPKSLTASLDVLGLSHSLVQTMQKYTILHTCSMLRGVLDGFSH

SEQ ID NO: 2085 - protein, 1114 aa, Hermetia illucens
MRRRRNLRSGTDNRRESSDLVTGSGSRNGQHGVETASRGAVRRLGATTTRSTAPPAAAVSPQPVATTSAGSRRKRMKWTEEMNLFIIRSYYEITAGAGTTSYRPLLHQRFVERFPQFAHVTVQRVADQYRFITRSDTIPATIRERVRLEVIGETGDRESMGAEAAASTTSRRTAGNRFSTRRSTLLHRPAEVSAEVRDEFQRACIEFSDMDPLHRPGIPRLYASPATPGILSQINDEIASRLCADMSLLQLQSLVYCGAVAAIRLHGQKIRFRVIGSSDKRDPPWKIRLERRRDSLRQDIARLIQISTGNASRRVRNKVQRVYRNYAIPCETPVVEILDTLKQKLSVICSRLRRYGESYSRRVQNATYARNQRSFFRSLNESQQSAQTIQFSVTEAKEYWGGLWGLPAQHAEHAEWITAEGTRHANTPGMNFADVTEEEVRRAINISKNWRGPGLDRVQNFWYKKFTSVHSRLARSINKVMSRPEEFPPFLTAGITYLIPKKDTVQDPADTRPITCLPTLYKFITSIISGRINAHLETNNILSEEQKGCRVGSRGCKEQLIIDSLVVGQATRGQRNLFSCYIDYAKAFDSVPHTWLIDILHLYRIDPKLIKFLATVMEGWHTTLSVRTSEGANTSEPIRIRKGIFQGDSLSPLWFCMALNPLSWLLNDARGHGFAIKYGLRAKCELTHLMYLDDIKLYAGTDNHLRSLLRIIDMFSRDIRMEFGLDKCRIQAIRKGHHEPHAGHSIGDLHIEAMTETDFYKYLGILQGTHARVGDLKEALLSEFLRRVKLVLKSHLSGKNKISALNVFAIPSLAYAFGILPWTKTDLENVQRRIRTTMSKFRMHHPKSAVERMNLPRDIGGRGVVDVAAQHHRQVDSLRAYFYSKEQASPLHAAVCKADCGLTPLNLKDRSFNPLSGVKSDQERIEEWKSKAMHGKHVNCLWQPFVDLHLSNRWLCAGELFAETEGFMCAIQDGVVATRAYKKLIMKERVENDQCRMCGSALETLDHLISGCTVMAPVQYITRHNAVCKVIHQNLAYKHGLITGTCPVYRYEPQAVLDSSAYSMYWDRQVLTDGHTAHNKPDVLLVDKRVAPRILLMLLSPIIATLNGNTWRRR

SEQ ID NO: 2086 - protein, 1138 aa, Hermetia illucens
MHHQKMRRRRDLRSGTDNRRESSDLVTGSGSRNGQHGVETASRGAVRRLGATTTRSTAPPAAAVSPQSVATTSAGSRRKRMKWTEEMNLFIIRSYYEITAGAGITSYRPLLHQRFVERFPQFAHVTVQRVADQYRFITRSDTIPATIRERVRLEVIGETGDRESMGAEAAASTTPRRTAGNRFSTRRSTLLHRPAEVSAEVRDEFQRACIEFSDMDPLHRPGIPRLYASPATPGILSQINDEIASRLCADMSLLQLQSLVYCGAVAAIRLHGQKIRFRVIGLSDKRDPPWKIRLERRRDSLRQDIARLIQISTGNASRRVRNKVQRVYRNYAIPCETPVVEILDTLKQKLSVICSRLRRYGESYSRRVQNATYARNQRSFFRSLNESQQSAQTIQFSVTEAKEYWGGLWGLPAQHAEHAEWITAEGTRHANTPGMNFADVTEEEVRRAINISKNWRGPGLDRVQNFWYKKFTSVHSRLARSINEVMSRPEEFPPFLTAGITYLIPKKDTVQDPADTRPITCLPTLYKFITSIISGRINAHLETNNILSEEQKGCRVGSRGCKEQLIIDSVVVGQATRGQRNLFSCYIDYAKAFDSVPHTWLIDILHLYRIDPKLIKFLATVMEGWHTTLSVRTSEGANTPEPIRIRRGIFQGDSLSPLWFCMALNPLSWLLNDARGHGFAIKYGLRAKCELTHLMYLDDIKLYAGTDDHLRSLLRIIDMFSRDIRMEFGLDKCRIQAIRKGHHEPHAGHSIGDLHIEAMTETDFYKYLGILQGTHARVGDLKEALLSEFLRRVKLVLKSHLSGKNKISALNVFAIPSLAYAFGILPWTKTDLENVQRRIRTTMSKFRMHHPKSAVERMNLPRDIGGRGVVDVAAQHHRQVDSLRAYFYSKEQASPLHAAVCKADCGLTPLNLKDRSFNPLSGVKSDQGRIDEWKSKAMHGKHVNCLWQPFVDLHLSNRWLCAGELFAETEGFMCAIQDGVVATRAYKKLIMKERVENDQCRMCGSALETLDHLISGCTVMAPVQYITRHNAVCKVIHQNLAYKHGLITGTCPVYRYEPQAVLDSSACSMYWDRQVLTDRHTAHNKPDVLLVDKTGRSAYIIDVAIPHNSNIERKYVEKKVNYEPLAREIKEIWRLERS

SEQ ID NO: 2087 - protein, 1188 aa, Hermetia illucens
MRRRRDLRSGTDNRRESSDLVTGSGSRNGQHGVETANRGAVRRLGATTTRSTAPPAAAVSPQSVATTSAGSRRKRMKWTEEMNLFIICSYYEITAGAGTTSYRPLLHQRFVERFPQFAHVTVQRVVDQYRFITRSDTIPATIRERVRLEVIGETGDRESMGAEAAASTTPRRTAGNRFSTRRSTLLHRPAEVSAEVRDEFQRACIEFSDMDPLHRPGIPRLYASPVTPGILSQINDEIASRLCADMSLLQLQSLVYCGAVAAIRLHGQKIRFRVIGLSDKRDPPWKIRLERRRDSLRQDIARLIQISTGNASRRVRNKVQRVYRNYAIPCETPVVEILDTLKQKLSVICSRLRRYGESYSRRVQNATYARNQRSFFRSLNESQQSAQTIQFSVTEAKEYWGGLWGLPAQHAEHAEWITAEGTRHANTPGMNFADVTEEEVRRAINISKNWRGPGLDRVQNFWYKKFTSVHSRLACSINEVMSRPEEFPPFLTAGITYLIPKKDTVQDPADTRPITCLPTLYKFITSIISGRINAHLETNNILSEEQKGCRVGSRGCKEQLIIDSVVVGQATRGQRNLFSCYIDYAKAFDSVPHTWLIDILHLYRIDPKLIKFLATVMEGWHTTLSVRTSEGANTSEPIRIRRGIFQGDSLSPLWFCMALNPLSWLLNDARGHGFAIKYGLRAKCELTHLMYLDDIKVCAGTDNHLRSLLRIIDMFSRDIRMEYGLDKCRIQAIRKGHHEPHAGHSIGDLHIEAMTETDFYKYLGILQGTHARVGDLKEALLSEFLRRVKLVLKSHLSGKNKISALNVFAIPSLAYASGILPWTKTDLENVQRRIRTTMSKFRMHHPKSAVERMNLPRDIGGRGVVDVAAQHHRQVDSLRAYFYSKEQASPLHAAVCKADCGLTPLNLKDRSFNPLSGVKSDQERIEEWKSKAMHGKHVNCLWQPFVDLHLSNRWLCAGELFAETEGFMCAIQDGVVATRAYKKLIMKERVENDQCRMCGSALETLDHLISGCTVMAPVQYITRHNAVCKVIHQNLAYKHGLITGTCPVYRYEPQAVLDSSAYSMYWDRQVLTDRHTAHNKPDVLLVDKTGRSAYIIDVAIPHNSNIERKYVEKKVNYEPLAREIKEIWRLERVVVVPIILSATGIVPKSLTASLDVLGLSHSLVQTMQKYTILHTCSMLRGVLDGFSH

SEQ ID NO: 2088 - protein, 1188 aa, Hermetia illucens
MRRKRNLRSGTDNRRESSDLVTGSGSRNGQHGVETASRGAVRRLGATTTRSTAPPAAAVSPQSVATTSAGSRRKRMKWTEEMNLFIIRSYYEITAGAGITSYRPLLHQRFVERFPQFAHVTVQRVADQYRFITRSDTIPATIRERVRLEVIGETGDRESMGAEAAASTTPRRTAGNRFSTRRSTLLHRPAEVSAEVRDEFQRACIEFSDMDPLHRPGIPRLYASPATPGILSQINDEIASRLCADMSLLQLQSLVYCGAVAAIRLHGQKIRFRVIGLSDKRDPPWKIRLERRRDSLRQDIARLIQISTGNASRRVRNKVQRVYRNYAIPCETPVVEILDTLKQKLSVICSRLRRYGESYSRRVQNATYARNQRSFFRSLNESQQSAQTIQFSVTEAKEYWGGLWGLPAQHAEHAEWITAEGTRHANTPGMNFADVTEEEVRRAINISKNWRGPGLDRVQNFWYKKFTSVHSRLARSINEVMSRPEEFPPFLTAGITYLIPKKDTVQDPADTRPITCLPILYKFITSIISGRINAHLETNNILSEEQKGCRVGSRGCKEQLIIDSVVVGQATRGQRNLFSCYIDYAKAFDSVPHTWLIDILHLYRIDPKLIKFLATVMEGWHTTLSVRTSEGANTSEPIRIRRGIFQGDSLSPLWFSMALNPLSWLLNDTRGHGFAIKYGLRAKCELTHLMYLDDIKLYAGTDNHLRSLLRIIDMFSRDIRIEFGLDKCRIQAIRKGHHEPHAGHSIGDLHIEAMTETDFYKYLGILQGTHARVGDLKEALLSEFLRRVKLVLKSHLSGKNKISALNVFAIPSLAYAFGILPWTKTDLENVQRRIRTTMSKFRMHHPKSAVERMNLPRDIGGRGVVDVAAQHHRQVDSLRAYFYSKEQASPLHAAVCKADCGLTPLNLKDRSFNPLSGVKSDQERIEEWKSKAMHGKHVNCLWQPFVDLHLSNRWLCAGELFAETEGFMCAIQDGVVATRAYKKLIMKERVENDQCRMCGSALETLDHLISGCTVMAPVQYITRHNAVCKVIHQNLAYKHGLITGTCPVYRYEPQAVLDSSAYSMYWDRQVLTDRHTAHNKPDVLLVDKTGRSAYISDVAIPHNSNIERKYVEKKVNYEPLAREIKEIWRLERVVVVPIILSATGIVPKSLTASLDVLGLSHSLVQTMQKYTILHTCSMLRGVLDGFSH

SEQ ID NO: 2089 - protein, 1188 aa, Hermetia illucens
MRKRRNLRSGTDNRRESSDLVTGSGSRNGQHGVETASRGAVRRLGATTTRSTAPPAAAVSPQPVATTSAGSRRKRMKWTEEMNLFIIRSYYEITAGAGTTSYRPLLHQRFVERFPQFAHVTVQRVADQYRFITRSDTIPATIRERVRLEVIGETGDRESMGAEAAASTTSRRTAGNRFSTRQSTLLHRPAEVSAEVRDEFQRACIEFSDMDPLHRPGIPRLYASPATPGILSQINDEIASRLCADMSLLQLQSLVYCGAVTAIRLHGQKIRFRVIGLSDKRDPPWKIRLERRRDSLRQDIARLIQISTGNASRRVRNKVQRVYRNYAIPCETPVVEILDTLKQKLSVICSRLRRYGESYSRRVQNATYTRNQRSFFRSLNESQQSAQTIQFSVTEAKEYWGGLWGLPAQHAEHAEWITAEGTRHVNTPGMNFADVTEEEVRRAINSSKNWRGPGLDRVQNFWYKKFTSVHSRLARSINEVMSRPEEFPPFLTAGITYLIPKKDTVQDPADTRPITCLPTLYKFITSIISGRINAHLETNNILSEEQKGCRVGSRGCKEQLIIDSVVVGQATRGQRNLFSCYIDYAKAFDSVPHTWLIDILHLYRIDPKLIKFLATVMEGWHTTLSVRTSEGANTSEPIRIRRGIFQGDSLSPLWFCMALNPLSWLLNDARGHGFAIKYGLRAKCELTHLMYLDDIKLYAGTDNHLRSLLRIIDMFSRDIRMEFGLDKCRIQAIRKGHHEPHAGHSIGDLHIEAMTETDFYKYLGILQGTHARVGDLKEALLSEFLRRVKLVLKSHLSGKNKISALNVFAIPSLAYAFGILPWTKTDLENVQRRIRTTMSKFRMHHPKSAVERMNLPRDIGGRGVVDVAAQHHRQVDSLRAYFYSKEQASPLHAAVCKADCGLTPLNLKDRSFNPLSGVKSDQERIEEWKSKAMHGKHVNCLWQPFVDLHLSNRWLCAGELFAETEGFMCAIQDGVVATRAYKKLIMKERVENDQCRMCGSALETLDHLISGCTVMAPVQYITRHNAVCKVIHQNLAYKHGLITGTCPVYRYEPQAVLDSSAYSMYWDRQVLTDRHTAHNKPDVLLVDKTGRPAYIIDVAIPHNSNIERKYVEKKVNYEPLAREIKEIWRLERVVVVPIILSATGIVPKSLTASLDVLGLSHSLVQTMQKYTILHTCSMLRGVLDGFSH

SEQ ID NO: 2090 - protein, 1193 aa, Hermetia illucens
MHHQKMRRRRNLRSGTDNRRESSDLVTGSGSRNGQHGVETASRGAVRRLGATTTRSTAPPAAAVSPQSVATTSAGSRRKRMKWTEEMNLFIIRSYYEITAGAGATSYRPLLHQRFVERFPQFAHVTVQRVADQYRFITRSDTIPATIRERVRLEVIGETGDRESMGAEAAASTTPRRTAGNRFSTRRSTLLHRPAEVSAEVRDEFQRVCMEFSDMDPLHRPGIPRLYASPATPGILSQINDEIASRLCADMSLLQLQSLVYCGAVAAIRLHGQKIRFRVIGLSDKRDPPWKIRLERRRDSLRQDIARLIQISTGNASRRVRNKVQRVYRNYAIPCETPVVEILDTLKQKLSVICSRLRRYGESYSRRVQNATYARNQRSFFRSLNESQQSAQTIQFSVTEAKEYWGGLWGLPAQHAEHAEWITAEGTRHANTPGMSFADVTEEEVRRAINSSKNWRGPGLDRVQNFWYKKFTSVHSRLARSINEVMSRPEEFPPFLTAGITYLIPKKDTVQAPADTRPITCLPTLYKFITSIISGRINAHLETNNILSEEQKGCRVGSRGCKEQLIIDSVAVGQATRGQRNLFSCYIDYAKAFDSVPHTWLIDILHLYRIDPKLIKFLATVMEGWHTTLSVRTSEGANTSEPISIRRGIFQGDSLSPPWFCMALNPLSWLLNDARGHGFAIKYGLRAKCELTHLMYLDDIKLYAGTDDHLRSLLRIIDMFSRDIRMEFGLDKCRIQAIRKGHHEPHAGHSIGDLHIEAMTETDFYKYLGILQGTHARVGDLKEALLSEFLRRVKLVLKSHLSGKNKISALNVFAIPSLAYAFGILPWTKTDLENVQRRIRTTMSKFRMHHPKSAVERMNLPRDIGGRGVVDVAAQHHRQVDSLRAYFYSKEQASPLHAAVCKADCGLTPLNLKDRSFNPLSGVKSDQERIEEWKSKAMHGKHVNCLWQPFVDLHLSYRWLCAGELFAETEGFMCAIQDGVVATRAYKKLIMKERVENDQCRMCGSALETLDHLISGCTVMAPVQYITRHNAVCKVIHQNLAYKHGLITGTCPVYRYEPQAVLDSSAYSMYWDRQVLTDRHTAHNKPDVLLVDKTGRSAYIIDVAIPHNSNIERKYVEKKVNYEPLAREIKEIWRLERVVVVPIILSATGIVPKSLTASLDVLGLSHSLVQTMQKYTILHTCSMLRGVLDGFSH

SEQ ID NO: 2091 - protein, 1188 aa, Hermetia illucens
MRRRRNLRSGTDNRRESSDLVTGSGSRNGQHGVETASRGAVRRLGATTTRSTAPPAAAVSPQPVATTSAGSRRKRMKWTEEMNLFIIRSYYEITAGAGTTSYRPLLHQRFVERFPQFAHVTVQRVADQYRFITRSDTIPATIRERVRLEVIGETGDRESMGAEAAASTTSRRTAGNRFSTRRSTLLHRPAEVSAEVRDEFQRACIEFSDMDPLHRPGIPRLYASPATPGILSQINDEIASRLCADMSLLQLQSLVYCGAVAAIRLHGQKIRFRVIGLSDKRDPPWKIRLERRRDSLRQDIARLIKISTGNASRRVRNKVQRVYRNYAIPCETPVVEILDTLKQKLSVICSRLRRYGESYSRRVQNATYARNQRSFFRSLNESQQSAQTIQFSVTEAKEYWGGLWGLPAQHAEHAEWITAEGTRHVNTPGMNFADVTEEEVRRAINSSKNWRGPGLDRVQNFWYKKFTSVHSRLARSINEVMSRPEEFPPFLTAGITYLIPKKDTVQDPADTRPITCLPTLYKFITSIISGRINAHLETNNILSEEQKGCRVGSRGCKEQLIIDSVVVGQATRGQRNLFSCYIDYAKAFDSVPHTWLIDILHLYRIDPKLIKFLATVMEGWHTTLSVRTSEGANTSELIRIRRGIFQGDSLSPLWFCMALNPLSWLLNDARGHGFAIKYGLRAKCELTHLMYLDDIKLYAGTDNHLRSLLRIIDMFSRDIRMEFGLDKCRIQAIRKGHHEPHAGHSIGDLHIEAMTETDFYKYLGILQGTHARVGDLKEALLSEFLRRVKLVLKSHLSGKNKISALNVFAIPSLAYAFGILPWTKTDLENVQRRIRTTMSKFRMHHPKSAVERMNLPRDIGGRGVVDVAAQHHRQVDSLRAYFYSKEQASPLHAAVCKADCGLTPLNLKDRSFNPLSGVRSDQERIEEWKSKAMHGKHVNCLWQPFVDLHLSNRWLCAGELFAETEGFMCAIQDGVVATRAYKKLIMKERVENDQCRMCGSALETLDHLISGCTVMAPVQYITRHNAVCKVIHQNLAYKHGLITGTCPVYRYEPQAVLDSSAYSMYWDRQVLTDRHTAHNKPDVLLVDKTGRSAYIIDVAIPHNSNIERKYVEKKVNYEPLAREIKEIWRLERVVVVPIILSATGIVPKSLTASLDVLGLSHSLVQTMQKYTILHTCSMLRGVLDGFSH

SEQ ID NO: 2092 - protein, 1193 aa, Hermetia illucens
MHHQKMRRRRNLRSGTDNRRESSDLVTGSGSRNGQHGVETASRGAVRRLGATTTRSTAPPAAAVSPQSVATTSAGSRRKRMKWTEEMNLFIIRSYYEITAGAGTTSYRPLLHQRFVERFPQFAHVTVQRVADQYRFITRSDTIPATIRERVRLEVIGETGDRESMGAEAAASTTSRRTAGNRFSTRRSTLLHRPAEVSAEVRDEFQRACIEFSDMDPLHRPGIPRLYASPATPGILSQVNDEIASRLCADMSLLQLQSLVYCGAVAAIRLHGQKIRFRVIGLSDKRDPPWKIRLERRRDSLRQDIARLIQISTGNASRRVRNKVQRVYRNYAIPCETPVVEILDTLKQKLSVICSRLRRYGESYSRRVQNATYARNQRSFFRSLNESQQSAQTIQFSVTEAKEYWGGLWGLPAQHAEHAEWITAEGTRHVNTPGMNFADVTEEEVRRAINSSKNWRGPGLDRVQNFWYKKFTSVHSRLARSINEVMSWPEEFPPFLTAGITYLIPKKDTVQDPADTRPITCLPTLYKFITSIISGRINAHLETNNILSEEQKGCRVGSRGCKEQLIIDSVVVGQATRGQRNLFSCYIDYAKAFDSVPHTWLIDILHLYRIDPKLIKFLATVMEGWHTTLSVRTSEGANTSEPIRIRRGIFQGDSLSPLWFCMALNPLSWLLNDARGHGFAIKYGLRAKCELTHLMYLDDIKLYAGTDNHLRSLLRIIDMFSRDIRMEFGLDKCRIQAIRKGHHEPHAGHSIGDLHIEAMTETDFYKYLGILQGTHARVGDLKEALLSEFLRRVKLVLKSHLSGKNKISALNVFAIPSLAYAFGILPWTKTDLENVQRRIRTTMSKFRMHHPKSAVERMNLPRDIGGRGVVDVAAQHHRQVDSLRAYFYSKEQASPLHAAVCKADCGLTPLNLKDRSFNPLSGVKSDQERIEEWKSKAMHGKHVNCLWQPFVDLHLSNRWLCAGELFAETEGFMCAIQDGVVATRAYKKLIMKERVENDQCRMCGSALETLDHLISGCTVMAPVQYITRHNAVCKVIHQNLAYKHGLITGTCPVYRYEPQAVLDSSAYSMYWDRQVLTDRHTAHNKPDVLLVDKTGRSAYIIDVAIPHNSNIERKYVEKKVNYEPLAREIKEIWRLERVVVVPIILSATGIVPKSLTASLDVLGLSHSLVQTMQKYTILHTCSMLRGVLDGFSH

SEQ ID NO: 2093 - protein, 1188 aa, Hermetia illucens
MRRRRNLRSGTDNRRESSDLVTGSGSRNGQHGVETASRGAVRRLGATTTRSTAPPAAAVSPQPVATTSAGSRRKRMKWTEEMNLFIIRSYYEITAGAGTTSYRPLLHQRFVERFPQFAHVTVQRVADQYRFITRSDTIPATIRERVRLEVIGETGDRESMGAEAAASTTPRRTAGNRFSTRRSTLLHRPAEVSAEVRDEFQRACIEFSDMDPLHRPGIPRLYASPATPGILSQINDEIASRLCADMSLLQLQSLVYCGAVAAIRLHGQKIRFRVIGLSDKRDPPWKIRLERRRDSLRQDIARLIQISTGNASRRVRNKVQRVYRNYAIPCETPVVEILDTLKQKLSVICSRLRRYGESYSRRVQNATYARNQRSFFRSLNESQQSAQTIQFSVTEAKEYWGGLWGLPAQHAEHAEWITAEGTRHANTPGMNFADVTEEEVRRAINSSKNWRGPGLDRVQNFWYKKFTSVHSRLARSINEVMSRPEEFPPFLTAGITYLIPKKDTVQDPADTRPITCLPTLYKFITSIISGRINAHLETNNILSEEQKGCRVGSRGCKEQLIIDSVVVGQATRGQRNLFSCYIDYAKAFDSVPHTWLIDILHLYRIDPKLIKFLATVMEGWHTTLSVRTSEGANTSEPIRIRRGIFQGDSLSPLWFCMALNPLPWLLNDARGHGFAIKYGLRAKCELTHLMYLDDIKLYAGTDNHLRSLLRLIDMFSRDIRMEFGLDKCRIQAIRKGHHEPHAGHSIGDLHIEAMTETDFYKYLGILQGTLARVGDLKEALLSEFLRRIKLVLKSHLSGKNKISALNVFAIPSLVYAFGILPWTKTDLENVQRRIRTTMSKFRMHHPKSAVERMNLPRDIGGRGVVDVAAQHHRQVDSLRAYFYSKEQASPLHAAVCKADCGLTPLNLKDRSFNPLSGVKSDQERIEEWKSKAMHGKHVNCLWQPFVDLHLSNRWLCAGELFAETEGFMCAIQDGVVATRAYKKLIMKERVENDQCRMCGSALETLDHLISGCTVMAPVQYITRHNAVCKVIHQNLAYKHGLITGTCPVYRYEPQAVLDSSAYSMYWDRQVLTDRHTAHNKPDVLLVDKTGRSAYIIDVAIPHNSNIERKYVEKKVNYEPLAREIKEIWRLERVVVVPIILSATGIVPKSLTASLDVLGLSHSLVQTMQKYTILHTCSMLRGVLDGFSH

SEQ ID NO: 2094 - protein, 1107 aa, Hermetia illucens
MNLFIIRSYYEIAAGAGITSYRPLLHQRFVERFPQSAHVTVQRVADQYRFINRSDTIPATIRKRVRLEVIGETGDRESMGAEAAASTTPRRTAGNRFSTRRSTLLHRPTEVSAEVRDEFQRACIEFSDMDPLHRPGIPRLYASPPTPGILSQINDEIASRLCADMSLLQLQSLVYCGAVVAIRLHGQKIRFRVIGLSDKRDPPWKIRLERRRDSLRQDIARLIQISTGNASRRVRNKVQRVYRNYAIPCETPIVEILDTLKQKLSVICSRLRRYGESYSRRVQNATYARNQRSFFRSLNESQQSAQTIQFSVTEAKEYWGGLWGLPAQHAEHAEWITAEGTRHANTPGMNFADVTEEEVRRAINISKNWRGPGLDRVQNFWYKKFTSVHSRLARSINEVMSRPEEFPPFLTAGITYLIPKKDTVQDPADTRPITCLPTLYKFITSIISGRINAHLETNNILCEEQKGCRVGSRGCKEQLIIDSVVVGQATRGQRNLFSCYIDYAKAFDSVPHTWLIDILHLYRIDPKLIKFLATVMEGWHTTLSVRTSEGANTSEPIRIRRGIFQGDSLSPLWFCMALNPLSWLLNDARGHGFAIKYGLRAKCELTHLMYLDDIKLYAGTDNHLRSLLRIIDMFNRDIRMEFGLDKCRIQAIRKGHHEPHAGHSIGDLHIATMTETDFYKYLGILQGTHARVGDLKEALLSEFLRRVKLVLKSHLSGKNKISALNVFAIPSLAYAFGILPWTKTDLENVQRRIRTTMSKFRMHHPKSAVELMNLPRDIGGRGVVDVAAQHHRQVDSLRAYFYSKEQASPLHAAVCKADCGLTPLNLKDRSFNPLSGVKSDQERIEEWKSKAMHGKHVNCLWQPFVDLHLSNRWLCAGELFAETEGFMCAIQDGVVDTRAYKKLIMKERVENDQCRMCGSALETLDHLISGCTVMAPVQYITRHNAVCKVIHQNLAYKHGLITGTCPVYRYEPQAVLDSSAYSMYWDRQVLIDRHTAHNKPDVLLVDKTGRSAYIIDVAIPHNSNIERKYVEKKVNYEPLAREIKEIWRLERVVVVPIILSATGIVPKSLTASLDVLGLSHSLVQTMQKYTILHTCSMLRGVLDGFSH

SEQ ID NO: 2095 - protein, 1193 aa, Hermetia illucens
MHHQKMRRRKNLRSGTDNRRESSDLVTGSGSRNGQHGVETASRGAVRRLGATTTRSTAPPAAAVSPQSVATTSAGSRRKRMKWTEEINLFIIRSYYEITAGAGTTSYRPLLHQRFVERFPQFAHVTVQRVADQYRFITRSDTIPATIRERVRLEVIGETGDRESMGAEAAASTTPRRTAGNRFSTRRSTLLHRPAEVSAEVRDEFQRACIEFSDMDPLHRPGIPRLYASPATPGILSQINDEIASRLCADMSLLQLQSLVYCGAVVAIRLHGQKIRFRVIGLSDKRDPPWKIRLERRRDSLRQDIARLIQISTGSASRRVRNKVQRVYRNYAIPCETPVVEILDTLKQKLSVICSRLRRYGESYSRRVQNATYARNQRSFFRSLNESQQSAQTIQFSVTEAKEYWGGLWGLPAQHAEHAEWITAEATRHANTPGMNFADVTEEEVRRAINSSKNWRGPGLDRVQNFWYKKFTSVHSRLARSINEVMSRPEEFPPFLTAGITYLIPKKDTVQDPADTRPITCLPTLYKFITSIISGRINAHLETNNILSEEQKGCRVGSRGCKEQLIIDSVVVGQATRGQRNLFSCYIDYAKAFDSVPHTWLIDILHLYRIDPKLIKFLATVMEGWHTTLSVRTSEGANTSEPIRIRRGIFQGDSLSPLWFCMALNPLSWLLNDARGHGFAIKYGLRAKCELTHLMYLDDIKLYAGTDNHLRSLLRIIDMFSRDIRMEFGLDKCRIQAIRKGHHEPHAGHSIGDLHIEAMTETDFYKYLGILQGTHARVGDLKEALLSEFLRRVKLVLKSHLSGKNKISALNVFAIPSLAYASGILPWTKTDLENVQRRIRTTMSKFRMHHPKSAVERMNLPRDIGGRGVVDVAAQHHRQVDSLRAYFYSKEQASPLHAAVCKADCGLTPLNLKDRSFNPLSGVKSDQERIEEWKSKAMHGKHVNCLWQPFVDLHLSNRWLCAGELFAETEGFMCAIQDGVVATRAYKKLIMKERVENDQCRMCGSALETLDHLISGCTLMAPVQYITRHNAVCKVIHQNLAYKHGLITGTCPVYRYEPQAVLDSSAYSMYWDRQVLTDRHTAHNKPDVLLVDKTGRSAYIIDVAIPHNSNIERKYVEKKVNYEPLAREIKEIWRLERVVVVPIILSATGIVPKSLTASLDVLGLSHSLVQTMQKYTILHTCSMLRGVLDGFSH

SEQ ID NO: 2096 - protein, 1188 aa, Hermetia illucens
MRRRRNLRSGTDNRRESSDLVTGSGSRNGQHGVETASRGAVRRLGATTTRSTAPPAAAVSPQPVATTSAGSRRKRMKWTEEMNLFIIRSYYEITAGAGTTSYRPLLHQRFVERFPQFAHVTVQRVADQYRFITRSDTIPATIRERVRLEVIGETGDRESMGAEAAASTTSRRTAGNRFSTRRSTLLHRPAEVSAEVRDEFQRACIEFSDMDPLHRPGIPRLYASPATPGILSQINDEIASRLCADMSLLQLQSLVYCGAVAAIRLHGQKIRFRVIGLSDKRDPPWKIRLERRRDSLRQDIARLIQISTGNASRRVRNKVQRVYRNYAIPCETPVVEILDTLKQKLSVICSRLRRYGESYSRRVQNATYARNQRSFFRSLNESQQSAQTIQFSVTEAKEYWGGLWGLPAQHAEHAEWITAEGTRHVNTPGMNFADVTEEEVRRAINSSKNWRGPGLDRVQNFWYKKFTSVHSRLARSINEVMSRPEEFPPFLTAGITYLIPKKDTVQDPADTRPITCLPTLYKFITSIISGRINAHLETNNILSEEQKGCRVGSRGCKEQLIIDSVVVGQATRGQRNLFSCYIDYAKAFDSVPHTWLIDILHLYRIDPKLIKFLATVMEGWHTTLSVRTSEGANTSEPIRIRRGIFQGDSLSPLWFCMALNPLSWLLNDARGHGFAIKYGLRAKCELTHLMYLDDIKLYAGTDNHLRSLLRIIDMFSRDIRMEFGLDKCRIQAIRKGHHEPHAGHSIGDLHIEAMTETDFYKYLGILQGTHARVGDLKEALLSEFLRRVKLVLKSHLSGKNKISALNVFAIPSLAYAFGILPWTKTDLENVQRRIRTTMSKFRMHHPKSAVERMNLPRDIGGRGVVDVAAQHHRQVDSLRAYFYSKEQASPLHAAVCKADCGLTPLNLKDRSFNPLSGVKSDQERIEEWKSKAMHGKHVNCLWQPFVDLHLSNRWLCAGELFAETEGFMCAIQDGVVATRAYKKLIMKERVENDQCRMCGSALETLDHLISGCTVMAPVQYITRHNAVCKVIHQNLAYKHGLITGTCPVYRYEPQAVLDSSAYSMYWDRQVLTDRHTAHNKPDVLLVDKTGRSAYIIDVAIPHNSNIERKYVEKKVNYEPLAREIKEIWRLERVVVVPIILSATGIVPKSLTASLDVLGLSHSLVQTMQKYTILHTCSMLRGVLDGFSH

SEQ ID NO: 2097 - protein, 1026 aa, Hermetia illucens
MGAEAAASTTPRRTAGNRFSTRRSTLLHRPAEVSAEVRDEFQRACIEFSDMDPLHRPGIPRLYASPATPGILSQINDEIASRLCADMSLLQLQSLVYCGAVAAIRLHGQKIRFRVIGLSDKRDPPWKIRLQRRRDSLRQDIARLIQISTGSASRRVRNKVQRVYRNYAILCETPVVEILDTLKQKLSVICSRLRRYGESYSRRVQNATYARNQRSFFRSLNESQQSTQTIQFSVTEAKEYWGGLWGLPAQHAEWITAEGTRHANTPGMSFADVTEEEVRRAINSSKNWRGPGLDRVQNFWYKKFTSVHSRLARSIDEVMSRPEEFPPFLTAGITYLIPKKDTVQHPADTRPITCLPTLYKFITSIISGRINAHLETNNILSEEQKGCRVGSRGCKEQLIIDSVAVGQATRGQRNLFSCYIDYAKAFDSVPHTWLIDILHLYRIDPKLIKFLATVMEGWHTTLSVRTSQGANTSEPIRIRRGIFQGDSLSPLWFCMALNPLSWLLNDARGHGFAIKYDLRAKCELTRLMYLDDIKLYAGTDDHLRSLLRIIDMFSRDIRIEFGLNKCRIQAIFKGHHEPHAGHSIGDLHIEAMTETDFYKYLGILQGTHARVGDLKEALLSEFLRRVKLVLKSHLSGKNKISALNVFAIPSLAYAFGILPWTKTDLENVQRRIRTTMSKFRMHHPKSAVERMNLPRDIGGRGVVDVAAQHHRQVDSLRAYFYSKEQASPLHVAVCKADCGLTPLKLKDRSFNPLSGVTSDQERIDEWKSKAMHGKHVNCLWQPFVDLHLSNRWLCAGELFAETEGFMCAIQDGVVATRAYKKLIMKERVENDQCRMCGSALETLDHLISGCTVMAPVQYITRHNAICKVIHQNLAYKHGLITGTCPVYRYEPQAVLDSSAYSMYWDRQALTDRHTAHNKPDVLLVDKTGRSAYFIDVAIPHNSNIERKYVEKKVNYEPLAREIKEIWRLERVVVVPIILSATGIVPKSLTASLDVLALSHSLVQTMQKYTILHTCSMLRGVLDGFSH

SEQ ID NO: 2098 - protein, 1188 aa, Hermetia illucens
MRRRRNLRSGTDNRRESSDLVTGSGSRNGQHGVETASRGAVRRLGATTTRSTAPPAAAVSPQPVATTSAGSRRKRMKWTEEMNLFIIRSYYEITAGAGTTSYRPLLHQRFVERFPQFAHVTVQRVADQYRFITRSDTIPATIRERVRLEVIGETGDRESMGAEAAASTTPRRTAGNRFSTRRSTLLHRPAEVSAEVRDEFQRACIEFSDIDPLHRPGIPRLYASPATPGILSQISDEIASRLCADMSLLQLQSLVYCGAVAAIRLHGQKIRFRVIGLSDKRDPPWKIRLERRRDSLRQDIARLIQISTGNASRRVRNKVQRVYRNYAIPCETPVVEILDTLKQKLSVICSRLRRYGESYSRRVQNATYARNQRSFFRSLNESQQSAQTIQFSVTEAKEYWGGLWGLPAQHAEHTEWITAEGTRHVNTPGMNFADVTEEEVRGAINSSKNWRGPGLDRVQNFWYKKFTSVHSRLARSINEVMSRPEEFPPFLTAGITYLIPKKDTVQDPADTRPITCLPTLYKFITSIISGRINAHLETNNILSEEQKGCRVGSRGCKEQLIIDSVVVGQATRGQRNLFSCYIDYAKAFDSVPHTWLIDILHLYRIDPKLIKFLATVMEGWHTTLSVRTSEGANTSEPIRIRRGIFQGDSLSPLWFCMALNPLSWLLNDARGHGFAIKYGLRAKCELTHLMYLDDIKLYAGTDNHLRSLLRIIDMFSRDIRMEFELDKCRIQAIRKGHHEPHAGHSIGDLHIEAMTETDFYKYLGILQGTHARVGDLKDALLSEFLRRVKLVLKSHLSGKNKISALNVFAIPSLAYAFGILPWTKTDLENVQRRIRTTMSKFRMHHPKSAVERMNLPRDIGGRGVVDVAAQHHRQVDSLRAYFYSKEQASPLHAAVCKADCGLTPLNLKDRSFNPLSGVKSDQERIEEWKSKAMHGKHVNCLWQPFVDLHLSNRWLCAGELFAETEGFMCAIQDGVVATRAYKKLIMKERVENDQCRMCGSALETLDHLISGCTVMAPVQYITRHNAVCKVIHQNLAYKHGLITGTCPVYRYEPQAVLDSSAYSMYWDRQVLTDRHTAHNKPDVLLVDKTGRSAYIIDVAIPHNSNIERKYVEKKVNYEPLAREIKEIWRLERVVVVPIILSATGIVPKSLTASLDVLGLSHSLVQTMQKYTILHTCSMLRGVLDGFSH

SEQ ID NO: 2099 - protein, 1190 aa, Hermetia illucens
MHHQKMRRRRYLRSGTDNRRESSDLVTGSGSRNGQHGVETASRGAVRRLGATTTRSTAPPAAAVSPQSVATTSAGSRRKRMKWTEEMNLFIIRSYYEITAGAGTTSYRPLLHQRFVERFPQFAHVTVQRVADQYRFITRSDTIPATIRERVRLEVIGETGDRESMGAEAAASTTSRRTAGNRFSTRRSTLLHRRAEVSAEARDEFQRACIEFSDMDPLHRPGIPRLYASPATPGILSQINDEIASRLCADMSLLQLQSLVYCGAVAAIRLHGQKIGFRVIGLSDKRDPPWKIRLERRRDSLRQDIARLIQISTGNTSRRVRNKVQRVYRNYAIPCETPVVEILDTLKQKLSVICSRLRRYGESYSRRVQNATYARNQRSFFRCLNESQQSAQTIQFSVTEAKEYWGGLWGLPAQHAEWITAEGTRHVNTPGMNFADVTEEEVRRAINISKNWRGPGLDRVQNFWYKKFTSVHSRLARSINEVMSRPEEFPPFLTAGITYLIPKKDTVQDPADTRPITCLPTLYKFITSIISGTINAHLETNNILSEEQKGCRDGSRGCKEQLIIDSVVVGQATRGRRNFFSCYIDYAKAFDSVPHTWLIDILHLYRIDPKLINFLATVMEGWHTTLSVRTSEGANTSEPIRIRRGIFQGDSLSPLWFCMALNPLSWLLNDARRHGFAIKYGLRAKCELTHLMYLDGIKLYAGTDNHLRSLLRIIDMFSRDIRMEFGLDKCRIQAIRKGHHEPHAGHSIGDLHIEAMTETDFCKYLGILQGTHARVGVLKEALLSEFLRRVKLVLKSHLSGKNKISALNVFAIPSLAYAFGILPWTKNDLENVQRRIRTTMSKFRMHHPKSAVERMNLPRDIGGRGVVDVAAQHHRQVDSLRAYFYSKEQASLLHAAVCKADCGLTPLNLKDRSFNPLSGVRSNQERIEEWKSKAMHGKHVNCLWQPFVDLHLSNRWLCAGELFAETEGFMCAIQDGVVATRAYKKLIMKERVENDQCRMCGSALETLDHLISGCTVMAPVQYITRHNAVCKVIHQNLAYKHGLITGTCPVYRYEPQAVLDSSAYSMYWDRQVLTDRHTAHNKPDVLLVDKTGRSAYIIDVAIPHNSNIERKYVEKKVNYEPLAREIKEIWRLERVVVVPIILSATGIVPKSLTASLDVLGLSHSLVQTMQKYTILHTCSMLRGVLDGFSH

SEQ ID NO: 2100 - protein, 974 aa, Hermetia illucens
MKWTEEMNLSIIRSYYEITAGAGTTSYRPLLHQRFVERFPQFAHVTVQRVADQYRFITRSDTIPATIRERVRLEVIGETGDRESMGAEAAASTTPRRTAGNRFSTRRSTLLHRPAEVSAEVRDEFQRACIKFSDMDPLHRPGIPRLYASPATPGILSQINDEIASRLCADMSLLQLQSLVYCGAVTAIRLHGQKIRFRVIGLSDKRDPPWKIRLECRRDSLRQDIARLIQISTGSASRRVRNKVQRVYRNYAIPCETPVAEILDTLKQKLSVICSRLRWYGESYSRRVQNATYARNQRSFFRSLNESQQSAQTIQFSVTEAKEYWGGLWGLPAQHAEHVEWITAEGTRHANTPGINFADVTEEEVRRAINSSKNWRGPGLDRVQNFWYKKFTRVHSRLARSINEVMSRPEEFPPFLTAGITYLIPQKDTVQDPADTRPITCLATLYKFITSIISGRINAHLETNNILSEEQKGCRVGSRGCKEQLIIDSVVVGQATRSQRNLFSCYIDYAKAFDSVPHTWLIDILHLYHIDPKLIKFLATVMEGWHTTLSVRSSECTNTSEPIRIRRGIFQGDSLNPLWFCMALNPFSWLLSNARGHGFAIKYGLRAKCELTHLMYLDDIKLYAGTDNHLRSLLRIIDMFSSDIRMEFGLDKCRIQAIRKGHHKPHAGHSIGDLHIEAMTETDFYKHLGILQGTHARVGDLKEAVLSEFLRRVKLVLKSYLSGKNKISALNVFAIPSLAYAFGILPWTKTDLENVQRRIRKTMSKFRMHHPKSAVERMNLPRDIGGRGVVDVAAQHHRQVDSLRAYFYSKEQASPLHAAVCKADCGLTPLNLKDRSFNPLIGVKSDQERIEEWKSKAVHGKHVNCLCQPFVDLHLSSRWLCAGELFAETEGFMCAIQDGVVATRAYKKLIMKERVENDQCRMCGSALETLDHLISGCTVMAPVQNITRHNAVCKVIHQNLAYKHGLITGTCPVY

SEQ ID NO: 2101 - protein, 1029 aa, Hermetia illucens
MGAEAAASTTPRRTAGNRFSTRRSTLLHRPAEVSAEVRDEFQRACIEFSDMDPLHRPGIPRLYASPATPGILSQINDEIASRLCADMSLLQLQSLVYCGAVAAIRLHGQKIRFRVIGLSDKRDPPWKIRLERRRDSLRQDIARLIQISTGNASRRVRNKVQRVYRNYAIPCETPVVEILDTLKQKLSVICSRLRRYGESYSRRVQNATYARNQRSFFRSLNESQQSAQTIQFSVTEAKEYWGGLWGLPAQHAEHAEWITAEGTRHANTPGMNFADVTEEEVRRAINISKNWRGPGLDRVQNFWYKKFTSVHSRLARSINEVMSRPDEFPPFLTAGITYLIPKKDTVQDPADTRPITCLPTLYKFITSIIGGRINAHLETNNILSEEQKGCRVGSRGCKEQLIIDSVVVGQATRGQRNLFSCYIDYAKAFDSVPHTWLIDILHLYRIDPKLIKFLATVMEGWHTTLSVRTSEGANTSEPIRIRRGIFQGDSLSPLWFCMALNPLSWLLNDARGHGFAIKYGLRAKCELTHLMYLDDIKLYAGTDNHLRSLLRIIDMFSGDIRMEFGLDKCRIQAIRKGHHEPHSGHSIGDLHIEAMTETDFYKYLGILQGTHARVGDLKEALLSEFLRRVKLVLKSHLSGKNKISALNVFAIPSLAYAFGILPWTKTDLENVQRRIRTTMSKFRMHHPKSAVERMNLPRDIGGRGVVDVAAQHHRQVDSLRAYFYSKEQASPLHAAVCKADCGLTPLNLKDRSFNPLSGVKSDQERIEEWKSKAMHGKHVNCLWQPFVDLHLSNRWLCAGELFAETEGFMCAIQDGVVATRAYKKLIMKERVENDQCRMCGSALETLDHLISGCTVMAPVQYITRHNAVCKVIHQNLAYKHGLITGTCPVYRYEPQAVLDSSAYSMYWDRQVLTDRHTAHNKPDVLLVDKTGRSAYIIDVAIPHNSNIERKYVEKKVNYEPLAREIKEIWRLERVVVVPIILSATGIVPKSLTASLDVLGLSHSLVQTMQKYTILHTCSMLRGVLDGFSH

SEQ ID NO: 2102 - protein, 1188 aa, Hermetia illucens
MRRRRNLRSGTDNRRESSDLVTGSGSRNGQHGVETASRGAVRRLGATTTRSTASRAAAVSPQPVATTSAGSRRKRMKWTEEMNLFIIRSYYEITAGAGTTSYRPLLHQRFVERFPQFAHVTVQRVADQYRFITRSDTIPATIRERVRLEVIGETGDRESMGAEAAASTTPRRTAGNRFSTRRSTLLHRPAEVSAEVRDEFQRACIEFSDMDPLHRPGIPRLYASPATPGILSQINDEIASRLCADMSLLQLQSLVYCGAVAAIRLHGQKIRFRVIGLSDKRDPPWKIRLERRRDSLRQDIARLIQISTGNASRRVRNKVQRVYRNYAIPCETPVVEILDTLKQKLSVICSRLRRYGESYSRRVQNATYARNQRSFFRSLNESQQSAQTIQFSVTEAKEYWGGLWGLPAQHAEHAEWITAEGTRHANTPGMNFADVTEEEVRRAINISKNWRGPGLDRVQNFWYKKFTSVHSRLARSINEVMSRPEEFPPFLTAGITYLIPKKDTVQDPADTRPITCLPTLYKFITSIISGRINAHLETNNILSEEQKGCRVGSRGCKEQLIIDSVVVGQATRGQRNLFSCYIDYAKAFDSVPHTWLIDILHLYRIDPKLIKFLATVMEGWHTTLSVRTSEGANTSEPIRIRRGIFQGDSLSPLWFCMALNPLSWLLNDARGHGFAIKYGLRAKCELTHLMYLDDIKLYAGTDNHLRSLLRIIDMFSRDIRMEFGLDKCRIQAIRKGHHEPHAGHSIGDLHIEAMTETDFYKYLGILQGTLARVGDLKEALLSEFLRRIKLVLKSHLSGKNKISALNVFAIPSLAYAFGILPWTKTDLENVQRRIRTTMSKFRMHHPKSAVERMNLPRDIGGRGVVDVAAQHHRQVDSLRAYFYSKEQASPLHAAVCKADCGLTPLNLKDRSFNPLSEVKSDQERIEEWKSKAMHGKHVNCLWQPFVDLHLSNRWLCAGELFAETEGFMCAIQDGVVATRAYKKLIMKERVENDQCRMCGSALETLDHLISGCTVMAPVQYITRHNAVCKVIHQNLAYKHGLITGTCPVYRYEPQAVLDSSAYSMYWDRQVLTDRHTAHNKPDVLLVDKTGRSAYIIDVAIPHNSNIERKYVEKKVNYEPLAREIKEIWRLERVVVVPIILSATGIVPKSLTASLDVLGLSHSLVQTMQKYTILHTCSMLRGVLDGFSH

SEQ ID NO: 2103 - protein, 1150 aa, Hermetia illucens
MRRRRNLRSGTDNRRESSDLVTGSGSRNGQHGVETASRGAVRRLGATTTRSTAPPAAAVSPQSVATTSAGSRRKRMKWTEEMNLFIIRSYYEITAGAGITSYRPLLHQRFVERFPQFAHVTVQRVADQYRFITRSDTIPATIRERVRLEVIGETGDRESMGAEAAASTTPRRTAGNRFSTRRSTLLHRPAEVSAEVRDEFQRACIEFSDMDPLHRPGIPRLYASPATPGILSQINDEIASRLCADMTLLQLQSLVYCGAVAAIRLHGQKIRFRVIGLSDKRDPPWKIRLERRRDSLRQDIARLIQISTGNASRRVRNKVQRVYRNYAIPCETPVVEILDTLKQKLSVICSRLRRYGESYSRRVQNATYARNQRSFFRSLNESQQSAQTIQFSVTEAKEYWGGLWGLPAQHAEHAEWITAEGTRHANTPGMNFADVTEEEVRRAINSSKNWRGPGLDRVQNFWYKKFTSVHSRLARSINEVMSRPEEFPPFLTAGITYLIPKKDTVQDPADTRPITCLPTLYKFITSIISGRINAHLETNNILSEEQKGCRVGSRGCKEQLIIDSVVVGQATRGQRNLFSCYIDYAKAFDSVPHTWLIDILHLYRIDPKLIKFLATVMEGWHTTLSVRTSEGANTSEPIRIRRGIFQGDSLSPLWFCMALNPLSWLLNDARGHGFAIKYGLRAKCELTHLMYLDDIKLYAGTDNHLRSLLRIIDMFSRDIRMEFGLDKCRIQAIRKGHHEPHAGHSIGDLHIEAMTETDFYKYLGILQGTHARVGDLKEALLSEFLRRVKLVLKSHLSRKNKISALNVFAIPSLAYAFGILPWTKTDLENVQRRIRTTMSKFRMHHPKSAVERMNLPRDIGGRGVVDVAAQHHRQVDSLRAYFYSKEHASPLHAAVCKADCGLTPLNLKDRSFNPLSGVKSDQERIEEWKSKAMHGKHVNCLWQPFVDLHLSNRWLCAGELFAETEGFMCAIQDGVVATRAYKKLIMKERVENDQCRMCGSALETLDHLISGCTVMAPVQYITRHNAVCKVIHQNLAYKHGLITGTCPVYRYEPQAVLDSSAYSMYWDRQVLTDRHTAHNKPDVLLVDKTGRSAYIIDVAIPHNSNIERKYVEKKVNYEPFCIRARCCGEYSTDSPTDLPPATTTSAPFSF

SEQ ID NO: 2104 - protein, 1188 aa, Hermetia illucens
MRRRRNLRSGTDNRRESSDLVTGSGSRNGQHGVEIASRGAVRRLGATTTRSTAPPAAAVSPQSVATTSAGSRRKRMKWTEEMNLFIIRSYYEITAGAGTTSYRPLLHQRFVERFPQFAHVTVQRVADQYRFITRSDTIPATIRERVRLEVIGETGDRESMGAEAAASTTPRRTAGNRFSTRRSTLLHRPAEVSAEVRDEFQRACIEFSDMDPLHRPGIPRLYASPATPGIPSQINDEIASRLCADMSLLQLQSLVYCGAVAAIRLHGQKIRFRVIGLSDKRDPPWKIRLERRRDSLRQDIARLIQISTGNASRRVRNKVQRVYRNYAIPCETPVVEILDTLKQKLSVICSRLRRYGESYSRRVQNATYARNQRSFFRSLNESQQSAQTIQFSVTEAKEYWGGLWGLPAQHAEHAEWITAEGTRHANTPGMNFADVTEEEVRRAINISKNWRGPGLDRVQNFWYKKFTSVHSRLARSINEVMSRPEEFPPFLTAGITYLIPKKDTVQDPADTRPITCLPTLYKFITSIISGRINAHLETNNILSEEQKGCRVGSRGCKEQLIIDSVVVGQATRGQRNLFSCYIDYAKAFDSVPHTWLIDILHLYRIDPKLIKFLATVMEGWHTTLSVRTSEGANTSEPIRIRRGIFQGDSLSPLWFCMALNPLSWLLNDARGHGFAIKYGLRAKCELTHLMYLDDIKLYAGTDNHLRSLLRIIDMFSRDIRMEFGLDKCRIQAIRKGHHEPHAGHSIGDLHIEAMTETDFYKYLGILQGTHARVGDLKEALLSEFLRRVKLVLKSHLSGKNKISALNVFAIPSLAYAFGILPWTKTDLENVQRRIRTTMSKFRMHHPKSAVERMNLPRDIGGRGVVDVAAQHHRQVDSLRAYFYSKEQASPLHAAVCKADCGLTPLNLKDRSFNPLSGVKSDQERIEEWKSKAMHGKHVNCLWQPFVDLHLSNRWLCAGELFAETEGFMCAIQDGVVATRAYKKLIMKERVENDQCRMCGSALETLDHLISGCTVMAPVQYITRHNAVCKVIHQNLAYKHGLITGTCPVYRYEPQAVLDSSAYSMYWDQQVLTDRHTAHNKPDVLLVDKTGRSAYIIDVAIPHNSNIERKYVEKKVNYEPLAREIKEIWRLERVVVVPIILSATGIVPKSLTASLDVLGLSHSLVQTMQKYTILHTCSMLRGVLDGFSH

SEQ ID NO: 2105 - protein, 1188 aa, Hermetia illucens
MRRRRNLRSGTDNRRESSDLVTGSGSRNGQHGVDTASRGAVRRLGATTTRSTAPPAAAVSPQPVATTSAGSRRKRMKWIEEMNLFIIRSYYEITAGAGTTSYRPLLHQRFVERFPQFAHVTVQRVADQHRFITRSDTIPATIRERVRLEVIGETGDRESMGAEAAASTTPRRTAGNRFSTRRSTLLHRPAEVSAEVRDEFQRACMEFSNMDPLHRPGIPRLYASPATPGILSQINDEIASRLCADMSLLQLQSLVYCGAVAAIRLHGQKIRFRVIGLSDKRDPPWKIRLERRRDSLRQDIARLIQISTGNASRRVRNKVQRVYRNYAIPCETPVVEILDTLKQKLSVICSRLRRYGESYSRRVQNATYARNQRSFFRSLNESQQSAQTIQFSVTEAKEYWGGLWGLPAQHAEHAEWITAEGTRHVNTPGMNFADVTEEEVRRAINSSKNWRGPGLDRVQNFWYKKFTSVHSRLACSINEVMSRPEEFPPFLTAGITYLIPKKDTVQDPADTRPITCLPTLYKFITSIISGRINAHLETNNILSEEQKGCRVGSRGCKEQLIIDSVVVGQATRGQRNLFSCYIDYAKAFDSVPHTWLIDILHLYRIDPKLIKFLATVMEGWHTTLSVRTSEGANTSEPIRIRRGIFQGDSLSPLWLCMALNPLSWLLNDARGHGFAIKYGLRAKCELTHLMYLDDIKLYAGTDNHLRSLLRIIDMFSRDIRMEFGLDKCRIQAIRKGHHEPHAGHSIGDLHIEAMTETDFYKYLGILQGTHARVGDLKEALLSEFLRRVKLVLKSHLSGKNKISALNVFAIPSLAYAFGILPWTKTDLENVQRRIWTTMSKFRMHHPKSAVERMNLPRDIGGRGVVDVAAQHHRQVDSLRAYFYSKEQASPLHAAVCKADCGLTPLNLKDRSFNPLSGVKSDQERIKEWKSKAMHGKHVNCLWQPFVDLHLSNRWLCAGELFAETEGFMCAIQDGVVATRAYKKLIMKERVENDQCRMCGSALETLDHLISGCTVMAPVQYITRHNAVCKVIHQNLAYKHGLITGTCPVYRYEPQAVLDSSAYSMYWDRQVLTDRHTAHNKPDVLLVDKTGRSAYIIDVAIPHNSNIERKYVEKKVNYEPLAREIKEIWRLERVVVVPIILSATGIVPKSLTASLDVLGLSHSLVQTMQKYTILHTCSMLRGVLDGFSH

SEQ ID NO: 2106 - protein, 1193 aa, Hermetia illucens
MHHQKMRRRRNLRSGTDNRRESSDLVTGSGSRNGQHGVETASRGAVRRLGATTTRSTAPPAAAVSPQSVATTSAGSRRKRMKWTEEMNLFIIRSYYEITAGAGTTSYRPLLHQRFVERFPQFAHVTVQRVADQYRFITRSDTIPATIRERVRLEVIGETGDRESMGAEAAASTTPRRTAGNRFSTRRSTLLHRPAEVSAEVRDEFQRACIEFSDMDPLHRPGIPRLYASPATPGILSQINDEIASRLCADMSLLQLQSLVYCGAVAAIRLHGQKIRFRVIGLSDKRDPPWKIRLERRRDSLRQDIARLIQISTGNASRRVRNKVQRVYRNYAIPCETPVVEILDTLKQKLSVICSRLRRYGESYSRRVQNATYARNQRSFFRSLNESQQSAQTIQFSVTEAKEYWGGLWGLPAQHAEHAEWITAEGTRHANTPGMNFADVTEEEVRRAINISKNWRGPGLDRVQNFWYKKFTSVHSRLARSINEVMSRPEEFPPFLTAGITYLIPKKDTVQDPADTRPITCLPTLYKFITSIISGRINAHLETNNILSEEQKGCRVGSRGCKEQLIIDSVVVGQATRGQRNLFSCYIDYAKAFDSVPHTWLIDILHLYRIDPKLIKFLATVMEGWHTTLSVRTSEGANTSEPIRIRRGIFQGDSLSPLWFCMALNPLSWLLNDARGHGFAIKYGLRAKCELTHLMYLDDIKLYAGTDNHLRSLLRIIDMFSRDIRMEFGLDKCRIQAIRKGHHEPHAGHSIGDLHIEAMTETDFYKYLGILQGTHARVGDLKEALLSEFLRRVKLVLKSHLSGKNKISALNVFAIPSLAYAFGILPWTKTDLENVQRRIRTTMSKFRMHHPKSAVERMNLPRDIGGRGVVDVAAQHHRQVDSLRAYFYSKEQASPLHAAVCKADCGLTPLNLKDRSFNPLSGVKSDQERIDEWKSKAMHGKHVNCLWQPFVDLHLSNRWLCAGELFAETEGFMCAIQDGVVATRAYKKPIMKERVENDQCRMCGSALETLDHLISGCTVMAPVQYITRHNAVCKVIHQNLAYKHGLITGTCPVYRYEPQAVLDSSAYSMYWDRQVLTDRHTAHNKPDVLLGDKTGRSAYIIDVAIPHNSNIERKYVEKKVNYEPLAREIKEIWRLERVVVVPIILSATGIVPKSLTASLDVLGLSHSLVQTMQKYTILHTCSMLRGVLDGFSH

SEQ ID NO: 2107 - protein, 1193 aa, Hermetia illucens
MHHQKMRRRRNLRAGTDNRRESSDLVTGSGSRNGQHGVETASRGAVRRLGATTTRSTAPPAAAVSPQPVATTSAGSRRKRMKWTEEMNLFIIRSYYEITAGAGTTSYRPLLHQRFVERFPQFAHVTVQRVADQYRFITRSDTIPATIRERVRLEVIGETGDRESMGAEAAASTTPRRTAGNRFSTRRSTLLHRPAEVSAEARDEFQRACIEFSDMDPLHRPGIPRLYASPATPGILSQINDEIASRLCADMSLLQLQSLVYCGAVAAIRLHGQKIRFRVIGLSDKRDPPWKIRLEHRRDSLRQDIARLIQISTGNASRRVRNKVQRVYRNYAIPCETPVVEILDTLKQKLSVICSRLRRYGESYSRRVQNATYARNQRSFFRSLNESQQSAQTIQFSVTEAKEYWGGLWGLPAQHAEHAEWITAEGTCHANTPGMNFADVTEEEVRRAINISKNWRGPGLDRVQNFWYKKFTSVHSRLARSINEVMSRPEEFPPFLTAGITYLIPKKDTVQDPADTRPITCLPTLYKFITSIISGRINAHLETNNILSEEQKGCRVGSRGCKEQLIIDSVVVGQATRGQRNLFSCYIDYAKAFDSVPHTWLIGILHLYRIDPKLIKFLATVMEGWHTTLSVRTSEGANTSEPIRIRRGIFQGDSLSPLWFCMALNPLSWLLNDARGHGFAIKYGLRAKCELTHLMYLGDIKLYAGTDNHLRSLLRVIDMFSRDIRMEFELDKCRIQAIRKGHHEPHAGHSIGDLHIEAMTETDFYKYLGILQGTHARVGDLKEALLSEFLRRVKLVLKSHLSGKNKISALNVFAIPSLAYAFGILPWTKTDLENVQRRIRTTMSKFRMHHPKSAVERMNLPRDIGGRGVVDVAAQHHRQVDSLRAYFYSKEQASPLHAAVCKADCGLTPLNLKDRSFNPLSGVKSDQERIEEWKSKAMHGKHVNCLWQPFVDLHLSNRWLCAGELFAETEGFMCAIQDGVVATRAYKKLIMKERVENDQCRMCGSALETLDHLISGCTVMAPVQYITRHNAVCKVIHQNLAYKHGLITGTCPVYRYEPQAVLDSSAYSTYWDRQVLTDRHTAHNKPDVLLVDKTGRSAYIIDVAIPHNSNIERKYVEKKVNYEPLAREIKEIWRLERVVVVPIILSATGIVPKSLTASLDVLGVSHSLVQTMQKYTILHTCSMLRGVLDGFSH

SEQ ID NO: 2108 - protein, 1185 aa, Hermetia illucens
MTRRRNLRSGTDNRRESSDLVTGSGSRNGQHGVETASRGAVRRLGATTTRSTAPPAAAVSPQSVATTSAGSRRKRMKWTEEMNLFIVRSYYEITAGADTTSYRPLLHQRFVERFPQFAHVTVQRVADQYRFITRSDTIPATIRERVRLEVIGETGDRESMGVEAAASTTPRRTAGNKFSTRRSTLLHHPAEVSAEVRDEFQRACIEFSDMDPLHRPGIPRLYASAATPGILSQINDEIASRLCADMSLLLLQSLVYCGAVAAIRLHGQKIRFRVIGLSDKRDPPWKIRLKRRRDSLRQDIARLIQISTGSASRRVRNKVQRVYRNYAIPCETPVVEILDILKQKLSVICSRLRRYGESYSRRVQNATYARNQRSFFRSLNESQQSVQTVQFSVTEAKEYWGGLWGLPAEHAEWITAEGTRHANTPGMNFADVTEEEVRRAINISKNWKGPGLDRVQNFWYKKFTSVHSWLARNINEIMSRSEEFPPFLTAGTTYLIPKKDTVQDPADTRPITCLPTPYKFITSIISGRINAHLETNHILSEEQKGCQVGSRGCKEQLIIDSVVVGQATRGQRNLFSCYIDYTKAFDSVPHTWLIDILYLYRIDPKLIKFLATVMEGRHTTLSVRTSEGASTSEPIRMRRGIFQGDSLSPFWFCMALNPLSWLLNDARGHGFAIKYGLRARCELTHLMYLNDIKLYAGTDDHLRSLLRIIDMFNGDIRMEFGLDKCRIQAIRKGHHEPHAGHSIGDLHIETMTETDFYKYLGILQGTHARVGDLKEALLSEFLRRVKLVLKSHLSGKNKISALNVFAIPSLAYAFGILPWTKTDLENVQRRIRTTMSKFRMHHPKSAVERMNLPRDIGGRGVVDVAAQHHRQVDSLRAYFYSKEQASPLHAAVCKADCGLTPLNLKDRSFNPLSGVKSDQERIDEWESKAMHGKHVNCLWQQFVDLHLSNRWLCAGELFAETEGFMCAIQDGVVATRAYKKLIMKERVKNDQCRMCGSALETLDHLISGCTVMTPVQYTTRHNAVCKVIHQNLAYKHGLITGTCPVYRYEPQVVLDSSAYNMYWDRQVLTDRHTAHNNPAVLLVDKTGRSAYIIDAVIPHNSNIERKYVEKKVNYEPLAREIKEIWRLGRVVVVSIILSATGLVPKSLTASLDVLGLSHSLVQTMQKYTILHTCSMLRGVLDGFSH

SEQ ID NO: 2109 - protein, 979 aa, Hermetia illucens
MDPLHRPGIPRLYASPATPGILSQINDEIASRLCADMSLLQLQSLVYCGAVAAIRLHGQKIRFRVIGLSDKRDPPWKIRLERRRDSLRQDIARLIQISTGNASRRVRNKVQRVYRNYAIPCETPVVEILDTLKQKLSVICSRLRRYGESYSRRVQNATYARNQQSFFRSLNESQQSAQTIQFSVTEAKGYWGGLWGLPAQHAEHAEWITAEGTRHVNTPGMNFADVTEEEVRRAINSSKNWRGPGLDWVQNFWYKKFTSVHSRLARSINEVMSRPEEFPPFLTAGITYLIPKKDTVQDPADTRPITCLPTLYKFITSIISGRINAHLETNNILSEEQKGCRVGSRGCKEQLIIDSVVVGQATRGQRNLFSCYIDYAKAFDSVPHTWLIDILHLYRIDPKLIKFLATVMEGWHTTLSVRTSEGANTSEPIRIRRGIFQGDSLSPVWFCMALNPLSWLLNDARGHGFAIKYGLRAKCELTHLIYLDDIKLYAGTDNHLRSLLRIIDMFSRDIRMEFGLDKCRIQAIHKGHHEPHAGHSIGDLHIEAMTETDFYKYLGILQGTHARVGDLKEALLSEFLRRVKLVLKSHLSGKNKISALNVFAIPSLAYAFGILPWTKTDLENVQRRIWTTMSKFRMHHPNSAVERMNLPRDIGGRGVVDVAAQHHRQVDSLRAYFYSKEQASPLHATVCKADCGLTPLNLKDRSFNPLSGVKSDQERIEEWKSKAMHGKHVNCLWQPFVDLHLSNRWLCAGELFAETEGFMCAIQDGVVATRAYKKLIMKERVENDQCRMCGSALETLDHLISGCTVMAPVQYITRHNAVCKVIHQNLAYKHGLIAGTCPVYRYEPQAVLDSSAYSMYWDRQFLTDRHTAHNKPDVLLVDKTGRSAYIIDVAIPHNSNIERKYVEKKVNYEPLAREIKEIWRLERVVVVPIILSATGIVPKSLTASLDVLGLSHSLVQTMQKYTILHTCSMLRGVLDGFSH

SEQ ID NO: 2110 - protein, 1188 aa, Hermetia illucens
MRRRRNLRSGTDNRRESSDLVTGSGSRNGQHGVETASRGAVRRLGATTTRSTAPPAAAVSPQPEATTSAGSRRKRMKWTEEMNLFIIRSYYEITAGAGTTSYRPLLHQRFVERFPQFAHVTVQRVADQYRFITRSDTIPATIRERVRLEVTGETGDRESMVAEAAASTTPRRTAGNRFSTRRSTLLHRPAEVSAEVRDEFQRACIEFSDMDSLHRPGIPRLYASPATPGILSQINDEIASRLCADMSLLQLQSLVYCGAVAAIRLHGQKIRFRVIGLSDKRDPPLKIRLERRRDSLRQDIARLIQISTGNASRRVRNKVQRVYRNYAIPCETPVVEILDTLKQKLSVICSRLRRYGESYSRRVQNATYARNQRSFFRSLNESQQSAQTIQFSVTEAKEYWGGLWALPAQHAEHAEWITAEGTRHVNTPGMNFADVTEEEVRRAINISKNWRGPGLDRVQNFWYKKFTSVHSRLARSINEVMSRPKKFPPFLTAGITYLIPKKDTVQDPADTRPITCLPTLYKFITSIISGRINAHLETNNILSEEQKGCRVGSRGCKEQLIIDSVVVGQATRGQRNLFSCYIDYAKAFDSVPHTWLIDILHLYRIDPKLIKFLATVMEGWHTTLSVRTSEGANTSEPIRIRRGIFQGDSLSPLWFCMALNPLSWLLNDARGHGFAIKYGLRAKCELTHLMYLDDIKLYAGTDNHVRSLLRIIDMFSRDIRMEFGLDKCRIQAIRKGHHEPQAGHSIGDLHIEAMTETDFYKYLGILQGTHARVGDLKEALLSEFLRRVKLVLKSHLSGKNKISALNVFAIPSLAYAFGILPWTKTDLENVQRRIRTTMSKFRMHHPRSAVERINLPRDIGGRGVVDVAAQHHRQVDSLRAYFYSKEQASPLHAAVCKADCGLTPLNLKDRSFNPLSGVKSDQERIEEWKSKAMHGKHVNCLWQPFVDLHLSNRWLCAGELFAETEGFMCAIQDGVVATRAYKKLIMKERVENDQCRMCGSALETLDHLISGCTVMGPVQYITRHNAVCKVIHQNLAYKHGLITGTCPVYRYEPQAVLDSSAYSMYWDRQVLTDRHTAHNKPDVLLVDKTGRSAYIIDVAIPHNSNIERKYVEKKVNYEPLAREIKEIWRLERVVVVPIILSATGIVPKSLTASLDVLGLSHSLVQTMQKYTILHTCSMLRGVLDGFSH

SEQ ID NO: 2111 - protein, 1188 aa, Hermetia illucens
MRRRRNLRSGTDNRRESSDLVTGSGSRNGQHGVETASRGAVRRLGATTTRSTVPPAAAVSPQPVATTSAGSRRKRMKWTEEMNLFIIRSYYEITAGAGTTSYRPFLHQRFVERFPQFAHVTVQRVADQYRFITRSDTIPATIRERVRLEVIGETGDRESMGAEGAASTTPRRTAGNRFSTRRSTLLHRPAEVSAEVRDEFQRACIEFSDMDPLHRPGIPRLYASPATPGILSQINDEIASRLCADMSLLQLQSLVYCGAVAAIRLHGQKIRFRVIGLSDKRDPPWKIRLERRRDSLRQDIARLIQISTGSASRRVRNKVQRVYRNYAIPCETPVVEILDTLKQKLSVICSRLRRYGESYSRRVQNATYARNQRSFFRSLNESQQSAQTIQFSVTEAKEYWGGLWGLPAQHAEHAEWITAEGTRHVNTPGMNFADVTEEEVRRAINSSKNWRGPGLDRVQNFWYKKFTSVHSRLARSINEVMSRPEEFPPFLTAGITYLIPKKDTVQDPADTRPITCLPTLYKFITSIISGRINAHLETNNILSEEQKGCRVGSRGCKEQLIIDSVVVGQATRGQRNLFSCYIDYAKAFDSVPHTWLIDILHLYRTDPKLIKFLATVMEGWHTTLSVRTSEGANTSEPIRIRRGIFQGDSLSPLWFCMALNPLSWLLNDARGHGFAIKYGLRAKCELTHLMYLDDIKLYAGTDNHLRSLLRIIDMFSRDIRMEFGLDKCRIQAVRKGHHEPHAGHSIGDLHIEAMTETDFYKYLGILQGTHARVGDLKEALLSEFLRRVKLVLKSHLSGKNKISALNVFAIPSLAYAFGILPWTKTDLENVQRRIRTTMSKFRMHHPKSAVERMNLPRDIGGRGVVDVAAQHHRQVDSLRAYFYSKEQASPLHAAVCKADCGLTPLNLKDRSFNPLSGVKSDQERIEEWKSKAMHGKHLNCLWQPFVDLHLSNRWLCAGELFAETEGFMCAIQEGVVATRAYKKLIMKERVENDQCRMCGSALETLDHLISGCTVMAPVQYITRHNAVCKVIHQNLAYKHGLITGTCPVYRYEPQAVLDSSAYSMYWDRQVLTDRHTAHNKPDVLLVDKTGRSAYIIDVAIPHNSNIERKYVEKKVHYEPMAREIKEIWRLERVVVVPIILSATGIVPKSLTASLDVLGLSHSLVQTLQKYTILHTCSMLRGVLDGFSH

SEQ ID NO: 2112 - protein, 1070 aa, Hermetia illucens
MHHQKMRRRRNLRSGTDNRRESSDLVTGSGSRNGQHGIETASRGAVRRLGATTTRSTAPPAAPVSPQSVATTSAGSRRKRMKWTEEMNLFIIRSYYEITAGAGTTTLWHQRFVERFPQFAAQSQRVADQYRFITRSDTIPATIRERVRLEVIGETGDRESMGAEAAASTTPRRTAGNRFSTRRSTLLHRPAEVSAEVRDEFQRACIEFSDMDPLHRPGISRLYASPATPGILSQINGEIASRLCADMSLLQLQSLVYCGAVAAIRLHGQKIRFRVIGLSDKRDPPWKIRLERRRDSLRQDIARLIQISTGNASRRVRNKVQRVYRNYAIPCETPVVEILDTLKQKLSVICSRLRRCGESYSRRVQNAPYARNQRSFFRSLNESQQSAQTIQFSVTEAKEYWGGLWGLPAQHAEHAKWITAEGTRHANTPGMNFADVTEEEVRRAINISKNWRGPGLDRVQNFWYKKFTSVHSRLARSINEVMSRPEEFPPFLTAGITYLIPKKDTVQDPADTRPITCLPTLYKFITSIISGRINAHLETNNILSEEQKGCRVGSRGCKEQLIIDSVVVGQATRGQRNLFSCYIDYAKAFDSVPHTWLIDILHLYRIDPKLIKFLATVMKGWHTTLSVRTSEGANTSEPIRIRRGIFQGDSLSPLWFCMALNPLSWLLNDARGHGFAIKYGLRAKCELTHLMYLDDIKLYAGTDNHLRSLLRIIDMFSRDIRMEFGLDKCRIQAIRKGHHEPHAGHSIGDLHIEAMTETDFYKYLGILQGTHARVGDLKEALLSEFLRRVKLVLKSHLSGKNKISALNVFAIPSLAYAFGILPWTKTDLENVQRWIRTTMSKFRMHHPKSAVERMNLPRDIGGRGVVDVAAQHHRQVDSLRAYFYSKEQASPLHAAVCKADCGLTPLNLKDRSFNPLSGVKSDQERIDEWKSKAMHGKHVNCLWQPFVDLHLSNKWLCAGELFAETEGFMCAIQDGVVATRAYKKLIMKERVENDQCRMCGSALETLDHLISGCTVMAPVQYITRHNAVCKFIHQNLAYKHGSREHVRFTDMSRKQYLIVLLTACIGTGKF

SEQ ID NO: 2113 - protein, 1188 aa, Hermetia illucens
MRRRRSLRSGTDNRRESSDLVTGSGSRNGQHGVETASRGAVRRLGATTTRSTAPPAAAVSPQSVATTSAGSRRKRMKWTEEMNLFIIRSYYEITAGASITSYRPLLHQRFVERFPQFAHVTVQRIADQYRFITRSDTIPATIRERVRLEVIGETGDRESMGAEAAASTTPRRTAGNRFSTRRSTLLHRPAEVSAEVRDEFQRACMEFSDMDPLHRPGIPRLYASPATPGILSQINDEIASRLCADMSLLQLQSLVYCGAVAAIRLHGQKIRFRVIGLSDKRDPPWKIRLERRRDSLRQDIARLIQISTGSASRRVRNKVQRVYRNYAIPCETPVVEILDTLKQKLSVICSRLRRYGESYSRRVQNATYARNQRSFFRSLNESQQSAQTIQFSVTEAKEYWGGLWGLPAQHAEHAEWITAEGTRHANTPGMNFADVTEEEVRRAINSSKNWRGPGLDRVQNFWYKKFTSVHSWLARSINEVMSRPEEFPPFLTAGITYLIPKKDTVQDPADTRPITCLPTLYKFITSIISGRINAHLETNNILSEEQKGCRVGSRGCKEQLIIDSVAVGQATRGQRNLFSCYIDYAKAFDSVPHTWLIDILHLYRIDPKLIKFLATVMEGWHTTLSVRTSEGANTSEPIRIRRGIFQGDSLSPLWFCMALNPLSWLLNDARGHGFAIKYGLRAKCELTHLMYLDDIKLNAGTDDHLRSLLRIIDMFSLDIRIEFGLDKCRIQAIRKGHHEPHAGHSIGDLHIEAMTETDFYKYLGILQGTHARVGDLKEALLSEFLRRVKLVLKSHLSGKNKISALNVFAIPSLAYAFGILPWTKTDLENVQRRIRTTMSKFRMHHPKSAVERMNLPRDIGGRGVVDVAAQHHRQVDSLRAYFYSKEQASPLHAAVCKADCGLTPLNLKDRSFNPLSGVKSDQERIDEWKSKAMHGKHVNCLWQPFVDLHLSNRWLCAGELFAETEGFMCAIQDGVVATRAYKKLIMKERVENDQCRMCGSTLETLDHLISGCTVMAPVQYITRHNAVCKVIHQNLAYKHGLITGTCPVYRYEPQAVLDSSACSMYWDRQVLTDRHTAHNKPDVLLVDKTGRSAYIIDVAIPHNSNIERKYVEKKVNYEPLAREIKEIWRLERVVVVPIILSATGIVPKSLTASLDVLGLSHSLVQTMQKYTILHTCSMLRGVLDGFSH

SEQ ID NO: 2114 - protein, 1141 aa, Hermetia illucens
MTRSTGPPAAAVSPQSVATTSAGSRRKRMKWTEEMNLFIIRSYYEITAGADTTSYRPLLHQRFVERFPQFAHVTVQRVADQYRFITRSDTIPATIRERVRLEVIGETGDRESMGAEAAASTTPRRTAGNRFSTRRSTLLHRPAEVSAEVRDEFQRACMEFSDMDPLHRPGIPRLYASPATPRILSQINDEIASRLCADMSLLQLQSLVYCGAVAAIRLHGQKIRFRVIGLSDKRDPPWKIRLERRRDSLRQDIARLIQISTGSASRRVRNKVQRVYRNYAIPCETPVVEILDTLKQKLSVICSRLRRYGESYSRRVQNAIYARNQRSFFRSLNESQQSAQTIQFSVTEAKEYWGGLWGLPAQHAEHAEWITAEGTRHANTPGMNFADVTEEEVRRAINSSKNWRGPGLDRVQNFWYKKFTSVHSRLARSINEVMSRPEEFPPFLTAGITYLIPKKDTAQDPADTRPITCLPTLYKFITSIISGRINAHLEKNNIVSEEQKGCRVGSTGCKEQLIIDSVVVGQATRGQRNLFSCYIDYAKAFDSVPHTWLIDILHLYRIDPKLIKFLATVMEGWHTTLSVRTSEGANTSEPIRIRRGIFQGDSLSPLWFCMALNPLSWLLNDARGHGFAIKYGLRAKCELTHLIYLDDIKMYAGNDDHLRSLLRIINMFSRDIRMEFGLDKCRIQAIRKGHHEPHAGHSIGDLHIEAMTETDFYKYLGILQGTHARVGDLKEALLSEFLRRVKLVLKSHLSGKNKISALNVFAIPSLAYAFGILPWTKTDLENVQRRIRTTMSKFRMHHPKSAVERMNLPRDIGGRGVVDVAAQHHRQVDSLRAYFYSKEQASPLHAAVCKADCGLTPLNLKDQSFNPLSGVKSDQERIDEWKSKAMHGKHVNCLWQPFVDLHLSNRWLCAGELFAETEGFMCAIQDGVVATRAYKKVIMKERVENDQCRMCGSALETLDHLISGCTVMASVQYITRHNAVCKVIHQNLAYKHGLITGTCPVYRYEPQAVLDSSAYSMYWDRQVLTDRHTAHNKPDVLLVDKTGRSAYIIDVAIPHNSNIERKYMEKKVNYEPLAREIKEIWRLERVVVVPIILSATGIVPKSLTASLDVLGLSHSLVQTMQKYTILHTCSMLRGVLDGFSH

SEQ ID NO: 2115 - protein, 1188 aa, Hermetia illucens
MRRRRNLRSGTDNRRESSDLVTGSGSRNGQHGVETASRGAVRRLGATTTRSTAPPAAAVSPQSVATTSAGSRRKRMKWTEEMNLFIIRSYYEITAGAGTTSYRPLLHQRFVERFPQFAHVTVQRVADQYRFITRSDTIPATIRERVRLEVIGETGDRESMGAEAAASTIPRRTAGNRFSTRRSTLLHRPAEVSAEVRDEFQRACMEFSDMDPLHRPGIPRLYASPATPGILSQINDEIASRLCADMSLLQLQSLVYCGAVAAIRLHGQKIRFRVIGLSDKRNPPWKIRLEHRRDSLRQDIARLIQISTGNASRRVRNKVQRVYRNYAIPRETPVVEILDTLKQKLSVICSRLRRYGESYSRRVQNATYARNQRSFFRSLNESQQSAQTIQFSVTEAKEYWGGLWGLPAQHAEHAEWITAEGTRHANTPGMNFADVTEEEVRRAINISKNWRGPGLDRVQNFWYKKFTSVHSRFARSINEVMSRPEEFPPFLTAGITYLIPKKDTVQDPADTRPITYLPTLYKFITSIISGRINAHLETNNILSEEQKGCRVGSRGCKEQLIIDSVVVGQATRGQRNLFSCYIDYAKAFDSVPHTWLIDILHLYRIDPKLIKFFATVMGGWHTTLSVRTSEGANTSEPIRIRRGIFQGDSLSPLWFCMALNPLSWLLNDARGHGFAIKYGLRAKCELTHLMYLDDIKLYAGTDNHLRSLLRIIDMFSRDIRMEFGLDKCRIQAIRKGHHEPHAGHSIGDLHIEAMTETDFYKYLGILQGTHARVSDLKEALLSEFLRRVKLVLKSHLSGKNKISALNVFAIPSLAYAFGILPWTKTDLENVQRRIRTTMSKFRMHHPKSAVERMNLPRDIGGRGVVDVAAQHHCQVDSLRAYFYSKEQASPLHAAVCKADCGLTPLNLKDRSFNPLSGVKSDQERIDEWKSKAMHGKHVNCLWQPFVDLHLSNRWLCAGVLFAETEGFMCAIQDGVVATQAYKKFIMKERVENDQCRMCGSALETLDHLISGCTVMAPVQYITRHNTVCKVIHQNLAYKHGLITGTCPVYRYEPQAVLDSSAYSMYWDRQVLTDRHTAHNKPDVLLVDKTGRSAYIIDVAIPHNSNIEQKYVEKKVNYEPLAREIKEIWRLERVVVVPIILSATGIVPKSLTASLDVLGLSHSLIQTMQKYTILHTCSMLRGVLDGFSH

SEQ ID NO: 2116 - protein, 1193 aa, Hermetia illucens
MHHQKMRRRRNLRSGTDNRRESSDLVTASGSRNGQHGIETASRGAVRRLGATTTRSTAPPAAAVSPQSGATTSAGSRRKRMKWTEEMNLFIIHSYYEITAGAGTTSYRPLLHQRFVERFPQFAHVTVQRVADQYRFITRSDTIPATIRERVRLEVIGETGDRESMGAEAVASTTPRRIAGNRFSTRRSTLLHRPAEVSAEVRDEFQRACIEFSDMDPLHGPGIPRLYASPATPGILSQINDEIASRLCADMSLLQLQSLVYCGAVAAIRLHGQKIRFRVIGLTDKRDPPWKIRLERRRDSLRQDIARLIQMSTGNASRRVRNKVQRVYRNYAIPCETPVVEILDTLKQKLSAICSRLRRYGESYSRRVQNATYARNQRSFFRSLNESQQSAQTIQFSVTEAKEYWGGLWGLPAQHAEHAEWITAEGTRHANTPGMNFADVTEEEVRRAINISKNWRGPGLDRVQNFWYKKFTSVHSRLARSINEVMSRPEEFPPFLTAGITYLIPKKDTVQDPADTRPITCLPTLYKFITSIISGRINAHLETNNILSEEQKGCRVGSRGCKEQLIIDSVVVGQATRGQRNLFSCYIDYAKAFDSVPHTWLIDILHLYRIDPKLIKFLATVMKGWHTTLSVRTSEGANTSEPIRIRRGIFQGDSLSPLWFCMALNPLSWLLNDARGHGFAIKYGLRAKCELTHLMYLDDMKLYAGTGNHLRSLLRIIDMFSRDIRMEFGLDKCRIQAIRKGHHEPHAGHSIGYLHIEAMTETDFYKYLGILQGTHARVGDLKEALLSEFLRRVKLVLKSHLSGKNKISALNVFAIPSLAYAFGILPWTKTELENVQRRIRTTMSKFRMHHPKSAVERMNLPRDIGGRGVVDVAAQHHRQVDSLRAYFYSKEQASPLHAAVCKADCGLTPLNLKDRSFNPLSGVKSDQERIEEWKSKAMHGKHVNCLWQPFVDLHLSNRWLCAGELFAETEGFMCAIQDGVVATRAYKKLIMKERVENDQCRMCGSALETLDHLISGCTVMAPVQYITRHNAVCKVIHQNLAYKHGLITGTCPVYRYEPQAVLDSSAYSMYWDRQVLTDRHTAHNKPDVLLVDKTGRSAYIIDVAIPHNSNIERKYVEKKVNYEPLAREIKEIWRLERVVVVPIILSATGIVPKSLTASLDVLGLSHSLVQTMQKYTILHTCSMLRGVLDGFSH

SEQ ID NO: 2117 - protein, 759 aa, Hermetia illucens
MNFADVTEEEVRRAINISKNWRGPGLDRVQNFWYKKFTSVHSRLARSINEVMSRPEEFPPFLTAGITYLIPKKDTVQDPADTRPITCLPTLYKFITSIISGRINAHLETNNILSEEQKGCRVGSRGCKEQLIIDSLVVGQATRGQRNLFSCYIDYAKAFDSVPHTWLIDILHLYRIDPKLIKFLATVMEGWHTTLSVRTSEGANTSEPIRIRKGIFQGDSLSPLWFCMALNPLSWLLNDARGHGFAIKYGLRAKCELTHLMYLDDIKLYAGTDNHLRSLLRIIDMFSRDIRMEFGLDKCRIQAIRKGHHEPHAGHSIGDLHIEAMTETDFYKYLGILQGTHARVGDLREALLSEFLRRVKLVLKSHLSGKNKISALNVFAIPSLAYAFGILPWTKTDLENVQRRIRTTMSKFRMHHPKSAVERMNLPRDIGGRGVVDVAAQHHRQVDSLRAYFYSKEQASPLHAAVCKADCGLTPLNLKDRSFNPLSGVKSDQERIEEWKSKAMHGKHVNCLWQPFVDLHLSNRWLCAGELFAETEGFMCAIQDGVVATRAYKKLIMKERVENDQCRMCGSALETLDHLISGCTVMAPVQYITRHNAVCKVIHQNLAYKHGLITGTCPVYRYEPQAVLDSSAYSMYWDRQVLTDRHTAHNKPDVLLVDKTGRSAYIIDVAIPHNSNIERKYVEKKVNYEPLAREIKEIWRLERVVVVPIILSATGIVPKSLTASLDVLGLSHSLVQTMQKYTILHTCSMLRGVLDGFSH

SEQ ID NO: 2118 - protein, 1188 aa, Hermetia illucens
MRRRRNLRSGTDNRRESSDLVTGSGSRNGQHGVETASRGAVRRLGATTTRSTAPPAAAVSPQPVATTSAGSRRKRMKWTEEMNLFIIRSYYEITAGAGTISYRPLLHQRFVERFPQFAHVTVQRVADQYRFITRSDTIPATIRERVRLEVIGETGDRESMGAEAAASTTSRRTAGNRFSTRRSTLLHRPAEVSAEVRDEFQRACIEFSDMDPLHRPGIPRLYASPATPGILSQINDEIASRLCADMSLLQLQSLVYCGAVAAIRLHGQKIRFRVIVLSDKRDPPWKIRLERRRDSLRQDIARLIQISTGSASRRVRNKVQRVYRNYAIPCETPVVEILDTLKQKLSVICSRLRRYGESYSRRVQNATYTRNQRSFFRSLNESQQSAQTIQFSVTEAKEYWGGLWGLPAQHAEHAEWITAEGTRHVNTPGMNFADVTEEEVRRAINSSKNWRGPGLDRVQNFWYKKFTSVHSRLARSINEVMSRPEEFPPFLTAGITYLIPKKDTVQDPADTRPITCLPTLYKFITSIISGRINAHLETNNILSEEQKGCRVGSRGCKEQLIIDSVVIGQATRGQRNLFSCYIDYAKAFDSVPHTWLIDILHLYRIDPKLIKFLATVMEGWHTTLSVRTSEGANTSEPIRIRRGIFQGDSLSPLWFCMALNPLSWLLNDARGHGFAIKYGLRAKCELTHLMYLDDIKLYAGTDNHLRSLLRIIDMFSRDIRMEFGLDKCRIQAIRKGHHEPHAGHSIGDLHIEAMTETDFYKYLGILQGTHARVGDLKEALLSEFLRRVKLVLKSHLSGKNKISALNVFAIPSLAYAFGILPWSKTDLENVQRRIRTTMSKFRMHHPKSAVERMNLPRDIGGRGVVDVAAQHHRQVDSLRAYFYSKEQASPLHAAVCKADCGLTPLNLKDRSFNPLSGVKSDQERIEEWKSKAMHGKHVNCLWQPFVDLHLSNRWLCAGELFAETEGFMCAIQDGVVATRAYKKLIMKERVENDQCRMCGSALETLDHLISGCTVMAPVQYITRHNAVCKVIHQNLAYKHGLITGTCPVYRYEPQAVLDSSAYSMYWDRQVLTDRHTAHNKPDVLLVDKTGRSAYIIDVAIPHNSNIERKYVEKKVNYEPLAREIKEIWRLERVVVVPIILSATGIVPKSLTASLDVLGLSHSLVQTMQKYTILHTCSMLRGVLDGFSH

SEQ ID NO: 2119 - protein, 1174 aa, Hermetia illucens
MHHQKMRRRRNLRSGTDNRRESSDLVTGSGSRNGQHGVETASRGAVRRLGATTTRSTAPPAAAVSPQSVATTSAGSRRKRMKWTEEMNLFIIRSYYEITAGAGTTSYRPLLHQRFVERFPQFAHVTVQRVADQYRFITRSDTIPATIRERVRLEVIGETGDRESMGAEAAASTTSRRTAGNRFSTRRSTLLHRPAEVSAEVRDEFQRACIEFSDMDPLHRPGIPRLYASPATPGILSQINDEIASRLCADMSLLQLQSLVYCGAVAAIRLHGQKIRFRVIGLSDKRDPPWKIRLERRRDSLRQDIARLIQISTGNASRRVRNKVQRVYRNYAIPCETPVVEILDTLKQKLSVICSRLRRYGKSYSRRVQNATYARNQRSFFGSEYWGGLWGLPAQHAEHAEWITAEGTRHVNTPGMNFADVTEEEVRGAINSSKNWRGPGLDRVQNFWYKKFTSVHSRLARSINEVMSRPEEFPPFLTALITYLIPKKDTVQDPADTRPITCLPTLYKFITSIISGRINAHLETNNILSEEQKGCRVGSRGCKEQLIIDSVVVGQATRGQRNLFSCYIDYAKAFDSVPHTWLIDILHLYRIDPKLIKFLATVMEGWHTTLSVRTSEGANTSEPIRIRRGIFQGDSLSPLWFCMALNPLSWLLNDARGYGFAIKYGLRAKCELTHLMYLDDIKLYAGTDNHLRSLLRIIDMFSRDIRMEFGLDKCRIQAIRKGHHEPHAGHSIGDLHIEAMTETDFYKYLGILQGTHARVGDLKEALLSEFLRRVKLVLKSHLSGKNKISALNVFAIPSLAYAFGILPWTKTDLENVQRRIRTTMSKFRMHHPKSAVERMNLPRDIGGRGVVDVAAQHHRQVDSLRAYFYSKEQASPLHAAVCKADCGLTPLNLKDRSFNPLSGVKSDQERIEEWKSKAMHGKHVNCLWQPFVDLHLSNRWLCAGELFAETEGFMCAIQDGVVATRAYKKLIMKERVENDQCRMCGSALETLDHLISGCTVMAPVQYITRHNAVCKVIHQNLAYKHGLITGTCPVYRYEPQAVLDSSAYSMYWDRQVLTDRHTAHNKPDVLLVDKTGRSAYIIDVAIPHNSNIERKYVEKKVNYEPLAREIKEIWRLERVVVVPIILSATGIVPKSLTASLDVLGLSHSLVQTMQKYTILHTCSMLRGVLDGFSH

SEQ ID NO: 2120 - protein, 1191 aa, Hermetia illucens
MHHQKMRRRKNLRSGTDNRRESSDLVTGSGSRNGQHGVETASRGAVRRLGATTTRSTAPPAAAVSPQSVATTSAGSRRKRMKWTEEMNLFIIRSYYEITAGAGTTSYRPLLHQRFVERYPQFAHVTVQRVADQYRFITRSDTIPATIRERVRLEVIGETGDRESMGAEAAATLRRTAGNRFSTRRSTLLHRPAEVSAEVRDEFQKACIEFSDMDPLHRPGIPRLYASPATPGIISQINDEIASQLCADMSLLQLQSLVYCGAVAAIRLHSQKIRFRVIGLSDKRDPPWKIRLERRRDSLRQDIARLIQISTGNARRRVRNKVQRVYRNYAIPCETPVVEILDTLKQKLSVICSRLRRYGESYSRRVQNATYARNQRSFFRSLNESQQSAQTIQFSVTEAKEYWGGLWGLPAQHAEHAEWITAEGTRHANTPGMNFADVTEEEVRRAINISKNWRGPGLDRVQNFWYKKFTSVHSRLARSINEVMSRPEEFPPFLTAGITYLIPKKDTVQDPADTRPITCLPTLYKFITSIISGRINAHLETNNILSEEQKGCRVGSKGCKEQLIIDSVVVGQVTRGQRNLFSCYIDYAKAFDSVPHTWLINILHLYRIDPKLIKFLATVMEGWHTTLSVRTSEGANTSEPIRIRRGIFQGDSLSPLWFCMALNPLSWLLNDARGHGFAIKYGLRAKSELTHLMYLDDIKVYAGTDNHLRSLLRIIDIFSRDIRMEFGLDKCRIQAIRKGHHEPHAGHSIGDLHIQAMTETDFYKYLGILQGTHARVGDLKEALLSEFLRRVELVLKSHLSGKNKMSALNVFAIPSLAYAFGILPWTKTDLENVQRRIRTTMSKFRMHHPKSAVERMNLPRDIGGRGVVDVAAQHHRQVDSLRAYFYSREQASPLHAAVCKADCGLTPLNLKDRSFNPLSGVKSDQERIEEWKSKAMHGKHVNCLWQPFVDLHLSNRWLCAGELFAETEGFMCAIQDGVVATRAYKKLIMKERVENDQCRMCGSALETLDHLISGCTVMAPVQYINRHNAVCKVIHQNLAYKHGLITGTCPVYRYEPQAVLDSSAYSMYWDRQVLTDRHTAHNKPDVLLVDKTGRSAYIIDVAIPHNSNIERKYVEKKVNYEPLAREIKEIWRLERVVVVPIILSATGIVPKSLTASLDVLGLSHSLVQTMQKYTILHTCSMLRGVLDGFSH

SEQ ID NO: 2121 - protein, 759 aa, Hermetia illucens
MNFADVTEEEVRRAINSSKNWRGPGLDRVQNFWYKKFTSVHSRLARSINEVMSRPEEFPPFLTAGITYLIPKKDAVQDPADTRPITCLPTLYKFITSIISGRINAHLETNNILSEEQKGCRVGSRGCKEQLIIDSVVVGQATRGQRNLFSCYIDYAKAFDSVPHTWLIDILHLYRIDPKLIKFLATVMEGWHTTLSVRTSEGANTSEPIRIRRGIFQGDSLSPLWFCMALNPLSWLLNDARGHGFAIKYGLRAKCELTHLMYLDDIKLYAGTDNHLRSLLRIIDMFSRDIRMEFGLDKCRIQAIRKGHHEPQAGHSIGDLHIEAMTETDFYKYLGILQGTHARVGDLKEALLSEFLRRVKLVLKSHLSGKNKISALNVFAIPSLAYAFGILPWTKTDLENVQRRIRTTMSKFRMHHPKSAVERMNLPRDIGGKGVVDVAAQHHRQVDSLRAYFYSKEQASPLHAAVCKADCGLTPLNLKDRSFNPLSGVKSDQERIEEWKSKAMHGKHVNCLWQPFVDLHLSNRWMCAGELFAETEGFMCAIQDGVVATRAYKKLIMKERVENDQCRMCGSALETLDHLISGCTVMAPVQYITRHNAVCKVIHQNLAYKHGLITGTCPVYRYEPQAVLDSSAYSMYWDRQVLTDRHTAHNKPDVLLVDKTGRSAYIIDVAIPHNSNIERKYVEKKVNYEPLAREIKEIWRLERVVVVPIILSATGIVPKSLTASLDVLGLSHSLVQTMQKYTILHTCSMLRGVLDGFSH

SEQ ID NO: 2122 - protein, 1055 aa, Hermetia illucens
MKWTEEMNLFIIRSYYEITAGAGTTSYRPLLHQRFVERFPQFAHVTVQRVADQYRFITRSDTIPATIRERVRLEVIGETGDRESMGAEAAASTTPRRTAGNRFSTRRSTLLHRPAEVSAEVRDEFQRACIKFSDMDPLHRPGMPRLYASPATPGILSQINDKITSRLCADMSLLQLQSLVYCGAVAAIRLHGQKIRFRVIGLSDKRDPPWKIRLERRRDSLMQDIARLIQISTGNASRRVRNKVQRVYRNYAIPCETPVVEILDTLKQKLSVICSRLRRYGESYSRRVQNPTFARNQRSFFRSLNESQQSAQTIQFSVTEAKGYWGGLWGLPAQHAEHAEWITAEGTRHANTPGMNFADVTEEEVRRAINISKNWRGPGLDRVQNFWYKKFTSVHSRLARSINEVMSRPEEFPPFLTAGITYLIPKKDTVQDPADTRPITCLPTLYKFITSIISGRINAHLETNNILSEEQKGCRVGSRGCKEQLIIDSVVVGQATRGQRNLFSCYIDCAKAFDSVPHTWLIDILHLYRIDPKLIKFLATVMEGWHTTLSVRTSEGANTSEPIRIRRGIFQGDSLSPLWFCMVLNPLSWLLNDARGHGFAIKYGLRAKCELTHLMYLDDIKLYAGTDNHLRSLLRIIDMFSRDIRMEFGLDKCRIQAIRKGHHEPHAGHSIGDLHIEAMTETDFYKYLGILQGTHARVGDLKEALLSEFLRRVKLVLKSHLSGKNKMSALNVFAIPSLAYAFGILPWTKTDLENVQRRIRTTMSKFRMHHPKSAVERMNLPRNIGGRGVVDVAAQHHRQVDSLRTYFYRKEQASPLHAAVCKADCGQTPLNLKERSFNPLSGMRSDQERIEEWKSKAMHGKHVNCLWQPFVDLHLSNRWLCAGELFAETEGFMCAIQDGVVATRAYKKLIMKERVENEQCRMCGSAIETLDHLISGCTVMAPVQYITRHNAVCKVIHQNLAYKHGLITGTCPVYRYEPQAVLDSSAYSMYWDRQVLTDRHIAHNKPDVLLVDKTGRSAYIIDVAIPHNSNIERKYVEKKVNYEPLAREIKEIWRL

SEQ ID NO: 2123 - protein, 1178 aa, Hermetia illucens
MRRSGTDNRRESSDLVTGSGSRNGQHGVETASRGAVRRLGATTTRSTAPPAAAVSPQSVATTSAGSRRKRMKWTEEMNLFIIRSYYEITAGAGITSYRPLLHQRFIERFPQFADVTVQRVADQYRFITRSDTIPATIRERVRLEVIGETGDRESMGAEAAASTTPRRTAGNSTRRSTLLHRPAEVSAEVRDEFQRACIEFSDMDPLHRPGIPRLYASPATPGILSQINDEIASRLCADMSLLQLQSLVYCGAVAAIRLHGQKIRFRVIGLSDKRDPPWKIRLERRRDSLRQDIARLIQISTGNASRRVRKKVQRVYRNYAILCETPVVEILDTLKQKLSVICSRLRRYGESYSRRVQNATYARNQRSFFRSLNESQQSAQTIQFSVTEAKEYWGGLWGLPAQHAEWITAEGTRHANTPGMNFADVTEEEVRRAINISKNWRGPGLDRVQNFWYKKFTSVHSRLARSINEVMSRPEEFPPFLTAGITYLIPKKDTVQDPADTRPITCLPTLYKFITSIISGRINAHLETNNILSEEQKGCRVGSRGCKEQLIIDSVVVGQATRGQRNLFSCYIDYAKAFDSVPHTWLIDILHLYRIDPKLIKFLATVMEGWHTILSVRTSEGANTSEPIRIRRGIFQGDSLSPLWFCMALNPLSWLLNNARGHGFAIKYGLRAKCELTHLMYLDDIKLYAGTDNHLRSLLRIIDMFSRDIRMEFGLDKCRIQAIRKGHHEPHAGHSIGDLHIEAMTETDFYKYLGILQGTHARVGDLKEALLSEFLRRVKLVLKSHLSGKNKISALNVFAILSLAYAFGILPWTKTDLKNVQRRIRTTMSKFRMHHPKSAVERMNLPRDIGGRGVVDVAAQHHRQVDSLRAYFYSKEQASPLHAAVCKADCGLTPLNLKDRSFNPLSGVKSDQERIEEWKSKAMHGKHVNCLWQPFVDLHLPNRWLCAGELFAETEGFMCAIQDGVVATRAYKKLIMKERVENDQCRMCGSALETLDHLISGCTVMAPVQYITRHNAVCKVIHQNLAYKHGLITGTCPVYRYEPQAVLDSSAYSMYWDRQVLTDRHTAHNKPDVLLVDKTGRSAYIIDVAVPHNSNIERKYVEKKVNYEPLAREIKEIWRLERVVVVPIILSATGIVTKSLTASLDVLGLSHSLVQTMQKYTILHTCSMLRGVLDGFSH

SEQ ID NO: 2124 - protein, 1187 aa, Hermetia illucens
MRRRRNLRSGTDNRRESSDLVTGSGSRNGQHGVETASRGAVRRLGATTTTSTAPPAAAVSPQPVATTSAGSRRKRMKWTEEMNLFIIRSYYEITAGAGTTSYRPLLHQRFVERFPQFAHVTVQRVADQYRFITRSDTMPATIRERVRLVIGETGDRESMGAEAAASTTSRRTAGNRFSTRRSTVLHRPAEVSAEVRDEFQRACIEFSDIDPLHRPGIPRLYASPATPGILSQISDEIASRLCADMSLLQLQSLVNCGAVAAIRLHGQKIRFRVIGLSDKRDPPWKIRLERRRDSLRQDIARLIQISTGNASRRVRNKVQRVYRNYAIPCETPVVEILDTLKQKLSVICSRLRRYGESYSRRVQNATYARNQRSFSRSLNESQQSAQTIQFSVTEAKEYWSGLWGLPAQHAEHAEWITAEGTRHVNTSGMNFADVTEEEVRRAINSSKKWRGPGLDRVQNFWYKKFTSVHSRLARSINEVMSRPEEFPPFLIAGITYLIPKKDTVQDPADTRPITCLPTLYKFITSIISGRINAHLETNNILSEEQKGCRVGSRGCKEQLIIDSVVVGQATRGQRSLFSCYIDYAKAFDNVPHTWLIDILHLYRIDPKLIKFLATVMEGWHTTLSVRTSEGANTSEPIRIRRGIFQGDSLSPLWFCMALNPLSWLLNDARGHSFAIKYGLRAKCELTHLMYLDDIKLYAGTDDHLRSLLRIKDMFSRDIRMEFGLDKCRIQAIRKGHHEPHAGHSIGDLHIEAMTETDFYKYLGILQGTHARVGDLKEALLSEFLRRVKLVLKSHLSGKNKISAVNVFAMPSLAYAFGILPWTKTDLENVQRRIRTTMSKIRMHHPKSAVERMNLPRDIGGRGVVDVAAQHHRQVDSLRAYFYSKEQASLLHAAVCKADCGLTPLNLKDRSFNPLSGVKSDQERIEEWKSKAMHGKHVNCLWQPFVDLHLSNRWLCAGELFAETEGFMCAIQDGVVATRAYKKLIMKERVENDQCRMCGSALETLDHLISGCTVMAPVQYITRHNAVCKVIHQNLAYKHGLITGTCPVYRYEPEAVFDSSAYSMYWDWQVLTDRHTAHNKPDVLLVDKTGRSAYIIDVAIPHNSNIERKYVEKKVNYEPLAREIKEIWRLERVVVVPIILSATGIVPKSLTASLDVLGLSHSLVQTMQKYTILHTCSMLRGVLDGFSH

SEQ ID NO: 2125 - protein, 1193 aa, Hermetia illucens
MHHQKMRRRRNLRSGTDNRRESSDLVTGSGSRNGQHGVETASRGAVRRLGATTTRSTAPPAAAVSPQSVATTSAGSRRKRMKWTEEMNLFIIRSYYEITAGAGTTSYRPLLHQRFVERFPQFAHVTVQRVADQYRFITRSATIPATIRERVRLEVIGETGDRESMGAEAAASTTPRRTAGNRFSTRRSTLLHRPAEVSAEVRDEFQRACIEFSDMDPLHRPGIPRLYASPATPGILSQINDEIASRLCADMSLLQLQSLVYCGAVAAIRLHGQKIRFRVIGLSDKRDPPWKIRLERRRDSLRQDIARLIQISTGNASRRVRNKVQRVYRNYAIPCETPVVEILDTLKQKLSVICSRLRRYGESYSRRVQNATYARNQRSFFRSLNESQQSAQTIQFSVTEAKEYWGGLWGLPAQHAEHAEWITAEATRHANTPGMNFADVTEEEVRRAINISKNWRGPGLDRVQNFWYKKFTSVHSRLARSINEVMSRPEEFPPFLTAGITYLIPKKDTVQDPADTRPITCLPTLYKFITSIISGRINAHLETNNILSEEQKGCRVGSRGCKEQLIIDSVVVGQATRGQRNLFSCYIDYAKAFDSVPHTWLIDILHLYRIDPKLIKFLATVMEGWHTTLSVRTSEGANTSEPIRIRRGNFQGDSLSPLWFCMALNPLSSLLNDARGHGFAIKYGLRAKCELTHLMYLDDIKLYAGTDNHLRSLLRIIDMFSRDIRMEFGLDKCRIQAIRKGHHEPHSGHSIGDLHIEAMTETDFYKYLGILQGTHARVGDLKEALLSEFLRRVKLVLKSHLSGKNKISALNVFAIPSLAYAFGILPWTKTDLENVQRRIRTTMSKFRMHHPKSAVERMNLPRDIGGRGVVDVAAQHHREVDSLRAYFYSKEQASPLHAAVCKADCGLTPLNLKDRSFNPLSGVKSDQERIEEWKSKAMHGKHVNCLWQPFVDLHLSNRCLCAGELFAETEGFMCAIQDGVVATRAYKKLIMKERVENDQCRMCGSALETLDHLISGCTVMAPVQYITRHNAVCKVIHQNLAYKHGLITGTCPVYRYEPQAVLDSSAYSMYWDRQVLTDRHTAHNKPDVLLVDKTGRSAYIIDVAIPHNSNIERKYVEKKVNYEPLAREIKEIWRLERVVVVPIILSATGIVPRSLTASLDVLGLSHSLVQTMQKYTILHTCSMLRGVLDGFSH

SEQ ID NO: 2126 - protein, 1176 aa, Hermetia illucens
MRRRRNLRSGTDNRRESSDLVTGSGSRNGQHGVETASRGAVRRLGATTTRSTAPPAAAVSPQPVATTSAGSRRKRMKWTEEMNLFIIRSYYEITAGAGTTSYRPLLHQRFVERFPQFAHVTVQRVADQYRFITRSDTIPATIRERVRLEVIGETGDRESMGAEAAASTTSRRTAGNRFSTRRSTLLHRPAEVSAEVRDEFQRACIEFSDMDPLHRPGIPRLYASPATPGILSQINDEIASRLCADMSLLQLQSLVYCGAVAAIRLHGQKIRFRVIGLSDKRDPPWKIRLERRRDSLRQDIARLIQISTGNASRRVRNKVQRVYRNYAIPCETPVVEILDTLKQKLSVICSRLRRYGESYSRRVQNATYARNQRSFFRSLNESQQSAQTIQFSVTEAKEYWGGLWGLPAQHAEHAEWITAEGTRHANTPGMNFADVTEEEVRRAINISKNWRGPGLDRVQNFWYKKFTSVHSRLARSINEVMSRPEEFPPFLTAGITYLIPKKDTVQDPADTRPITCLPTLYKFITSIISGRINAHLETNNILSEEQKGCRVGSRGCKEQLIIDSLVVGQATRGQRNLFSCYIDYAKAFDSVPHTWLIDILHLYRIDPKLIKFLATVMEGWHTTLSVRTSEGANTSEPIRIRKGIFQGDSLSPLWFCMALNPLSWLLNDARGHGFAIKYGLRAKCELTHLMYLDDIKLYAGTDNHLRSLLRIIDMFSHDIRMEFGLDKCRIQAIRKGHHEPHAGHSIGDLHIEAMTETDFYKYLGILQGTHARVGDLKEALLFEFLRRVKLVLKSHLSGKNKISALNVFAIPSLAYAFGILPWTKTDLENVQRRIRTTMSKFRMHHPKSAVERMNLPRDIGGRGVVDVAAQHHRQVDSLRAYFYSKEQASPLHAAVCKADCGLTPLNLKDRSFNPLSGVKSDQERIEEWKSKAMHGKHVNCLWQPFVDLHLSNRWLCAGELFAETEGFMCAIQDGVVATRAYKKLIMKERVENDQCRMCGSALETLDHLISGCTVMAPVQYFTRHNAVCKVIHQNLAYKHGLITGTCPVYRYEPQAVLDSSAYSMYWDRQVLTDRHTAHNKPDVLLVDKTGRSAYIIDVAIPHNNYEPLAREIKEIWRLERVVVVPIILSATGIVPKSLTASLDVLGLSHSLVQTMQKYTILHTCSMLRGVLDGFSH

SEQ ID NO: 2127 - protein, 1193 aa, Hermetia illucens
MHHQKMRRRRNLRSGTDNRRESSDLVTGSGSRNGQHSVETASRGAVRRLGATTTRSTAPPAAAVSPQSVATTSAGSRRKRMKWTEEMNLFIIRSYYEITAGAGTTSYRPLLHQRFVERFPQFAHVTVQRVADQYRFITRSDTIPATIRERVRLEVIGETGDRESMGAEAAASTTPRRTAGNRFSTRRSTLLHRPAEVSAEVRDEFQRACIEFSDMDPLHRPGIPRLYASPATPGILSQINDEIASRLCADMSLLQLQSLVYCGAVAAIRLHGQKIRFCVIGLSDKRDPPWKIRLERRRDSLRQDIARLIQISTGNASRRVRNKVQRVYRNYAIPCETPVVEILDTLKQKLSVICSRLRRYGESYSRRVQNATYARNQRSFFRSLNESQQSAQTIQFSVTEAKEYWGGLWGLPAQHAEHAEWITAEGTRHANTPGMNFADVTEEEVRRAINISKNWRGPGLDRVQNFWYKKFTSVHSRLARSINEVMSRPEEFPPFLTAGITYLIPKKDTVQDPADTRPITSLPTLYKFITSIISGRINAHLETNNILSEEQKGCRVGSRGCKEQLIIDLVVVGQATRGQRNLFSCYIDYAKAFDSVPHTWLIDILHLYRIDPKLIKFLATVMEGWHTTLSVRTSEGANTSEPIRIRRGIFQGDSLNPLWFCMALNPLSWLLNDARGHGFAIKYGLRAKCELTHLMYLDDIKLYAGTDNHLRSLLRIIDMFSRDIRMEFGLDKCRIQAIRKGHHEPHAGHSIGDLHIEAMTETDFYKYLGILQGTHARVGDLKEALLSEFLRRVKLVLKSHLSGKNKISALNVFAIPSLAYAFGILPWTKTDLENVQRRIRTTMSKFRMHHPKSAVERMNLPRDIGGRGVVDVAAQHHRQVDSLRAYFYSKEQASPLHAAVCKADCGLTPLNLKDRSFNPLSGVKSDQERIEEWKSKAMHGKHVNCLWQPFVDLHLSNRWLCAGELFAETEGFMCAIQDGVVATRAYKKLIMKERVENDQCRMCGSALETLDHLISGCTVMAPVQYITRHNAVCKVIHQNLAYKHGLITGTCPVYRYEPQAVLDSSAYSMYWDRQVLTDRHTAHNKPDVLLVDKTGRSAYIIDVAIPHNSNIERKYVEKKVNYEPLAREIKEIWRLERVVVVPIILSATGIVPKSLTASLDVLGLSHSLVQTMQKYTILHTCSMLRGVLDGFSH

SEQ ID NO: 2128 - protein, 1199 aa, Hermetia illucens
MAARDKMHHQKMRRRRNLRSGTDNRRESSDLVTGSGSRNGQHGVETASRGAVRRLGATTTRSTAPPAAAVSPQSVATTSAGSRRKRMKWTEEMNLFIIRSYYEITAGAGTTSYRPLLHQRFVERFPQFAHVTVQRVADQYRFITRSDTIPATIRERVRLEVIGETGDRESMGAEAAASTTPRRTAGNRFSTRRSTLLHRPAEVSAEVRDEFQRACIEFSDMDPLHRPGIPRLYASPATPGILSQINDEIASRLCADMSLLQLQSLVYCGAVAAIRLHGQKIRFRVIGLSDKRDPPWKIRLERRRDSLRQDIARLIQISTGNASRRVRNKVQRVYRNYAIPCETPVVEILDTLKQKLSVICSRLRRYGESYSRRVQNATYARNQRSFFRSLNESQQSAQTIQFSVTEAKEYWGGLWGLPAQHAEHAEWITAEGTRHANTPDMNFADVTEEEVRRAINISKNWRGPGLDRVQNFWYKKFTSVHSRLAHSINEVMSRPEEFPPFLTAGITYLIPKKDTVQDPADTRPITCLPTLYKFITSIISGRINAHLETNNILSEEQKGCRVGSRGCKEQLIIDSVVVGQATRGQRNLFSCYIDYAKAFDSVPHTWLIDILHLYRIDPKLIKFLATVMEGWHTTLSVHTSEGANTSEPIRIRRGIFQGDSLSPLWFCMALNPLSWLLNDARWHGFAIKYGLRAKCELTHLMYLDDIKLYAGTDNHLRSLLRIIDMFSRDIRMEFGLDKCRIQAIRKGHHEPHAGHSIGDLHIEAMTETDFYKYLGILQGTHARVGDLKEALLSEFLRRVKLVLKSHLSGKNKISALNVFAIPSLAYAFGILPWTKTDLENVQRRIRTTMSKFRMHHPKSAVERMNLPRDIGGRGVVDVAAQHHRQVDSLRAYFYSKEQASPLHAAVCKADCGLTPLNLKDRSFNPLSGVKSDQERIEEWKSKAMHGKHVNCLWQPFVDLHLSNRWLCAGELFAETEGFMCAIQDGVVATRAYKKLIMKERVENDQCRMCGSALETLDHLISGCTVMAPVQYITRHNAVCKVIHQNLAYKHGLITGTCPVYRYEPQAVLDSSAYSMYWDRQVLTDRHTAHNKPDVLLVDKTGRSAYIIDVAIPHNSNIERKYVEKKVNYEPLAREIKEIWRLERVVVVPIILSATGIVPKSLTASLDVLGLSHSLVQTMQKYTILHTCSMLRGVLDGFSH

SEQ ID NO: 2129 - protein, 978 aa, Hermetia illucens
MDQVFPGSMHLQQLREFYLKSMMRLRLDCVLICRCCNYNLLSLLQLQSLVYCIRLHGQKIRFRVIGLSDKRDPPWKIRLERRRDSLRQDIARLIQISTGNASRRVRNKVQRVYRNYAIPCETPVVEILDTLKQKLSVICSRLRRYGESYSRRVQNATYARNQRSFFRSLNESQQSVQTIQFSVTEAKEYWGGLWGLPAQHAEHAEWITAEGTRHANTPGMNFADVTEEEVRRAINISKNWRGPGLDRVQNFWYKKFTSVHSRLARSINEVMSRPEEFPSFLTAGITYLIPKKDTVQDPADTRPITCLPTLYKFITSIISGRINAHLETNNILSEEQKGCRAGSRGCKEQLIIDSVVVGQATRGQRNLFSCYIDYAKAFDSVPHTWLIDILHLYRIDPKLIKFLATVMEGWHTTLSVRTSEGANTSEPIRIRRGIFQGDSLSPLWFCMALNPLSWLLNDARGHGFAIKYGLRAKCELTHLMYLDDIKLYAGTDNHLRSLLRIIDMFSGDIRMEFGLDKCRIQAIRKGHHEPHAGHSIGGLHTEAMTETDFYKYLGILQGTHARVGDLKEALLSEFLRRVKLVLKSHLSGKNKISALNVFAIPSLAYAFGILPWTKTDLENVQRRIRTTMSKFRMHHPKSAVERMNLPRDIGGRGVVDVAAQHHRQVDSLRAYFYSKEQASPLHAAVCKADCGLTPLNLKDRSLNPLSGVKSDQERIEEWKSKAMHGKHVNCLWQPFVDLHLSNRWLCAGELFAETEGFMCAIQDGVVATRAYKKLIMKERVENDQCRMRGSALETLDHLISGCIVMAPVQYITRHNAVCKVIHQNLAYKHGLITGTCPVYRYEPQAVLDNSAYSMYWDRQVLTDRHTAHNKPDVLLVDKTGRSAYIIDVAIPHNSNIERKYVEKKVNYEPLAREIKEIWRLERVVVVPIILSATGIVPKSLTASLDVLGLSHSLVQTMQKYTILHTCSMLRGVLDGFSH

SEQ ID NO: 2130 - protein, 1188 aa, Hermetia illucens
MRRKRNLRSGTDNRRESSDLVTGSGSRNGQHGVETASRGAVRRLGATTTRSTAPPAAAVSPQSVATTSAGSRRKRMKWTEEMNLFIIRSYYEITAGAGITSYRPLLHQRFVERFPQFAHVTVQRVADQYRFITRSDTIPATIRERVRLEVIGETGDRESMGAEAAASTTPRRTAGNRFSTRRSTLLHRPAEVSAEVRDEFQRACIEFSDMDPLHRPGIPRLYASPATPGILSQINDEIASRLCADMSLLQLQSLVYCGAVAAIRLHGQKIRFRVIGLSDKRDPPWKIRLERRRDSLRQDIARLIQISTGNASRRVRNKVQRVYRNYAIPCETPVVEILDTLKQKLSVICSRLRRYGESYSRRVQNATYARNQRSFFRSLNESQQSAQTIQFSVTEAKEYWGGLWGLPAQHAEHAEWITAEGTRHANTPGMNFADVTEEEVRRAINISKNWRGPGLDRVQNFWYKKFTSVHSRLARSINEVMSRPEEFPPFLTAGITYLIPKKDTVQDPADTRPITCLPTLYKFITSIISGRINAHLETNNILSEEQKGCRVGSRGCKEQLIIDSVVVGQATRGQRNLFSCYIDYAKAFDSVPHTWLIDILHLYRIDPKLIKFLATVMEGWHTTLSVRTSEGANTSEPIRIRRGIFQGDSLSPLWFCMALNPLSWLLNDTRGHGFAIKYGLRAKCELTHLMYLDDIKLYAGTDNHLRSLLRIIDMFSRDIRMEFGLDKCRIQAIRKGHHEPHAGHSIGDLHIEAMTETDFYKYLGILQGTHARVGDLKEALLSEFLRRVKLVLKSHLSGKNKISALNVFAIPSLAYAFGILPWTKTDLENVQRRIRTTMSKFRMHHPKSAVERMNLPRDIGGRGVVDVAAQHHRQVDSLRAYFYSKEQASPLHAAVCKADCGLTPLNLKDRSFNPLSGVKSDQERIEEWKSKAMHGKHVNCLWQPFVDLHLSNRWLCAGELFAETEGFMCAIQDGVVATRAYKKLIMKERVENDQCRMCGSALETLDHLISGCTVMAPVQYITRHNAVCKVIHQNLAYKHGLITGTCPVYRYEPQAVLDSSAYSMYWDRQVLTDRHTAHNKPDVLLVDKTGRSAYIIDVAIPHNSNIERKYVEKKVNYEPLAREIKEIWRLERVVVVPIILSATGIVPKSLTASLDVLGLSHSLVQTMQKYTILHTCSMLRGVLDGFSH

SEQ ID NO: 2131 - protein, 1188 aa, Hermetia illucens
MRRRSNLRSGTDNRRESSDLVTGSGSRNGQHGVETASRGAVRRLGATTTRSTAPPAAAVSPQPVATTSAGSRRKRMKWTEEMNLFIIRSYYEITAGAGTTSYRPLLHQRFVERFPQFAHVTVQRVADQYRFITRSDTIPATIRERVRLEVIGETGDRESMGAEAAASTTPRRTAGNRFSTRRSTLLHRPAEVSAEVRDEFQRACIEFSDMDPLHRPGIPRLYASPATPGILSQINDEIASRLCADMSLLQLQSLVYCGAVAAIRLHGQKIRFRVIGLSDKRDPPWKIRLERRRDSLRQDIARLIQISTGNASRRVRNKVQRVYRNYAIPCETPVVEILDTLKQKLSVICSRLRRYGESYSRRVQNATYARNQRSFFRSLNESQQSAQTIQFSVTEAKEYWGGLWGLPAQHAEHAEWITAEGTRHVNTPGMNFADVTEEEVRRVINSSKNWRGPGLDRVQNFWYKKFTSVHSRLARSINEVMSRPEEFPPFLTAGITYLIPKKDTVQDPADTRPITCLPTLYKFITFIISGRINAHLETNNILFEEQKGCRVGSRGCKEQLIIDSVVVGQATRGQRNLFSCYIDYAKAFDSVPHTWLIDILHLYRIDPKLIKFLATVMEGWHTTLSVRTSEGANTSEPIRIRRGIFQGDSLSPLWFCMALNPLSWLLNDARGHGFAIKYGLRAKCELTHLMYLDDIKLYAGTDNHLRSLLRIIDMFSRDIRMEFGLDKCRIQAIRKGHHEPHAGHSIGDLHIEAMTETDFYKYLGILQGTHARVGDLKEALLSEFLRRVKLVLKSHLSGKNKISALNVFAIPSLAYAFGILPWTKTDLENVQRRIRTTMSKFRMHHPKSAVERMNLPRDIGGRGVVDVAAQHHRQVDSLRAYFYSKEQASPLHAAVCKADCGLTPLNLKDRSFNPLSGVKSDQERIEEWKSKAMHGKHVNCLWQPFVDLHLSNRWLCAGELFAETEGFMCAIQDGVVATRAYKKLIMKERVENDQCRMCGSALETLDHLISGCTVMAPVQYITRHNAVCKVIHQNLAYKHGLITGTCPVYRYEPQAVLDSSAYSMYWDRQVLTDRHTAHNKPDVLLVDKTGRSAYIIDIAIPHNSNIERKYVEKKVNYEPLAREIKEIWRLERVVVVPIILSATGIVPKSLTASLDVLGLSHSLVQTMQKYTILHTCSMLRGVLDGFSH

SEQ ID NO: 2132 - protein, 1147 aa, Hermetia illucens
MRRRRNLRSGTDNRRESSDLVTGSGSRNGQHGVETASRGAVRRLGATTTRSTAPPAAAVSPQSVATTSAGSRRKRMKWTEEMNLFIIRSYYEITAGAGITSYRPLLHQRFVERFPQFAHVTVQRVADQYRFITRSDTIPATIRERVRLEVIGETGDRESMGAEAAASTTPRRTAGNRFSTRRSTLLHRPAEVSAEVRDEFQRACIEFSDMDPLHRPGIPRLYASPATPGILSQINDEIASRLCADMSLLQLQSLVYCGAVAAIRLHGQKIRFRVIGLSDKRDPPWKIRLERRRDSLRQDIARLIQISTGSASRRVRNKVQRVYRNYAIPCETPVVEILDTLKQKLSVICSRLRRYGESYSRRVQNATYARNQREWITAEGTRHANTPGMSFADVTEEEVRRAINSSKNWRGPGLDRVQNFWYKKFTSVHSRLARSINEVMSRPEEFPPFLTAGITYLIPKKDTVQDPTDTRPITCLPTLYKFITSIISGRIYAHLETNNILSEEQKGCRVGSRGCKEQLIIDSVVVGQATRGQRNLFSCYIDYAKAFDSVPHTWLIDILHLYRIDPKLIKFLATVMEGWHTTLSVRTSEGANTSEPIRIRRGIFQGDSLSPLWFCMALNPLSWLLNDARGHGFAIKYGLRAKCELTHLMYLDDIKLYAGTDNHLRSLLRIIDMFSRDIRMEFGLDKCRIQAIRKGHHEPHAGHSIGDLHIEAMTETDFYKYLGILQGTHARVGDLKEALLSEFLRRVKLVLKSHLSGKNKISALNVFAIPSLAYAFGILPWTKTDLENVQRRIRTTMSKFRMHHPKSAVERMNLPRDIGGRGVVDVAAQHHRQVDSLRAYFYSKEQASPLHAAVCKADCGLTPLNLKDRSFNPLSGVKSDQERIDEWKSKAMHGKHVNCLWQPFVDLHLSNRWLCAGELFAETEGFMCAIQDGVVATRAYKKLIMKERVESDQCRMCGSALETLDHLISGCTVMAPVQYITRHNAVCKVIHQNLAYKHGLITGTCPVYRYEPQAVLDSSAYSMYWDRQVLTDRHTAHNKPDILLVDKTVRSAYIIDVAIPHNSNIERKYVEKKVNYEPLAREIKEIWRLERVVVVPIILSATGIVPKSLTASLDVLGLSHSLVQTMQKYTILHTCSMLRGVLYGFSH

SEQ ID NO: 2133 - protein, 1193 aa, Hermetia illucens
MHHQKMRRRRNLRSGTDNRRESSDLVTGSGSRNGQHGVETASRGAVRRLGATTTRSTAPPAAAVSPQSVATTSAGSRRKRMKWTEEMNLFIIRSYYEITAGAGTTSYRPLLHQRFVERFPQFAHVTVQRVADQYRFITRSDTIPATIRERVRLEVIGETGDRESMGAEAAASATPRRTAGNRFSTRRSTLLHRPAEVSAEVRDEFQRACIEFSDMDPLHRPGIPRLYASPATPGILSQINDEIASRLCADMSLLQLQSLVYCGAVAAIRLHGQKIRFRVIGLSDKRDPPWKIRLERRRDSLRQDIARLIQISTGNASRRVRNKVQRVYRNYAIPCETPVVEIQDTLKQKLSVICSRLRRYGESYSRRVQNATYARNQRSFFRSLNESQQSAQTIQFSVTEAKEYWDGLWGLPAQHAEHAEWITAEATRHANTPGMNFADVTEEEVRRAINISKNWRGPGLDRVQNFWYKKFTSVHSRLARSINEVMSRPEEFPPFLTAGITYLIPKKDTVQDPADTRPITCLPTLYKFITSIISGRINAHLETNNILSEEQKGCRVGSRGCKEQLIIDSVVVGQATRGQRNLFSCYIDYAKAFDSVPHTWLIDILHLYRIDPKLIKFLATVMEGWHTTLSVRTSEGANTSEPIRIRRGIFQGDSLSPLWFCMALNPLSWLLNDARGHGFAIKYGLRAKCELTHLMYLDDIKLYAGTDNHLRSLLRIIDMFSRDIRMEFGLDKCRIQAIRKGHHEPHAGHSIGDLHIEAMTETDFYKYLGILQGTHARVGDLKEALLSEFLRRVKLVLKSHLSGKNKISALNVFAIPSLAYAFGILPWTKTDLENVQRRIRTTMSKFRMHHPKSAVERMNLPRDIGGRGVVDVAAQHHRQVDSLLAYFYSKEQASPLHAAVCKADCGLTPLNLKDRSFNPLSGVKSDQERIEEWKSKAMHGKHVNCLWQPFVDLHLSNRWLCAGELFAETEGFMCAIQDGVVATRAYKKLIMKERVENDQCRMCGSALETLDHLISGCTVMAPVQYITRHNAVCKVIHQNLAYKHGLITGTCPVYRYEPQAVLDSSAYSMYWDRQVLTDRHTAHNKPDVLLVDKTGRSAYIIDVAIPHNSNIERKYVEKKVNYEPLAREIKEIWRLERVVVVPIILSATGIVPKSLTASLDVLGLSHSLVQTMQKYTILHTCSMLRGVLDGFSH

SEQ ID NO: 2134 - protein, 1188 aa, Hermetia illucens
MRRRRNLRSGTDNRRESSDLVTGSGSRNGQHGVETASRGAVRRLGATTTRSTAPPAAAVSPQPVATTSAGSRRKRMKWTEEMNLFIIRSYYEITAGAGTTSYRPLLHQRFVERFPQFAHVTVQRVADQYRFIIRSDTIPATIRERVRLEVIGETGDRESMGAEAAASTTSRRTAGNRFSTRRSTLLHRPAEVSTEVRDEFQRACIEFSDMDPLHRPGIPRLYASPATPGILSQINDEIASRLCADMSLLQLQSLVYCGAVAAIRLHGQKIRFRVIGLSDKRDPPWKIRLERRRDSLRQDIARLIQISTGNASLRVRNKVQRVYRNYAIPCETPVVEILDTLKQKLSVICSRLRRYGESYSRRVQNATYARNQRSFFRSLNESQQSAQTIQFSVTEAKEYWGGLWGLPAQHAEHAEWITAEGTRHVNTPGMNFADVTEEEVRGAINSSKNWRGPGLDRVQNFWYKKFTSVHSRLARSINEVMSRPEEFPPFLTAGITYLIPKKDTVQDPADTRPITCLPTLYKFITSIISGRINAHLETNNILSEEQKGCRVGSRGCKEQLIIDSVVVGQATRGQRNLFSCYIDYAKAFDSVPHTWLIDILHLYRIDPKLIKFLATVMEGWHTTLSVRTSEGANTSEPIRIRRGIFQGDSLSPLWFCMALNPLSWLLNDARGHGFAIKYGLRAKCELTHLMYLDDIKLYAGTDNHLRSLLRIIDMFSRDIRMEFGLDKCRIQAIRKGHHEPHAGHSIGDLHIEAMTETDFYKYLGILQGTHARVGDLKEALLSEFLRRVKLVLKSHLSGKNKISALNVFAIPSLAYAFGILPWTKTDLENVQRRIRTTMSKFRMHHPKSAVERMNLPRDIGGRGVVDVAAQHHRQVDSLRAYFYSKEQASPLHAAVCKADCGLTPLNLKDRSFNPLSGVKSNQERIEEWKSKAMHGKHVNCLWQPFVDLHLSNRWLCAGELFAETEGFMCAIQDGVVATRAYKKLIMKERVENDQCRMCGSALETLDHLISGCTVMAPVQYITRHNAVCKVIHQNLAYKHGLITGTCPVYRYEPQAVLDSSAYSMYWDRQVLTDRHTAHNKPDVLLVDKTGRSAYIIDVAIPHNSNIERKYVEKKVNYEPLAREIKEIWRLERVVVVPIILSATGIVPKSLTASLDVLGLSHSLVQTMQKYTILHTCSMLRGVLDGFSH

SEQ ID NO: 2135 - protein, 1193 aa, Hermetia illucens
MHHQKMRRRKNLRSGTDNRRESSDLVTGSGSRNGQHGVETASRGAVRRLGATTTRSTAPPAEAVSPQSVATTSAGSRRKRMKWTEEMNLFIIRSYYEITAGAGTTSYRPLLHQRFVERFPQFAHVTVQRVADQYRFITRSDTIPATIRERVRLEVIGETGDRESMGAEAAASTTPRRTAGNSFSTRRSTLLHRPAEVSAEVRDEFQRACIEFSDMDPLHRPGIPRLYASPATPGILSQINDEIASRLCADMSLLQLQSLVYCGAVAAIRLHGQKIRFRVIGLSDKRDPPWKIRLERRRDSLRQDIARLIQISTGNASRRVRNKVQRVYRNYAIPCETPVVEILDTLKQKLSVICSRLRRYGKSYSRRVQNATYARNQRSFFRSLNESQQSVQTIQFSVTEAKEYWGGLWGLPAQHAEHAEWITAEGTRHANTPGMNFADVTEEEVRRAINISKNWRGPGLDRVQNFWYKKFTSVHSRLARSINEVMSRPEEFPPFLTAGITYLIPKKDTVQDPADTRPITCLPTLYKFITSIISGRINAHLETNNILSEEQKGCRVGSRGCKEQLIIDSVVVGQATRGQRNLFSCYIDYAKAFDSVPHTWLIDILHLYRIDPKLIKFLATVMEGWHTTLSVRTSEGANTSEPIRIRRGIFQGDSLSPLWFCMALNPLSWLLNDARGHGFAIKYGLRAKCELTHLMYLDDIKLYAGTDNHLRSLLRIIDMFSRDIRMEFGLDKCRIQAIRKGHHEPHAGHSIGDLHIEAMTETDFYKYLGILQGTHARVGDLKEALLSEFLRRVKLVLKSHLSGKNKVSALNVFAIPSLAYAFGILPWTKTDLENVQRRIRTTMSKFRMHHPKSAVERMNLPRDIGGRGVVDVAAQHHRQVDSLRAYFYINEQASPLHAAVCKADCGLTPLNLKDRSFNPLSGVKSDQERIEEWKSKAMHGKHVNCLWQPFVDLHLSNRWLCAGELFAETEGFMCAIQDGVVATRAYKKLIMKERVENDQCRMCGSALETLDHLISGCTVMAPVQYITRHNAVCKVIHQNLAYKHGLITGTCSVYRYEPQAVLDSSAYSMYWDRQVLTDRHTAHNKPDVLLVDKTGRSAYIIDVAIPHNSNIERKYVEKKVNYEPLARKIKEIWRLERVVVVPIILSATGIVPKSLTASLDVLGLSHSLVQTMQKYTILHTCSMLRGVLDGFSH

SEQ ID NO: 2136 - protein, 1193 aa, Hermetia illucens
MHHQKMRRRRNLRSGTDNRRESSDLVTGSGSRNGQHGVETASRGAVRRLGATTTRSTASPAAAVSPQSVATTSAGSRRKRMKWTEEMNLFIIRSYYKITAGAGTTSYRPLLHQRFVERFPQFAHVTVQRVADQYRFITRSDTIPATIRERVRLEVIGETGDRESMGAEAAASTTPRRTAGNRFSTRRSTLLHRPTEVSAEVRDEFQRACIEFSDMDPLHRPGIPRLYAFPATPGILSQINDEIASRLCADMSLLQLQSLVYCGAVAAIRLHGQKIRFRVIGLSDKRDPPWKIRLERRRDSLRQDIARLIQISTGSASRRVRNKVQRVYRNYAIPCETPVVEILDTLKQKLSVICSRLRRYGESYSRRAQNATYARNQRSFFRSLNESQQSAQTIQFSVTEAKEYWGGLWGLPAQHAEHAEWITAEGTRHANTPGMSFADVTEEEVRRAINSSKNWRGPGLDRVQNFWYKKFTSVHSRLARSINEVMSRPEEFPPFLTAGITYLIPKKDTVQDPADTRPITCLPTLYKFIMSIISGRINAHLETNNILSEEQKGCRVGSRGCKEQLIIDSVAVGQATRGQRNLFSCYIDYAKAFDSVPHTWLIDILHLYRIDPKLIKFLATVMEGWHTTLSVRTSEGANTSEPIRIRRGIFQGDSLSPLWFCMALNPLSWLLNDARGHGFAIKYDLRAKCELTHLMYLDDIKLCAGTDNHLRSLLRIIDMFSRDIRMEFGLDKCRIQAIRKGHHEPHAGHSIGDLNIEAMTETDFYKCLGILQGTHARVGDLKEALLSEFLRRVKLVLKSHLSGKNKISSLNVFALPSLAYAFGILPWTKTDLENVQRRIRTTMSKFRMHHPKSAVERMNLPRDIGGRGVVDVAAQHHRQVDSLRAYFYSKEQASPLHAAVCKADCGLTPLNLKDRSFNPLSGVKSDQERIDEWKSKAMHGKHVNCLWQPFVDLHLSNRWLCAGELFAETEGFMCAIQDGVVATRAYKKLIIKERVENDQCRMCGSALETLDHLISGCTVMAPVQYITRHNAVCKVIHQNLAYKHGLITGTCPVYRYEPQAVLDSSAYSMYWDRQVLTDRHTAHNKPDVLLVDKTGRSAYIIDVAIPHNSNIERKYVEKKVNYEPLAREIKEIWRLERVVVVPIILSATGIVPKSLTASLDVLGLSHSLVQIMQKYTILHTCSMLRGVLDGFSH

SEQ ID NO: 2137 - protein, 979 aa, Hermetia illucens
MDPLHRPGIPRLYASPATPGILSQINDEIASRLCADMSLLQLQSLVYCGAVAAIRLHGQKIRFRVIGLSDKRDPPWKIRLERRRDSLRQDIARLIQISTGNASRRVRNKVQRVYRNYAIPCETPVVEILDTLKQKLSVICSRLRRYGESYSRRVQNATYARNQRSFFRSLNESQQSAQTIQFSVTEAKEYWGGLWGLPAQHAEHAEWITAEGTRHVNTPGMNFADVTEEEVRRAINSSKNWRGPGLDRVQNFWYKKFTSVHSRLARSINEVMSRPEEFPPFLTAGITYLIPKKDTVQDPADTRPITCLPTLYKFITSIISGRINAHLETNNILSEEQKGCRVGSRGCKEQLIIDSVVVGQATRGQRNLFSCYIDYAKAFDSVPHTWLIDILHLYRIDPKLIKFLATVMEGWHTTLSVRTSEGANTSEPIRIRRGIFQGDSLSPLWFCMALNPLSWLLNDARGHGFAIKYGLRAKCELTHLMYLDDIKLYAGTDNHLRSLLRIIDMFSRDIRMEFGLDKCRIQAIRKGHHEPHAGHSIGDLHIEAMTETDFYKYLGILQGTHARVGDLKEALLSEFLRRVKLVLKSHLSGKNKISALNVFAIPSLAYAFGILPWTKTDLENVQRRIRTTMSKFRMHHPKSAVERMNLPRDIGGRGVVDVAAQHHRQVDSLRAYFYSKEQASPLHAAVCKADCGLTPLNLKDRSFNPLSGVKSDQERIEEWKSKAMHGKHVNCLWQPFVDLHLSNRWLCAGELFAETEGFMCAIQDGVVATRAYKKLIMKERVENDQCRMCGSALETLDHLISGCTVMAPVQYITRHNAVCKVIHQNLAYKHGLITGTCPVYRYEPQAVLDSSAYSMYWDRQVLTDRHTAHNKPDVLLVDKTGRSAYIIDVAIPHNSNIERKYVEKKVNYEPLAPEIKEICRLERVVVVPIILSATGIVPKSLTASLDVLGLSHSLVQTMQKYTILHACSMLWGVLDGFSH

SEQ ID NO: 2138 - protein, 1084 aa, Hermetia illucens
MRRRRNLRSGADNRRESSDLVTGSGSRNGQHGVETASRGAVRRLGATTTRSTAPPAAAVSPQPVATTSAGSRRKRMKWTEEMNLFIIRSYYEITAGAGTTSYRPLLHQRFVERFPQFAHVTVQRVADQYRFITRSDTIPATIRERVRLEVIGETGDRESMGAEAAAPTTPRRTAGNRFSTRRSTLLHRPAEVSAEVRDEFQRACIEFSDMDPLHRPDIPRLYASPATPGILSQINDEIASRLCADMSLLQLQSLVYCGAVAAIRLHGQKIRFRVIGLSDKRDPPWKIRLERRRDSLRQDIARLIQISTGSASRRVRNKVQRVYRNYAIPCETPVVEILDTLKQKLSVICSRLRRYGESYSRRVQNATYARNQRSFFRSLNESQQSAQTIQFSVTEAKEYWGGLWGLPAQHAEHAEWITAEGTRHVNTPGMNFADVTEEEVRRAINSSKNWRGPGLDRVQNFWYKKFTSVHSRLARSINEVMSRPEEFPPFLTAGITYLIPKKDTVQDPADTRPITCLPTLYKFITSIISGRINAHLETNNILSEEQKGCRVGSRGCKEQLIIDSVVVGQATRGQRNLFSCYIDYAKAFDSVPHTWLIDILHLYRIDPKLIKFLATVMEGWHTTLSVRTSEGANTSEPIRIRRGIFQGDSLSPLWFCMALNPLSWLLNDARGHGFAIKYGLRAKCELTHLMYLDDIKLYAGTDKHLRSLLRIIDMFSRDIRMEFGLDKCRIQAIRKGHHEPHAGHSIGDPHIEAMTETDFYKYLGILQGTHARVGDLKEALLSEFLRRVKLVLKSHLSGKNKISALNVFAIPSLAYAFGILPWTKTDLENVQRRIRTTMSKFRMHHPKSAVERMNLPRDIGGRGVVDVAAQHHRQVDSLRAFFYSKEQASPLHAAVCKADCGLTPLNLKDRSFNPLSGVKSDQERIDEWKSKAMHGKHVNCLWQPFVDLHLSNRWLCAGELFAETEGFMCVIQDGVVATRAYKKLIMKERVENDQCRMCGSALETLDHLISGCTVMALVQYITRHNAVCKVIHQNLAYKHGLITGTCPVYRYEPQAVLDSSAYSMYWDRQVLMIAIPHTTSLTYC

SEQ ID NO: 2139 - protein, 1188 aa, Hermetia illucens
MRRRRNLRSGTDNRRESSDLVTGSGSRNGQHGVETASRGAVRRLGATTTRSTAPPAAAVSPQPVATTSAGSRRKRMKWTEEMNLFIIRSYYEITAGAGTTSYRPLLHQRFVERFPQFAHVTVQRVADQYRFIIRSDTIPATIRERVRLEVIGETGDRESMGAEAAASTTSRRTAGNRFSTRRSTLLHRPAEVSAEVRDEFQRACIEFSDMDPLHRPGIPRLYASPATPGILSQINDEIASRLCADMSLLQLQSLVYCGAVAAIRLHGQKIRFRVIGLSDKRDPPWKIRLERRRDSLRQDIARLIQISTGNASRRVRNKVQRVYRNYAIPCETPVVEILDTLKQKLSVICSRLRRYGESYSRRVQNATYARNQRSFFRSLNESQQSAQTIQFSVTEAKEYWGGLWGLPAQHAEHAEWITAEGTRHVNTPGMNFADVTEEEVRGAINSSKNWRGPGLDRVQNFWYKKFTSVHSRLARSINEVMSRPEEFPPFLTAGITYLIPKKDTVQDPADTRPITCLPTLYKFITSIISGRISAHLETNNILSEEQKGCRVGSRGCKEQLIIDSVVVGQATRGQRNLFSCYIDYAKAFDSVPHTWLIDILHLYRIDPKLIKFLATVMEGWHTTLSVRTSEGANTSEPIRIRRGIFQGDSLSPLWFCMALNPLSWLLNDARGHGFAIKYGLRAKCELTHLMYLDDIKLYAGTDNHLRSLLRIIDMFSRDIRMEFGLDKCRIQAIRKGHHEPHAGHSIGDLHIEAMTETDFYKYLGILQGTHARVGDLKEALLSEFLRRVKLVLKSHLSGKNKISALNVFAIPSLAYAFGILPWTKTDLENVQRRIRTTMSKFRMHHPKSAVERMNLPRDIGGRGVVDVAAQHHRQVDSLRAYFYSKEQASPLHAAVCKADCGLTPLNLKDRSFNPLSGVKSDQERIEEWKSKAMHGKHVNCLWQPFVDLHLSNRWLCAGELFAETEGFMCAIQDGVVATRAYKKLIMKERVENDQCRMCGSALETLDHLISGCTVMAPVQYITRHNAVCKVIHQNLAYKHGLITGTCPVYRYEPQAVLDSSAYSMYWDRQVLTDRHTAHNKPDVLLVDKTGRSAYIIDVAIPHNSNIERKYVEKKVNYEPLAREIKEIWRLERVVVVPIILSATGIVPKSLTASLDVLGLSHSLVQTMQKYTILHTCSMLRGVLDGFSH

SEQ ID NO: 2140 - protein, 1147 aa, Hermetia illucens
MRRRRNLRSGTDNRRESSDLVTGSGSRNGQHGVETASRGAVRRLGATTTRSTAPPAAAVSPQSVATTSAGSRRKRMKWIEEMNLFIIRSYYEITAGAGTTSYRPLLHQRFVERFPQFAHVTVQRVADQYRFITRSDTIPATIRERVRLEVIGETGDRESMGAEAAASTTPRRTAGNRFSTRRSTLLHRPAEVSAEVRDEFQRACIEFSDMDPLHRPGIPRLYASPATPGILSQINDEIASRLCADMSLLQLQSLVYCGAVAAIRLHGQKIRFRVIGLSDKRDPPWKIRLERRRDSLRQDIARLIQISTGSASRRVRNKVQRVYRNYAIPCETPVAEILDTLKQKLSVICSRLRRYGESYSRRVQNATYARNQREWITAEGTRHANTPGMSFADVTEEEVRRAINSSKNWRGPGLDRVQNFWYKKFTSVHSRLARSINEVMSRPEEFPPFLTAGIIYLIPKKDTVQDPADTRPITCLPTLCKFITSIISGRIYAHLETNNILSEEQKGCRVGSRGCKEQLIIDSVVVGQATRGQRNLFSCYIDYAKAFDSVPHTWLIDILHLYRIDPKLIKFLATVMEGWHTTLSVRTSEGANTSEPIRIRRGIFQGDSLSPLWFCMALNPLSWLLNDARGHGFAIKYGLRAKCELTHLMYLDDIKLYAGTDNHLRSLLRIIDMFSRDIRMEFGLDKCRIQAIRKGHHEPHAGHSIGDLHIEAMTETDFYKYLGILQGTHARVGDLKEALLSEFLRRVKLVLKSHLSGKNKISALNVFAIPSLAYAFGILPWTKTDLENVQRRIRTTMSKFRMHHPKSAVERMNLPRDIGGRGVVDVAAQHHRQVDSLRAYFYSKEQASPLHAAVCKADCGLTPLNLKDRSFNPLSGVKSDQERIEEWKSKAMHGKHVNCLWQPFVDLHLSNRWLCAGELFAETEGFMCAIQDGVVATRAYKKLIMKERVENDQCRMCGSALETLEHLISGCTVMAPVQYITRHNAVCKVIHQNLAYKHGLITGTCPVYRYEPQAVLDSSAYSMYWDRQVLTDRHTAHNKPDVLLVDKTVRSAYIIDVAISHNSNIERKYVEKKVNYEPLAREIKEIWRLERVVVVPIILSATGIVPKSLTASLDVLGLSHSLVQTMQKYTILHTCSMLRGVLDGFSH

SEQ ID NO: 2141 - protein, 943 aa, Hermetia illucens
MSLLQLQSLVYCGAVAAIRLHGQKIRFRVIGLSDKRDPPWKIRLERRRDSLRQDIARLIQISTGNASRRVRNKVQRVYRNYAIPCETPVVEILDTLKQKLSVICSRLRWYGESYSRRVQNATYARNQRSFFRSLNESQRSAQTIQFSVTEAKEYWGGLWGLPAQHAEHAEWITVEGTRHANTPGMNFADVTEEEVRRAINISKNWRGPGLDRVQNFWYKKFTSVHSRLARSINEVMSRPEEFPPFLTAGITYLIPKKDTVLDPADTRPITCLPTLYKFITSIISGRINAHLETNNILSEEQKGCRVGSRGCKEQLIIDSVVVGQATRGQRNLFSCYIDYAKAFDSVPHTWLIDILHLYRIDPKLIKFLATVMEGWHTTLSVRTSEGANTSEPIRIRRGIFQGDSLSPLWFCMALNPLSWLLNDARGHGFAIKYGLRAKCELTHLMYLDDIKLYAGTDNHLRSLLRIIDMFSRDIRMEFGLDKCRIQAIRKGHHEPHAGHSIGDLHIEAMTETDFYKYLGILQGTHARVGDLKEALLSEFLRRVKLVLKSHLSGKNKISALNVFAIPSLAYAFGILPWTKTDLENVQRRIRTTMSKFRMHHPKFAVERMNLPRDIGGRGVVDVAAQHHRQVDSLRAYFYSKEQASPLHAAVCKADCGLTPLNLKDRSFNPLSGVKSDQERIEECKSKAMHGKHVNCLWQPFVDLHLSNRWLCAGELFAETEGFMCAIQDGVVATRAYKKLIMKERVENDQCRMCGSALKTLDHLISGCTVMAPVQYITRHNAVCKVIHQNLAYKHGLITGTCPVYRYEPQAVLDSSAYSMYWDRQVLTDRHTAHNKPDVLLVDKTGRSAYIIDVAIPHNSNIERKYVEKKVNYEPLAREIKEIWRLERVVVVPIILSATGIVPKSLTASLDVLGLSHSLVQTMQKYTILHTCSMLRGVLDGFSH

SEQ ID NO: 2142 - protein, 979 aa, Hermetia illucens
MDPLHKPGIPRLYASPATPGILSQINDEIASRLCADMSLLQLQSLVYCGAVAAIRLHGQKIRFRVIGLSDKRDPPWKIRLERRRDSLRQDIARLIQISTGTASRQVRNKVQRVYRNYAIPCETPVVEILDTLKQKLSIICSRLRRYGESYSRRVQNAAYARNLRSFFRSLNKSQQSAQTIQFSVTEAKEYWCGLWGLPAQHAEHAEWITAEGTRHANTPSMNFPDVTEEEVRRAINISKNWRGPGLDRVQNFWYKKFTSVHSRLARSINEVMSRPEEFPPFLTAGITYLIPKKDTVQDPADTRPITCLPTLYKFITSIISGRINAHLETKNILSEEQKGCRVGSRGCKEQLIIDSVVVGQATRGQRNFFSCYIDYAKAFDSVPHTWLIDILQLYRIDPKLIKFLTTVMEGWHTTLSVRTSEGANTSEPIRIRRGIFQGDSLSPLCFCMALNPISWLLNDARGHGFAIKYGLPAKCELTHLIYLDDIKLYAGTDDHLRSLLRIIDMFSRDIRMEFGLDKCRIQAICKGHHEPHAGHSIGDLHIEAMTETDFYKYLGILQGTHARVGDLKEVPLSEFLRRVKLVLKLHLSGKNKISALNVFAIPSLAYAFGILPWTKTDLENVQRRNWTTMSKFRMHHPKSAVERMNLPRDIGGRGVVDVAAQHHRQVDSLHTYFYSKEQASPLHAAVCKADCGLTPLNLKNRSFNPLSGVKSDQERFDEWKSKAMHCKHVNCLWQPFVDLHLSNRWLCVGELFAETEGFLCAIQDGVVATRAYKKLIMKERVENDQYRMCGSTLETLDHPISGCTVMAPVQYITRHNAVCKVIHQNLAYKHGLITGTCPVFRYEPQAVLDSSAYSMYWDRQALTDRHTTHNKPDVLLVDKTGRSAYIIDVAIPHNSNIERKYVEKKVNYEPLAREIEEIWRLERVVVVPIILSATGIVPKSLTASLDVLGLSHSLVQTMQKYTILHTCSMLRGVLDGFSH

SEQ ID NO: 2143 - protein, 979 aa, Hermetia illucens
MDPLHRPGIPRLYASPATPGILSQINDEIASRLCADMSLLQLQSLVYCGAVAAIRLHGQKIRFRVIGLSDKRDPPWKIRLERRRDSLRQDIARLIQISTGNASRRVRNKVQRVYRNYAIPCETPVVEILDTLKQKLSVICSRLRRYGESYSRRVQNATYARNQRSFFRSLNESQQSAQTIQFAVTEAKEYWGGLWGLPAQHAEHAEWITAEGTHHVNTPGMNFADVTEEEVRRAINSSKNWRGPGLDRVQNFWYKKFTSVHSRLARSINEVMSRPEEFPPFLTAGITYLIPKKDTVQDPADTRPITCLPTLYKFITSIISGRINAHLETNNILSEEQKGCRVGSRGCKEQLIIDSVVVGQATRGQRNLFSCYIDYAKAFDSVPHTWLIDILHLYRIDPKLIKFLATVMEGWHTTLSVRTSEGANTSEPIRIRRGIFQGDSLSPLWFCMALNPLSWLLNDARGHGFAIKYGLRAKCELTHLMYLDDIKLYAGTDNHLRSLLRIIDMFSRDIRMEFGLDKCRIQAIRKGHHEPHAGHSIGDLHIEAMTETDFYKYLGILQGTHARVGDLNEALLSEFLQRVKLVLKSHLSGKNKISALNVFAIPSLAYAFGILPWTKTDLENVQRRIRTTMSKFRMHHPKFAVERMNLPRDIGGRGVVDVAAQHHRQVDSLRAYFYSKEQACPLHAAVCKADCGLTPLNLKDRSFNPLSGVKSDQERIDEWKSKAMHGKHVNCLWQPFVDLHLSNRWLCAGELFAETEGFMCAIQDGVVGTRAYKKLIMKERVENDQCRMCGSALETLDHLISGCTVMAPVQYITRHNAVCKVIHQNLAYKHGLITGTCPVYRYEPQAVLDSSAYSMHWDRQVLTDRHTAHNKPDVLLVDKTGRSAYIIDVAIPHNSNIERKYVEKKVNYEPLAREIKEIWRLERVVVVPIILSATGIVPKSLTASLDVLGLSHSLVQTMQKYTILHTCSMLRGVLDGFSH

SEQ ID NO: 2144 - protein, 1177 aa, Hermetia illucens
MRRRRNLRSGTDNRRESSDLVTGSGSRNGQHGVETASRGAVRRLGATTTRSTAPLAAAGSHRKRMKWTEEMNLLIIRSYYEITAGAGTTSYRPLLHQRFVERFPQFAHVTVQRVADQYRFITRSDTIPATIRECVRLEVIGETGDRESMGADAAASTTPRRTAGNRFSTRRSTLLHRPAEVSAEVRDEFQRACMEFSDMDPLHRPGIPRLYASPATPGILSQINDEIASRLCADMSLLPLQSLVYCGAVAAIRLHGQKIRFRVIGLSDKRDPPWKIRLERRRDSLRQDIARLIQISTGSASRRVRNKVQRVYRNYAIPCETPVVEILDTLKQKLSVICSRLRRYGESYSRRVQNATYARNQRSFFRSLNESQQSAQTIEFSVTEAKEYWGGLWGLPVQHAEHAEWITAEGTRHANTPGMNFADVTEEEVRRAINISKNWRGPGLDRVQNFGYKKFTSVHSRLARSINEVMSRPEEFPPFLTAGITYLIPKKDTVQDPADTRPITCLPTLYKFITSIISGRINAHLETNNILSEEQKGCRVGSRGCKEQLIIDSVVVGQATRGQRNLFSCYIDYAKAFDSVPHTWLIDILHLYRIDPKLIKFLATVMEGWHTTLSVRTSEGANTSEPIRIRRGIFQGDSSSPLWFCMALNPLSWLLNDARGHGFAIKYGLCAKCELTHLMYLDDIKLYVGTDNHLRSLLRIIDMFSRDIRMEFGLDKCRIQAIRKGHHEPHAGHSIGDLHIEAMTETDFYKYLGILQGTHARVGDLKEALLSEFLRRVKLVLKSNLSGKNKISALNVFAIPSLAYAFGILPWTKTDLENVQRRIRTTMSKFRMHHPKSAVERMNLPRDIGGRGVVDVVAQHHRQVDSLRAYFYSKEQASPLHAAVCKVDCGLTPLNLKDRSFNPVSGVKSDQERIDEWKSKALHGKHVNCLWQPFVDLHLSNRWLCAGELFAETEGFMCAIQDGVVATRAYKKLIMKERVENDQCRMCGSALETLDHLISGCTVMAPVQYITRHNAVCKVIHQNLAYKHGLITGKCPVYRYEPQAVLDSSACSMYWDRQVLTDRHTAHNKPDVLLVDKTGRSAYIIDVAILHNSNIERKYVEKKVNYEPLAREIKEIWRLERVVVVPIILSATGIVPKSLTASLDVLGLSHSLVQTMQKYTILHTCSMLRGVLDGFSH

SEQ ID NO: 2145 - protein, 1190 aa, Hermetia illucens
MHHQKMRRRRNLRSGTDNRRESSDLVTGSGSRNGQHGIETASRGAVRRLGATTTRSTAPPAAAASPQPVATTSAGSRRKRMKWTEEMNLFIIRSYYEITAGAGTISHRPLLHQRFVERFPQFAHVTVQRVADQYRFITRSDTIPATIRERVRLEVIGETGDRESMGAEAAASTTPRRTAGNRFSTRRSTILHRPAEVSAEVQDEFQRACIEFSDMDPLHRPGIPRLYASPATPGILSQINDEIASRLCADMSLLQLQSLVYCGAVAAIRLHGQKIRFRVIGLSDKRDPPWKIRLERRRDSLRQDIARLIQISTGSASRRVRNKVQRVYRNYAIPCETPVVEILDTLKQKLSVICSRLRRYGKSYSRRVQNTTYARNQRSFFRSLNESQQTIQFSVTEAKEYWGGLWELPAQHAEYSEWITAEGTRHANTPGMNFADVTEEEVRRAINSSKNWRGPGLDRVQNFWYKKFTSVHSRLARSINEVMSRPEEFPPFLTAGITYLIPKKDTVQDPADTRPITCLPTLYKFITSIISGRINAHLETNNILSEEQKGCRVGSKGCKEQLIIDSVVVGQATRGQRNLFSCYIDYAKAFDSVPHTWLIDILHLYRIDPKLITFLATVMEGWHTTLSVRTSEGANTSEPIRIRRGIFQGDSLSPLWFCMTLNPLSWLLNDARGHGFAIKYGLRDKCELTHLMYLDDIKLYAGTDNHLRSLLRTIDMFSRDIRMEFGLDKCRIQAIRKGHHEPHAGHSIGDLHIEAMTETDFYKYLGILQGTHARVGDLKEALLSEFMRRVKLVLKSHLSGKNKISALNVFAIPSLAYAFGILPWTKTDLENVQRRIRTTMSKFRMHHPKSAVERMNLPRDIGGRGVVDVAAQHHRQVDSLRAYFYSKEQASPLHAAICKADCGLTPLNLKDRSFNPLSGVKSDQERIEEWKSKAMHGKHVNCLWQPFVDLHLSNRWLCAGEFFAETEGFMCAIQDGVVATRAYKKLNMKERVENDQCRMCGSALETLDHLISGCTVMAPVQYVTRHNAVCKVIHQNLAYKHGLITGTCPVYRYEQQAVLDSSAYSMYWDRHVLTDRHTAHNKPDVLLVDKTGRSTYIIDVAIPHNSNIERKYVEKKVNYEPLAREIKEIWRLERVVVVPIILLATGIVPKSQTASLDVLGLSHSLVQTMQKYTILHTCSMLRGVLDGFSH

SEQ ID NO: 2146 - protein, 1193 aa, Hermetia illucens
MHHQKMRRRRNLRSGTDNRRESSDLVTGSGSRNGQHGVETASRGAVRRLGATTTRSTAPPAVAVSPQSVATTSAGSRRKRMKWTEEMNLFIIRSYYEITAGAGITSYRPLLHQRFVERFPQFAHVTVQRVADQYRFIIRSDTIPATIRERVRLEVIGETGDRESMGAEAAALTTPRRTAGNRFSTRRSTLLHRPAEVSAEVRDEFQRACIEFSDMDPLHRPGIPRLYASPATPGILSQINDEIASRLCADMSLLQLQSLVYCGAVAAIRLHGQKIRFRVIGLSDKRDPPWKIRLEHRRDSLRQDIARLIQISTGNASRRVRNKVQRVYRNYAIPCETPVVEILDTLKQKLSVICSRLPRYGESYSRRVQNATYARNQRSFFRSLNESQQSAQTIQFSVTEAKEYWGGLWGLPAQHAEHAEWITAEGTRHANTPGMIFADVTEEEVRRAINISKNWRGPGLDRVQNFWYKKFTSVHSRLARSINEVMSRPEEFPPFLTAGITYLIPKKDTVQDPADTRPITCLPTLYKFITSIISGRINAHLETNNILSEEQKGCRVGSRGCKEQLIIDSVVVGQATRGQRNLFSCYIDYAKAFDSVPHTWLIDILHLYRIDPKLIKFLATVMEGWHTTLSVRTSEGANTSEPIRIRRGIFQGDSLSPLWFCMALNPLSWPLNDARGHGFAIKYGLRAKCELTHLMYLDDIKLYAGTDNHLRSLLRIIDMFSRDIRMEFGLDKCRIQAIRKGHHEPHAGHSIGDLHIEAMTETDFYKYLGILQGTHARVGDLKEALLSEFLRRVKLVLKSHLSGKNKISALNVFAIPLLAYAFGILPWTKTDLENVQRRIRTTMSKFRMHHPKSAVERMNLPRDIGGRGVVDVAAQHHRQVDSLRAYFYSKEQASPLHAAVCKADCGLTPLNLKDRSFNPLSGVKSDQERIEEWKSKAMHGKHVNCLWQPFVDLHLSNRWLCAGELFAETEGFMCAIQDGVVATRAYKKLIMKERVENDQCRMCGSALETLDYLISGCTVMAPGQYITRHNAVCKVIHQNLAYKHGLITGTCPVYRYEPQAVLDSSAYSMYWDRQVLTDRHTAHNKPDVLLVDKTGRSAYIIDVAIPHNSNIERKYVEKKVNYEPLAREIKEIWRLERVVVVPIILSATGVVPKSLTASLDVLGLSHSLVQTMQKYTILHTCWMLRGVLDGFSH

SEQ ID NO: 2147 - protein, 759 aa, Hermetia illucens
MNSADVTEEGVRRAINSSKNWRGPGLDRVQNFWYKKFTSVHSRLARSINEVMSRPEEFPPFLTAGITYLIPKKDTVQHPADTRPITCLPTLYKFITSIISGRINAHLETNNILSEEQKGCRVGSRGCKEQLIIDSVVVGQATRGQRNLFSCYIDYAKAFDSVPHTWLIDILHLYRIDPKLIKFLATVMEGWHTTLSVRTSEGANTSEPIRIRRGIFQGDSLSPLWFCMALNPLSWLLNDARGHGFAIKYGLRAKCELTHLMYLDDIKLYAGTDNHLRSLLRIIDMFSRDIRMEFGLDKCRIQAIRKGHHEPHAGHSIGDLHIEAMTETDFYKYLGILQGTHGRVGDLKEALLSEFPRRVKLVLKSHLSGKNKISALNVFAIPSLAYAFGILPWTKTDLENVQRRIRTTMSKFRMHHPKSAVERMNLPRDIGGRGVVDVAAQHHRQVDSLRAYFYSKEQASPLHAAVCKADCGLTPLNLKDRSFNPLSGVKSDQERIEEWKSKAMHGKHVNCLWQPFVDLHLSNRWLCAGELFAETEGFMCAIQDGVVATRAYKKLIMKERVENDQCRMCGSALETLDHLISGCTVMAPVQYITRHNAVCKVIHQNLAYKHGLIAGTCPVYRYEPQAVLDSSAYSMYWDRQVLTDRHTAHNKPDVLLVDKTGRSAYIIDVAIPHNSNIERKYVEKKVNYEPLAREIKEIWRLERVVVVPIILSATGIVPKSLTASLDVLGLSHSLVQTMQKYTILHTCSMLRGVLDGFSH

SEQ ID NO: 2148 - protein, 1135 aa, Hermetia illucens
MPAAAVSPQSVATTSAGSRRKRMKWTEEMNLFIIRSYYEITAGASITSYRPLLHQRFVERFPQFAHVTVQRVADQYRFITRSDTIAATIRERVRLEVIGETGDRESMGAEAAASTTPRRTAGNRFSTRRSTLLHRPAEVSAEVRDEFQRACIEFSDMDPLHRPGIPRLYASPATPGILSQINDAIASRLCADMSLLQLQSLVYCGAVAAIRLHGQKIRFRVIGLSDKRDPPWKIRLERRRDSLRQDIARLIQISTGNASRRVRNKVQRVYRNYAIPCETPVVEILDTLKQKLSVICSRLRRYGESYSRRVQNATYARNQRSFFRSLNESQQSAQTIQFSVTEAKEYWGGLWGLPAQHAEHAEWITAEGTRHANTPGMNFADVTEEEVRRAINISKNWRGPGLDRVQNFWYKKFTSVHSRLARSINEVMSRPEEFPPFLTAGITYLIPKKDTEQDPADTRPITCLPTLYKFITSIISGRINAHLETNNILSEEQKGCRVGSRGCKEQLIIDSVVVGQATRGQRNLFSCYIDYAKAFDSVPHTWLIDILHLYRIDPKLIKFLATVMEGWHTTLSVRTSEGANTSEPIRIRRGIFQGDSLSPLWFCMALNPLSWLLNDARGHGFAIKYGLRAKCELTHLMYLDDIKVYAGTDNHLRSLLRIIDMFSRDIRMEFGLDKCRIQAIRKGHHEPHAGHSIGDLHIKAMTETDFYKYLGILQGTHARVGDLKEALLSEFLRRVKLVLKSHLSGKNKVSALNVFTIPSLSYAFGILPWTKTDLENVQRRIRTTMSKFRMHHPKSAVERMNLPRDIGGRGVVDVAAQHHRQVDSLRAYFYSKEQASPLHAAVCKADCGLTPLNLKDRSFNPLSGVKSDQERIEEWKSKAMHGKHVNCLWQPFVDLHLSNRWLCAGELFAETEGFMCAIQDGVVATRAYKKLIMKERVENDQCRMCGSALETLDHLISGCTVMAPVQYITRHNAVCKIIHQNLAYKHGLITGTCPVYRYEPQAVLDSSAYSIYWDRQVLTDRHTAHNKPDVLLVDKTGRSAYIIDVAIPHNSNIERKYVEKKVNYEPLAREIKEIWRLERVVVVPIILSATGIVPKSLTASLDVLGLSHSLVQTMQKYTILHTCSMLRGVLDGFSH

SEQ ID NO: 2149 - protein, 979 aa, Hermetia illucens
MDPLHRSGIPRLYASPATPGILSQINDEIASRLCADMSLLQLQSLVYCGAVAAIRLHGQKIRFRVIGLSDKRDPPWKIRLERRRDSLRQDIARLIQISTGNASRRVRNKVQRVYRNYAIPCETPVVEILDTLKQKLSVICSRLRRYGESYSRRVLNATYARNQRSFFRSLNESQQSAQTIQFSVTEAKEYWGGLWGLPAQHAKHAEWITAEGTRHANTPGMNFADVTEEEVRRAINISKNWRGPGLDRVQNFWYKKFTSVHSRLARSINEVMSRPEEFPPFLTAGITYLIPKKDTVQDPADTRPITCLPTLYKFITSIISGRINAHLETNNILSEEQKGCRVGSRGCKEQLTIDSVVVGQATRGQRNLFSCYIDYAKAFDSVPHTWLIDILHLYRIDPKLIKFLATVMEGWHTTLSVRTSEGANTSEPIRIRRGIFQGDSLSPLWFCMALNPLSWLLNDARGHGFAIKYGLRAKCELTHLMNLDDIKLYAGTDNHLRSLLRIIDMFSRDIRMEFGLDKCRIQAIRKGHHEPHAGHSIGDLHIEAMTETDFYKYLEILQGTHARVGDLKEALLSEFLRRVKLVLKSHLSGKNKISALNVFAIPSLAYAFGILPWTKTDLENVQRRIRTTMSKFRMHHPKSAVERMNLPRDIGGRGVVDMAAQHHRQVESLRAYFYSKEQASPLHAAVCEADCGLTPLNLKDRSFNPLSGVKSDQERIEEWKSKAMHGKHVNCLWQPFVDLHLSNRWLCAGELFAETEGFMCAIQDGVVATRAYKKLIMKERVENDQCRMCGSALETLDHLISGCTVMAPVQYITRHNAVCKVIDQNLAYKHGLITGTCPVYRYEPQAVLDSSAYSMYWDRQVLTDRHTAHNKPDVLLVDKTGRSAYIIDVAIPLNSNIERKYVEKKVNYEPLAREIKEIWHLERVVVVPIILSATGIVPKSLTASLDVLGLSHSLVQSMQKYTILHTCSMLRRVLDGFSH

SEQ ID NO: 2150 - protein, 1183 aa, Hermetia illucens
MRRRRNLRSGKDNRQESSDLVTGSGSRNGQHGVETASRGAVRCLGATTIRSTAPPVAAVSPQPVATTSAGSRRKRMKWTEEMNLFIIRSYYEITAGAGTTSYRPLLHQRFVERFPQFAHVTVQRVADQYRFITRSDTIPATIRERVRLEVIGETGDRESMGAEAAASTTPRRTAGNRFSTRRSTLLHRPVEVSAEVRDEFQRACIEFSDMDPLHRPGIPRLYASPATPGILSQINDEIASRLCADMSLLQLQSLVYCGAVAAIRLHGQKIRFRVIGLSDKRGPPWKIRLERRRDSLRKDIARLIQISTGNASRRVRNKVQRVYPCETPVVEILDTLKQKLSVICSRLRRYGDSYSRRVQNATHARNQRSFFRSLNESQQSAQTIQFSVTEAKEYWGGLWGLPAKHAEHAEWITAEGTRHANTPGMNFADVTEEEVRRAINSSKNWRGPGLDRVQNFWYKKFTSVHSRLARSINEVMSRPEEFPPFLTGGITYLIPKKDTVQDPADTRPITCLPTLYKFITSIISGRINAHLETNNILSEEQKGCRVGSRGCKEQLIIDSVVVGQATRGQRNLFSCYIEYAKAFDSVPHTWLIDILHLYRIDPKLIKFLATVMEGWHTTLSVRTSESANTSEPIRIRRGIFQGDSLSPLWFYMALNPLSWLLNDARGHGFAIKYGLRAKCQLTHLMYLDDIKLYAGTDNHLRSLLRIIDMFSRDIRMEFGLDKCRIQAIRKGHHEPHAGHSIGDLHIEAMTETDFYKYLGILQGTHARVGDLKEALLSEFLRRVKLVLKSHLSGKNKISALNVFAIPSLAYAFGILPWTKTDLENVQRRIRTTMSKFRMHHPKSAVERMNLPRDIGGRGVVDVAAQHHRQVDSLRAYFYSKEQTSPLHAAVCKADCGLTPLNLKDRSFNPLSGVKLDQERIEEWKSKAMHGKHVNCLRQPFVDLHLSNRWLCAGELFAETEGFMCAIQDGVVATRAYRKLIMKERVENDQCRMCGSALETLDHLISACTVMAPVQYITRNNAVCKVIHQNLVYKHGLITGTCPVYRYEPQAVLDSSAYSMYWDRQVLTDRHTAHNKPDVLLVDKTGRSAYIIDVAIPHNSNIERKYVEKKVNYEPLAREIKEIWLLERVVVVPIILSATGIVPKSLTASLDVLGLSHSLVQTMQKYTILHTCSMLRGVLDGFSH

SEQ ID NO: 2151 - protein, 1113 aa, Hermetia illucens
MKWTEEMNLFIIRSYYEITAGAGTTSYRPLLHQRFVERFPQFAHVTVQRVADQYRFITRSDTIPATIRERVRLEVIGETGDRESMGAEAAASTTPRRTAGNRFSTRRSTLLHRPAEVSAEVRDEFQRACIEFSDMDPLHRPGIPRLYASPATPGILSQINDEIASRLCADMSLLQLQSLVYCGAVAAIRLHGQKIRFRVIGLSDKRDPPWKIRLERRRDSLRQDIARLIQISTGNASRRVRNKVQRVYRNYAIPCETPVVEILDTLKQKLSVICSRLRRYGESYSRRVQNATYARNQRSFFRSLNESQQSAQTIQFSVTEAKEYWGGLWGLPAQHAQHDEWITAEGTRHANTPGMNFADVTEEEVRRAINISKNWRGPGLDRVQNFWYKKFTSVHSRLARSINEVMSRPEEFPPFLTAGITYLIPKKDTVQDPADTRPIACLPTLYKFITSIISGRINAHLETNNILSEEQKGCRVGSRGCKEQLIIDSVVVGQATRGQRNLFSCYIDYAKAFDSVPHTWLIDILHLYRIDPKLIKFLATVMEGWHTTLSVRTSEGANTSEPIRIRRGIFQGDSLSPLWFCMALNPLSWLLNDARGHGFAIKYGLRAKCELTHLMYLDDIKLYAGTDNHLRSLLRIIDMFSRDIRMEFGLDKCRIQAIRKGYHEPHAGHSIGDLHIEAMTETDFYKYLGILQGTHARVGDLKEALLSEFLRRVKLVLKSHLSGKNKISALNVFAIPSLAYAFGILPWTKTDLENVQRRIRTTMSKFRMHHPKSAVERMNLPRDIGGRGVVDVAAQHHRQVDSLRAYFYSKEQASPLHAAVCKADCGLTPLNLKDRSFNPLSGVKSDQERIEEWKSKAMHGKHVNCLWQPFVDLHLSNRWLCAGELFAETEGFMCAIQDGVVATRAYKKLIMKERVENDQCRMCGSALETLDHLISGCTVMAPVQYITRHNAVCKVIHQNLAYKHGLITGTCPVYRYEPQAVLDSSAYSMYWDRQVLTDRHTAHNKPDVLLVDKTGHSAYIIDVAIPHNSNIERKYVEKKVNYEPLAREIKEIWRLERVVVVPIILSATGIVPKSLTASLDVLGLSHSLVQTMQKYTILHTCSMLRGVLDGFSH

SEQ ID NO: 2152 - protein, 1113 aa, Hermetia illucens
MKWTEEMNLFIIRSYYEITAGAGITPYRPLLHQRFVERFPQFAHVTVQRVADQYRFITRSDTIPATIRERVRLEVIGETGDRESMGAEAAASTTPRRTAGNRFSTRRSTLLHRPAEVSAEVRDEFQRACIEFSDMDPLHRPGIPRLYASPATPGILSQINDEIASRLCADMSLLQLQSLVYCGAVAAIRLHGQKIRFRVIGLSDKRDPPWKIRLERRRDSLRQDIARLIQISTGNASRRVRNKVQRVYRNYAIPCETPVVEILDTLKQKLSVICSRLRRYGESYSRRVQNATYPRNQRSFFRSLNESQQSTQTIQFSVTEAKEYWGGLWGLPAQHAEHAEWITAEATCHANTPGMNFADVTEEEVRRAINISKNWRGPGLDRVQNFWYKKFTSVHSRLARSINEIMSRPEEFPPFLTAGITYLIPKKDTVQDPADTRPITCLPTLYKFITSIISGRINAHLETNNILSEEQKGCRIGSRGCKEQLIIDSVVVGQATRGQRNLFSCYIDYAKAFDSVPHTWLIDILHLYRIDPKLIKFLATVMEGWHTTLSVRTSEGANTSEPIRIRRGIFQGDSLSPLWFCMALNPLSWLLNDARGHGFAIKYGLRAKCELTYLMYLDDIKVYAGTDNHLRSLLRIIDMFSRDIRMEFGLDKCRIQAIRKGHHEPHAGHSIGDLHIEAMTETDFYKYLGILQGTHARVGDLKEALLSEFLRRVKLVLKSHLSGKNKISALNVFAIPPLAYAFGILPWTKTDLENVQRRIRTTMSKFRMHHPKSAVERMNLPRDIGGRGVVDVAAQHHRQVDSLRAYFYSKEQASPLHAAVCKADCGLTPLNLKDRSFNPLSGVKSDQERIEEWKSKAMHGKHVNCLWQPFVDLHLSNRWLCAGELFAETEGFMCAIQDGVVATRAYKKFIMKERVENDQCRMCGSALETLDHLISGCTVMAPVQYITRHNAVCKVIHQNLAYKHGLITGTCPVYRYEPQAVLDSSAYSMYWDRQVLTDRHTAHNKPDVLLVDKTGRSAYIIDVAIPHNSNIERKYVEKKVNYEPLAREIKEIWRLERVVVVPIILAATGIVPKSLTASLDVLGLSHSLVQTMQKYTILHTCSMLRGVLDGFSH

SEQ ID NO: 2153 - protein, 1202 aa, Hermetia illucens
MRRRRNLRSGTDNRRESSDLVTGSGSRNGQHIVETASRGAVRRLGATTIRSTAPPAAAVSLQSVATTLAGSRRKRMKWTEEMNLFIIRSYYEITAGLGTTSYRPLLHQRFVERFPQFAHVTVQRVADQYRFITRSDTIPAIIRECVRLEVIGETGDRESMGAEAAASTTPRRTAGNRLSTRRSTLLHRPAEVSTEVRDEFQRACMEFSDMDPLHRPGIPRLYASPATPGTLSQINDEIASRLCADMSLLQLQSLVYCGAVTAIRLHGQKIRFRVIGLSDKRDPPWKIRLERRRDSLRQDIARLIQISTGSASRRVRNKVLRVYRNYAIPCETPVVEILDTLKQKLSVICSRLTRYGESYSRRVQNATYARNQRSFFTSLNESQQSAQTIQFSVTEAKEYWGGLWGLPAQHAEHAEWITAEFTRHANTPGMNFADVTEEEVRRAINSSKNWRGPGLDRVQNFWYKKFTSVHSRLARSINKVISRPEEFPPFLTAGITYLIPKKDTVQDPADTRPITCLPTLYKFITSIISGRINAHLETNNILSEEQRGCRVGSRGCKEQLIIDSVVVGQATRGQRNLFSCYIDYAKAFDSVPHTWLIDILHLYRIDPKLIKFLATVMEEWHTTLSVRTSEGANTSEPIRIRRGIFQGDSLSPLWFCMALNPLSWLLNDARRHDFAIKYGLRAKCELTHLMYLDDIKLYAGTDDHLRSLLRIIDMFSRDIRMEFGLDKCRIQAIRKGHHEPHAGHSIGDLHIEAMTETDFYKHLRILQGTHARVGDLKEALLSEFLRRVKLVLKSHLSGKNKISALNVFAIPSLAYAFGILPWTKTDLENVQRRIRTTMSKFRMHHPKSAVERMNLPRDIGGKGVVDMAAQHHRQVDSLCAYFYSKEQASPLHAAVCKADCGLTPLNLKDRTFNRLSGVKSDQERIDEWKSKAMHGKHVNCLWQPFVDLHLSNRWLCARELFAETEGFMCAIQDGVVATRAYKKLIMKERVENDQCRMCGSALETLDHLISGCTVMAPVQYITRHNAVCKVIHQNLAYKHGLITGTCPVYRYEPQAVLDSSAYSMYWDRQVLTDRHTAHNKPDIVLVDKTGRSAYIIDVAIPHNSNIERKYVEKKVNYEPLAREIKEIWRLERVVVVPIILSATGIVPKSLTASLDVLGLSHSLVQTMQKYTILHTCSMLRGVLDGFSHSPTTGHHHQCPFSF

SEQ ID NO: 2154 - protein, 1188 aa, Hermetia illucens
MRRKRNLRSGTDNRRESSDLVTGSGSRNGQHGVETASRGAVRRLGATTTRSTAPPAAAVSPQSVATTSAGSRRKRMKWTEEMNLFIIRSYYEITAGAGTTSYRPLLHQRFVERFPQFAHVTVQRVADQYRFITRSDTIPATIRERVRLEVIGETGDRESMGAEAAASTTPRRTAGNRFSTRRSTLLHRPAEVSAEVRDEFQRACIEFSDMDPLHRPGIPRLYASPATPGILSQINDEIASRLCADMSLLQLQSLVYCGAVAAIRLHGQKIRFRVTGLSDKRDPPWKIRLERRRDSLRQDIARLIQISTGNASRRVRNKVQRVYRNYAIPCETPVVEILDTLKQKLSVICSRLRRYGESYSRRVQNATYARNQRSFFRSLNESQQSAQTIQFSVTEAKEYWGGLWGLPAQHAEHAEWITAEGTRHANTPGMNFADVTEEEVRRAINISKNWRGPGLDRVQNFWYKKFTSVHSRLARSINEVMSRPEEFPPFLTAGITYLIPKKDTVQDPADTRPITCLPTLYKFITSIISGRINAHLETNNILSEEQKGCRVGSRGCKEQLIIDSVVVGQATRGQRNLFSCYIDYAKAFDSVPHTWLIDILHLYRIDPKLIKFLATVMEGWHTTLSVRTSEGANTSEPIRIRRGIFQGDSLSPLWFCMALNPLSWLLNDARGHGFAIKYGLRAKCELTHLMYLDDIKLYAGTDNHLRSLLRIIDMFSRDIRMEFGLDKCRIQAIRKGHHEPHAGHSIGDLHIEAMTETDFYKYLGILQGTHARVGDLKETLLSEFLRRVKLVLKSHLSGKNKISALNVFAIPSLAYAFGILPWTKTDLENVQRRIRTTMSKFRMHHPKSAVERMNLPRDIGGRGVVDVAAQHHRQVDSLRAYFYSKEQASPLHAAVCKADCGLTPLNLKDRSFNPLSGVKSDQERIEEWKSKAVHGKHVNCLWQPFVDLHLSNRWLCAGELFAETEGFMCAIQDGVVATRAYKKLIMKERVENDQCRMCGSALETLDHLISGCTVMAPVQYITRHNAVCKVIHQNLAYKHGLITGTCPVYRYEPQAVLDSSAYSMYWDRQVLTDRHTAHNKPDVLLVDKTGRSAYIIDVAIPHNSNIERKYVEKKVNYEPLAREIKEIWRLERVVVVPIILSATGIVPKSLTASLDVLGLSHSLVQTMQKYTILHTCSMLRGVLDGFSH

SEQ ID NO: 2155 - protein, 1193 aa, Hermetia illucens
MHHQKMRRRRNLRSGTDNRRESSDLVTGSGSRNGQHGVETASHGAVRRLGATTTRSTAPPAAAVSPQSVATTSAGSRRKRMKWTEEMNLFIIRSYYEITAGAGTTSYRPLLHQRFVERFPQFAHVTVQRVADQYRFITRSDTIPATIRERVRLEVIGETGDRESMGAEAAASTTPRRTAGNRFSTRRSTLLHRPAEVSAEVRDEFQRACIEFSDMDPLHRPGIPRLYASPATPGILSQINDEIASRLCADMSLLQLQSLVYCGAVAAIRLHGQKIRFRVIALSDKRDPPWKIRLERRRDSLRQDIARLIQISTGNASRRVRNKVQRVYRNYAIPCETPVVEILDTLKQKLSVICSRLRRYGESYSRRVQNATYARNQRSFFRSLNESQQSAQTIQFSVTEAKEYWGGLWGLPAQHAEHAEWITAEGTRHANTPGMNFADVTEEEVRRAINISKNWRGPGLDRVQNFWYKKFTSVHSRLAHSINEVMSRPEEFPPFLIAGITYLIPKKDTVQDPADTRPITCLPTLYKFITSIISGRINAHLETNNILSEEHKGCRVGSRGCKEQLIIDSVVVGQATRGQRNLFSCYIDYAKAFDSVPHTWLIDILHLYRIHPKLIKFLATVMEGWHTTLSVRTSEGANTSKPIRIRRGIFQGDSLSPLWFCMALNPLSWLLNDARGHGFAIKYGLRAKCELTHLMYLDDIKLYAGTDNHLRSLLRIIDMFSRDIRMEFGLDKCRIQAIRKGHHEPHAGHSIGDLHIEAMTETDFYKYLGILQGTHARVGDLKEALLSEFLRRVKLVLKSHLSGKNKISALNVFAIPSLAYAFGILPWTKTDLENVQRRIRTTMSKFRMHHPKSAVERMNLPRDIGGRGVVDVAAQHHRQVDSLRAYFYSKEQASPLHAAVCKADCGLTPLNLKDRSFNPLSGVKSDQERIEEWKSKAMHGKHVNCLWQPFVDLHLSNRWLCAGELFAETEGFMCAIQDGVVATRAYKKLIMKERVENDQCRMCGSALETLDHLISGCTVMAPVQYITRHNAVCKVIHQNLAYRHGLITGTCPVYRYEPQAVLDSSAYSMYWDRQVLTDRHTAHNKPDVLLVDKTGRSAYIIDVAIPHNSNIERKYVEKKVNYEPLAREIKEIWRLERVVVVPIILSATGIVPKSLTASLDVLGLSHSLVQTMQKYTILHTCSMLRGVLDGFSH

SEQ ID NO: 2156 - protein, 1190 aa, Hermetia illucens
MHHQKMRRRRNLWSGTDNRRESSDLVTGSGSRNGQHGVETASRGAVRRLGATTTRSTAPPAAAVSPQSVATTSAGSRRKRMKWTEEMNLFIIRSYYEITAGAGTTSYRPLLHQRFVERFPQFAHVTVQRVADQYRFITRSDTIPATIRERVRLEVIGETGDRESMGAEAAASTTPRRTAGNRFSTRRSTLLHRPAEVSAEVRDEFQRACIEFSDMDPLHRPGIPRLYASPATPGILSQINDEIASRLCADMSLLQLQSLVYCGAVAAIRLHGQKIRFRVIGLSDKRDPPWKIRLERRRDSIRQDIARLIQISTGNASRRVRNKVQRVYRNYAIPCETSVVEILDTLKQKLSVICSRLRRYGESYSRRVQNATYAGNQRSFFRSLNESQQSAQTIQFSVTEAKEYWGGLWGLPAQHAEWFTAEGTRHANTPGMNFADVTEEEVRRAINISKNWRGPGLDRVQNFWYKKFTSVHSRLARSINEVMSRPEEFPPFLTAGITYLIPKKDMVQDPADTRPINCLPTLYKFITSIISGRINEHLETNNILSEEQKGCRVGSRGCKEQLIIDSVVVGQATRGQRNLFSCYIDYAKAFDSVPHTWLIDILHLYRIDPKLIKFLATVMEGWHTTLSVRTFEGANTSEPIRIRRGIFQGDSLSPLWFCMALNPLSWLLNDARGHGFAIKYGLRAKCELTHLMYLDDIKLYAGTDNHLRSLLRIIDMFSRDIRMEFGLDKCQIQAIRKGHHEPHAGHSIGDLHIEAMTETDFYKYLGILQGTHARVGDLKEALLSEFLRRVKLVLKSHLSGKNKISALNVFAIPSLAYAFGILPWTKTDLENVQRRIRTTMSKFRMHHPKSAVERMNLPRDIGGRGVVDVAAQHHRQVDSLRAYFYSQEQASPLHAAVCKADCGLTPLNLKDRSFNPLSGVKSDQERIEEWKSKAMHGKHVNCLWQPFVDLHLSNRWLCAGELFAETEGFMCAIQDGVVATRAYKKLIMKERVENDQCRMCGSALETLDHLISGCTVMAPVQYITRHNAVCKVIHQNLPYKHGLIAGTCPVYRYEPQAVLDSSAYSMYWDRQVLTDRHTAHNKPDVLLVDKTGRSAYIIDVAIPHNSNIERKYVEKKVNYKPLAREIKEIWRLERVVVVPIILSATGIVPKSLTASLDVLGLSHSLVQTMQKYTILHTCSMLRGVLDGFSH

SEQ ID NO: 2157 - protein, 1193 aa, Hermetia illucens
MHHQKMRRRRNLRSGTDNRRESSDLVTGSGSRNGQHGVETASRGAVRRLGATTTRSTAPPAVAVSPQSVATTSAGSRTKRMKWTEEMNLFIIRSYYEITAGAGTTSYRPLLHQRFVEHFPQFAHVTVQRVADQYRFITRSDTIPATIRERVRLEVIGETGDRESMGAEAAASTTPRRPAGNRFSTRRSTLLHRPAEVSAEVRDEFQRACIEFSDMDPLHRPGIPRLYASPATPGILSQINDEIASRLCADMSLLQLQSLVYCGAVAAIRLHGQKIRFRVIGLSDKRDPPWKIRLERRRDSLRQDIARLIQISTGNASRRVRNKVQRVYRNYAIPCETPVVEILDTLKQKLSVICSRLRRYGESYSRRVQNATYARNQRSFFRSLNESQQSAQTIQFSVTEAKEYWGGLWGLPAQHAEHAEWITAEGTRHANTPGMNFADVTEEEVRRAINISKNWRGPGLDRMQNFWYKKFTSVHSRLARSINEVISRPEEFPPFLTAGITYLIPKKDTVQDPADTRQITCLPTLYKFITSIISGRINAHLETNNILSEEQKGCRVGSRGCKEQLIIDSVVVGQATRGQRNLFSCYIDYAKAFDSVPHTWLIDILHLYRIDPKLIKFLATVMEGWHTTLSVRTSEGANTSEPIRIRRGIFQGDSLSPLWFCMALNPLSWLLNDARGHGFAIKYGLRAKCELTHLMYLDDIKVYAGTDNHLRSLLRIIDMFSRDIRMEFGLDKCRIQAIRKGHHEPHAGHSIGDLHIEAMTETDFYKYLGILQGTHARVGDLKEALLSEFLRRVKLVLKSHLSGKNKISALNVFAIPSLAYAFGILPWTKTDLENVQRRIRTTMSKFRMHHPKSAVERMNLPRDIGGRGVVDVAAQHHRQVDSLRAYFYSKEQASPLHAAVCKADCGLTPLNLKDRSFNPLSGVKSDQERIEEWKSKAMHGKHENCLWQPFVDLHLSNRWLCAGELFAETEGFMCAIQDGVVATRAYKKLIMKERVENDQCRMCGSALETLDHLISGCTVMAPVQYITRHNAVCKVIHQNLAYKHGLITGTCPVYRYEPQAVLDSSACSMYWDRQVLTDRHTAHNKPDVLLVDKTGRSAYIIDVAIPHNSNIERKYVEKKVNYEPLAREIKEIWRLERVVVVPIILSATGIVPKSLTASLDVLGLSHSLVQTMQKYTILHTCSMLRGVLDRFSH

SEQ ID NO: 2158 - protein, 1193 aa, Hermetia illucens
MHHQKMRRRRNLRAGTDNRRESSDLVTGSGSRNGQHGVETASRGAVRRLGATTTRSTAPPAATVSPQPVATTSAGSRRKRMKWTEEMNLFIIRSYYEITAGAGTTSYRPLLHQRFVERFPQFAHVTVQRVADQYRFITRSDTIPATIRERVRLEVIGETGDRESMGAEAAASTTPRRTAGNRFSTRRSTLLHRPAEVSAEVRDEFQRACIEFSDMDPLHRPGIPRLYASPATPGILSQINDEIASRLCADMSLLQLQSLVYCGAVAAIRLHGQKIRFRVIGLSDKRDPPWKIRLEHRRDSLRQDIARLIQISTGNASRRVRNKVQRVYRNYAIPCETPVVEILDTLKQKLSVICSRLRRYGESYSRRVQNATYARNQRSFFRSLNESQQSAQTIQFSVTEAKEYWGGLWGLPAQHAEHAEWITAEGTRHANTPGMNFVDDTEEEVRRAINISKNWRGPGLDRVQNFWYKKFTIVHSRLARSINEVMSRPEEFPPFLTARITYLIPKKDTVQDPADTRPITCLPTLYKFITSIISGRINAHLETNNILSEEQKGCRVGSRGCKEQLIIDSVVVGQATRGQRNLFSCYIDYAKAFDSVPHTWLIDILHLYRIDPKLIKLLATVMEGWHTTLSVRTSEGANTSEPIRIRRGIFQGDSLSPLWFCMALNPLSWLLNDARGHGFAIKYGLRAKCELTHLMYLDDIKLYAGTDNHLRSLLRIIDMFSRDIRMEFGLDKCRIQAIRKGHHEPHAGHSIGDLHIEAMTETDFYKYLGILQGTHARVGDLKEALLSEFLRRVKLVLKSHLSGKNKISALNVFAIPSLAYAFGILPWTKTDLENVQRRIRTTMSKFRMHHPKSAVERMNLPRDIGGRGVVDVAAQHHRQVDSLRAYFYSKEQASPLHAAVCKADCGLTPLNLKDRSFNPLSGVKSDQERIEEWKSKAMHGKHVNCLWQPFVDLHLSNRWLCAGELFADTEGFMCAIQDGVVATRAYKKLIMKERVENDQCRMCGSALETLDHLISGCTVMAPVQYITRHNAVCKVIHQNLAYNHGLITGTCPVYRYEPQAVLDSSAYSMYWDRQVLTDRHTAHNKPDVLLVDKTGRSAYIIDVAIPHNSNIERKYVEKKVNYEPLAREIKEIWRLERVFVVPIILSATGIVPKSLTASLDVLGLSHSLVQTMQKYTILHTCSMLRGVLDGFSH

SEQ ID NO: 2159 - protein, 1188 aa, Hermetia illucens
MRRRRNLRSGTDNRRESSDLVTGSGSRNGQHGVETASRGAVRRLGATTTRSTAPPAAAVSPQPVATTSAGSRRKRMKWTEEMNLFIIRSYYEITAGAGTTSYRPLLHQRFVERFPQFAHVTVQRVADQYRFITRSDTIPATIRECVRLEVIGETGDRESMGAEAAASTTPRRTAGNRFSTRRSTLLHRPAEVSAEVRDEFQRACIEFSDMDPLHRPGIPRLYASPATPGILSQINDEIASRLCADMSLLQLQSLVYCGAVAAIRLHGQKIRFRVIGLSDKRDPPWKIRLERRRDSLRQDIARLIQISTGNASRRVRNKVQRVYRNYAIPCETPVVEILDTLKQKLSVICSRLRRYGESYSRRVQNATYARNQRSFFRSLNESQQSAQTIQFSVTEAKEYWGGLWGLPAQHAEHAEWITAEGTRHANTPGMNFADVTEEEVRRAINSSKNWRGPGLDRVQNFWYKKFTSVHSRLARSINEVMSRPEEFPPFLTAGITYLIPKKDTVQDPADTRPITCLPTLYKFITSIISGRINAHLETNNILSEEQKGCRVGSRGCKEQLIIDSVVVGQATRGQRNLFSCYIDYAKAFDSVPHTWLIDILHLYRIDPKLIKFLATVMEGWHTTLSVRTSEGANTSEPIRIRRGIFQGDSLSPLWFCMALNPLSWLLHDARGHGFAIKYGLRAKCELTHLMYLDDIKLYAGTDNHLRSLLRIIDMFSRDIRMEFGLDKCRIQAIRKGHHEPHAGHSIGDLHIEAMTETDFYKYLGILQGTHARVGDLKEALLSEFLRRVKLVLKSHLSGKNKISALNVFAIPSLAYAFGILPWTKTDLENVQRRIRTTMSKFRMHHPKSAVERMNLPRDIGGRGVVDVAAQHHRQVDSLRAYFYSKEQASPLHAAVCKADCGLTPLNLKDRSFNPLSGVKSDQERIEEWKSKAMHGKHVNCLWQPFVDLHLSNRWLCAGELFAETEGFMCAIQDGVVATRAYKKLIMKERVENDQCRMCGSALETLDHLISGCTVMAPVQYITRHNAVCKVIHQNLAYKHGLITGTCPVYRYEPQAVLDSSVYSMYWDRQVLTDRHTAHNKPDVLLVDKTGRSAYIIDVAIPHNSNIERKYVEKKVNYEPLAREIKEIWRLERVVVVPIILSATGIVPKSLTASLDVLGLSHSLVQTMQKYTILHTCSMLRGVLDGFSH

SEQ ID NO: 2160 - protein, 1188 aa, Hermetia illucens
MRRRRNLRSGTDNRRESSDLVTGSGSRNGQHGVETASRGAVRRLGATTTRSTAPPAAAVSPQPVATTSAGSRRKRMKWTEEMNLFIIRSYYEITAGAGTTSYRPLLHQRFVERFPQFVHVTVQRVADQYRFITRSDTIPATIRERVRLEVIGETGDRESMGAEAAASTTSRRTAGNRFSTRRSTLLHRPAEVSAEVRDEFQRACIEFSDMDPLHRPGIPRLYASPATPGILSQINDEIASRLCADMSLLQLQSLVYCGAVAAIRLHGQKIRFRVIGLSDKRDPPWKIRLERRRDSLRQDIARLIQISTGNASRRVRNKVQRVYRNYAIPCETPVVEILDTLKQKLSVICSRLRRYGESYSRRVQNATYARNQRSFFRSLNESQQSAQTIQFSVTEAKEYWGGLWGLPAQHAEHAEWITAEGTRHVNTPGMNFADVTEEEVRRAINSSKNWRGPGLDRVQNFWYKKFTSVHSRLARSINEVMSRPEEFPPFLTAGITYLIPKKDTVQDPADTRPITCLPTLYKFITSIISGRINAHLETNNILSEEQKGCRVGSRGCKEQLIIDSVVVGQATRGQRNLFSCYIDYAKAFDSVPHTWLIDILHLYRIDPKLIKFLATVMEGWHTTLSVRTSEGANTSQPIRIRRGIFQGDSLSPLWFCMALNPLSWLLNDARGHGFAIKYGLRAKCELTHLMYLDDIKLYAGTDNHLRSLLRIIDMFSRDIRMEFGLDKCRIQAIRKGHHEPHAGHSIGDLHIEAMTETDFYKYLGILQGTHARVGDLKEALLSEFLRRVKLVLKSHLSGKNKISALNVFAIPSLAYAFGILPWTKTDLENVQRRIRTTMSKFRMHHPKSAVERMNLPRDIGGRGVVDVAAQHHREVDSLRAYFYSKEQASPLHAAVCKADCGLTPLNLKDRSFNPLSGVKSDQERIEEWKSKAMHGKHVNCLWQPFVDLHLSNRWLCAGELFAETEGFMCAIQDDVVATRAYKKLIMKERVENDQCRMCGSALETLDHLISGCTVMAPVQYITRHNAVCKVIHQNLAYKHGLITGTCPVYRYEPQAVLDSSAYSMYWDRQVLTDRHTAHNKPDVLLVDKTGRSAYIIDVAIPHNSNIERKYVEKKVNYEPLAREIKEIWRLERVVVVPIILSATGIVPRSLTASLDVLGLSHSLVQTMQKYTILHTCSMLRGVLDGFSH

SEQ ID NO: 2161 - protein, 1092 aa, Hermetia illucens
MHDKHVIQQYLIVLLTACIATGKFGLIAILHTSCFITRSGTIPTTIRERVRLEVIGETGDRESMGAEAATSTTPRRTAGNRFSTRRSTLLHRPAEVSAEVQDEFQRACIEFSDMDPLHRPGIPRLYASPATPGILSQINDEIASRLCADMSLLQLQSLVYCGAVAAIRLHGQKIRFRVIGLSDKRDPPWKIRLERRRDSLRQDIARLIHISTGNASRRVRNKVQRVYRNYAIPCETPVVEILDTLKQKLSVICSRLRRYGESYSRRVQNATYARNQQSFFRSLNESQQSAQTIQFSVTEAKEYSGGLWGLPAQHAEHAEWITAEGTRHANTPGMNFADVTEEEVRRAINISKNWRGPGLDRVQNFWYKKFTCVHSRLARSINEVMSRPEEFPPFLTAGITYLIPKKDTVQDPADTRPITCLPTLYKFITSIISGRINAHLETNNILSEEQKGCRVGSRGCKEQLIIDSVVVGQATRGQRNLFSCYIDYAKAFDSVPHTWLIDILHLYRIDPKLIKFLATVMEGWHTTLSVRTSEGANTSEPIRIWRGIFQGDSLSPLWFCMALNPLSWLLNDARGHGFAIKYGLRAKCELTHLMYLDDIKLYAGTDNHLRSLLRIIDMFSRDIRMEFGLDKCRIQAICKRHHEPHAGHSIGDLHIEAMTETDFYKYLGILQGTHARVGDLKEALLSEFLRRVKLVLKSHLSGKNKISALNVFAIPSLAYAFGILPWTKTDLENVQRRIRTTMSKFRMHHPKSAVERMNLPRDIGGRGVVDVAAQHHRQVDSLRAYFYSKEQANPLHAAVCKADCGLTQLNLKDRSFNPLSGVKSDQERIEEWKSKAMHGKHVNCLWQPFVDLHLSNRWLCAGELFAETEGFMCAIQDGVVATRPYKKLIMKERVENDQCRMCGSALETLDHLISGCTVMAPVQYITRHNAVCKVTHQNLAYKHGLITGTCPVYRYEPQAVLDSSAYSMYWDRQVLTDRHTAHNKPDVLLVDKTGRSAYIIDVAIPHNSNIERKYVEKKVNYEPLAREIKEIWRLERVVVVPIILSATGIVPKSLTASLDVLGLSHSLVQTMQKYTILHTCSMLRGILDGFSH

SEQ ID NO: 2162 - protein, 1193 aa, Hermetia illucens
MHHQKMRRRRNLRSGTDNRRESSDLVTGSGSRNGQHGVETASRGAVRRLGATTTRSTALPAAAVSPQSVATTSAGSRRKRMKWTEEMNLFIIRSYYEITAGAGTTSYRPLLHQRFVERFPQFAHVTVQRVADQYRFITRSDTIPATIRERVRLEVIGETGDRESMGAEAAASTTSRRTAGNRFSTRRSTLLHRPAEVSAEVRDEFQRACIEFSDMDPLHRPGIPRLYASPATPGILSQINDEIASRLCADMSLLQLQSLVYCDAVAAIRSHGQKIRFRVIGLSDQRDPPWKIRLERRRDSLRQDIARLIQISTGNASRRVRNKVQRVYRNYAIPCETPVVEILDTLKQKLSVICSRLRRYGESYSRRVQNATYARNQRSFFRSLNESQQSAQTIQFSVTEAKEYWGGLWGLPAQHAEHAEWITAEGTRHVNTPGMNFADVTEEEVRGAINSSKNWRGPGLDRVQNFWYKKFTSVHSRLARSINEVMSRPEEFPPFLTAGITYLIPKKDTVQDPADTRPITCLPTLYKFITSIISGRINAHLETNNILSEEQKGCRVGSRGCKEQLIIDSVVVGQATRGQRNLFSCYIDYAKAFDSVPHTWLIDILHLYRIDPKLIKFLATVMEGWHTTLSVRTSEGANTSEPIRIRRGIFQGDSLSPLWFCMALNPLSWLLNDASGHGFAIKYGPRAKCELTHLMYLDDIKLYAGTDNHLRSLLRIIDMFSRDIRMEFGLDKCRIQAIRKGHHEPHAGHSIGDLHIEAMTETDFYKYLGILQGTHARVGDLKEALLSEFLRRVKLVLKSHLSGKNKISALNVFAIPSLAYAFGILPWTKTDLENVQRRIRTTMSNFRMHHPKSAVERMNLPRDIGGRGVVDVAAQHHRQVDSLHAYFYSKEQASPLHAAVCKADCGLTPLNLKDRSFNPLSGVKSDQERIEEWKSKAMHGKHVNCLWQPFVDLHLSNRWLCAGELFAETEGFMCAIQDGVVATRAYKKLIMKERVENDQCRMCGSALETLDHLISGCTVMAPVQYITRHNAVCKVIHQNLAYKHGLITGTCPVYRYEPQAVLDSSAYSMYWDRQVLTDRHTAHNKPDVLLVDKTGRSAYIIDVAIPHNSNIERKYVEKKVNYEPLAREIKEIWRLERVVVVPIILSATGIVPKSLTASLDVLGLSHSLVQTMQKYTILHTCTMLRGVLDGFSH

SEQ ID NO: 2163 - protein, 1193 aa, Hermetia illucens
MHHQKMRRRRDLRSGTDNRRESSDLVTGSGSRNGQHGVETASRGAVRRLGATTTRSTAPPAAAVSPQSVATTSAGSRRKRMKWTEEMNLFIIRSYYEITAGAGTTSYRPWLHQRFVERFPQFAHVTVQRVADQYRFITRSDTIPATIRERVRLEVIGETGDRESMGAEAAASTTPRRTAGNRFSTRRSTLLHRPAEVSAEVRDEFQKACIEFSDMDPLHRPGIPRLYASPATPGILSQINDEIASRLCADMSLLQLQSLVYCGAVAAIRLHGQKIRFRVIGLSDKRDPPWKIRLERRRDSLRQDIARLIQISTGNASRRVRNKVQRVYQNYAIPCETPVVEILDTLKQKLSVICSRLRRYGESYSRRVQNATYARNQRSFFRSLNESQQSAQTIQFSVTEAKEYWGGLWGLPAQHAEHAEWITAEGTRHANTPGMNFADVTEEEVRRAINISKNWRGPGLDRVQNFWYKKFTSVHSRLARSINEVMSRPEEFPPFLTAGITYLIPKKDTVQDPADTRPITCLPTLYKFITSIISGRINAHLETNNILSEEQKGCRVGSKGCKEQLIIDSVVVGQATRGQRNLFSCYIDYAKAFDSVPHTWLIDILHLYRIDPKLIKFLATVMEGWHTTLSVRTSEGANTSEPIRIRRGIFQGDSLSPLWFCMALNPLSWLLNDARGHGFAIKYGLRAKCELTHLMYLDDIKLYAGTDNHLRSLLRIIDMFSRDIRMEFGLDKCRIQAIRKGHHEPHAGHSIGDLHIEAMTETDFYKYLGILQGTHARVGDLKEALLSEFLRRVKLVLKSHLSGKNKISALNVFAIPSLAYAFGILPWTKTDLENVQRRIRITMSKFRMHHPKSAVERMNLPRDIGGRGVVDVAAQHHRQVDSLRAYFYSKEQASPLHAAVCKADCGLTPLNLKDRSFNPLSGVKSDQERIEEWKSKAMHGKHVNCLWQPFVDLHLSNRWLCAGELFAETEGFMCAIQDGVVATRAYKKLIMKERVENDQCRMCGSALETLDHLISGCTVMAPVQYITRHNAVCKVIHQNLAYKHGLITGTCPVYRYEPQAVLDSSACSMYWDRQVLTDRHTAHNKPDVLLVDKTGRSAYIIDVAIPHNSNIERKYVEKKVNYEPLAREIKEIWRLERVVVVPIILSATGIVPKSLTASLDVLGLSHSLVQTMQKYTILHTCSMLRGVLDGFSH

SEQ ID NO: 2164 - protein, 1104 aa, Hermetia illucens
MGRKFCERLNIIIIITSYRPLLHQRFVERFPQFAHVTVQRVADQYRFITRSDTIPATIRERVRLEVIGETGDRESMGAEAAASTTPRRTAGNRFSTRRSTLLHRPAEVSAEVRDEFQRACIEFSDMDPLHRPGIPRLYASPATPGILSQINDEIASRLCADMSLLQLQSLVYCGAVAAIRLHGQKIRFRVIGLSDKRDPPWKIRLERRRDSLRQDIARLIQISTGNASRRVRNKVQRVYRNYAIPCETPVVEILDTLKQKLSVICSRLRRYGESYSRRVQNATYARNQRSFFRSLNESQQSAQTIQFSVTEAKEYWGGLWGLPAQHAEHAEWITAEGTRHANTPGMNFADVTEEEVRRAINISKNWRGPGLDRVQNFWYKKFTSVHSRLARSINEVMSRPEEFPPFLTAGITYLIPKKDTVQDPADTRPISCLPTLYKFITSIISGRINAHLETNNILSEEQKGCRVGSRGCKEQLIIDSVVVGQATRGQRNLFSCYIDYAKAFDSVPHTWLIDILHLYRIDPKLIKFLATVMEGWHTTLLVRTSEGANTSEPIRIRRGIFQGDSLSPLWFCMALNPLSWLLNDARGHGFAIKYGLRAKCELTHLMYLDDIKLYAGTDNHLRSLLRIIDMFSRDIRMEFGLDKCRIQAIRKGHHEPHAGHNIGDLHIEAMTETDFYKYLGILQGTHARVGDLKEALLSEFLRRVKLVLKSHLSGKNKISALNVFAIPSLAYAFGILPWTKTDLENVQRRIRTTMSKFRMHHPKSAVERMNLPRDIGGRGVVDVAAQHHRQVDSLRAYFYSKEQASLLHAAVCKADCGLTPLNLKDRSFNPLSGVKSDQERIEEWKSKAMHGKHVNCLWQPFVDLHLSNRWLCAGELFAETEGFMCAIQDGVVATRAYKKLIMKERVENDQCRMCGSALETLDHLISGCTVMAPVQYITRHNAVCKVIHQNLAYKHGLITGTCPVYRYEPQAVLDSSAYSMYWDRQVLTDRHTAHNKPDVLLVDKTGRSAYIIDVAIPHNSNIERKYVEKKVNYEPLAREIKEIWRLERVVVVPIILSATGIVPKSLMASLDVLGLSHSLVQTMQKYTILHTCSMLRGVLDGFSH

SEQ ID NO: 2165 - protein, 979 aa, Hermetia illucens
MDPLHRPGIPRLYASPATPGILSQINDEIASRLCADMSLLQLQSLVYCGAVAAIRLHGQKIRFRVIGLSDKRDPPWKIRLERRRDSLRQDIARLIQISTGNASRRVRNKVQRVYRNYAIPCETPVVEILDTLKQKLSVICSRLRRYGESYSRRVQNATYARNQRSFFRSLNESQQSAQTIQFSVTEAKEYWGGLWGLPAQHAEHAEWITAEGTRHANTPGMNFADVTEEEVRRAINISKNWRGPGLDRVQNFWYKKFTSVQSRLARSINEVMSRPEEFPPFLTAGITYLIPKKDTVQDPADTRPITCLPTLYKFITSIISGRINAHLETNNILSEEQKGCRVGSRGCKEQLIIDSVVVGQATRGQRNLFSCYIDYAKAFDSVPHTWLIDILHLYRIDPKLIKFLATVMEGWHTTLSVRTSEGANTSEPIRIRRGIFQGDSLSPLWFCMALNPLSWLLNDARGHGFAIKYGLRAKCELTHLMYLDDIKLYAGTDNHLRSLLRIIDMFSRDIRMEFGLDKCRIQAIRKGHHEPHAGHSIGDLHIEAMTETDFYKYLGILQGTHARVGDLKEALLSEFLRRVKLVLKSHLSGKNKISALNVFAIPSLAYAFGILPWTKTDLENVQRRIRTTMSKFRMHHPKSAVERMNLPRDIGGRGVVDVAAQHHRQVDSLRAYFYSKEQASPLHAAVCKADCGLTPLNLKDRSFNPLSGVKSDQERIEEWKSKTMHGKHVNCLWQPFVDLHLSNRWLCAGELFAETEGFMCAIQDGVVATRAYKKLIMKERVENDQCRMCGSALETLDHLISGCTVMAPVQYITRHNAVCKVIHQNLAYKHGLITGTCPVYRYEPQAVLDSSAYSMYWDRQVLTDRHTAHNKPDVLLVDKTGRSAYIIDVAIPHNSNIERKYVEKKVNYEPLAREIKEIWRLERVVVVPIILSATGIVPKSLTASLDVLGLSHSLVQTMQKYTILHTCSMLRGVLDGFSH

SEQ ID NO: 2166 - protein, 1193 aa, Hermetia illucens
MHHQKMRRRRNLRSGTDNRRESSDLVTGSGSRNGQHGVETASRGAVRRLGATTTRSTAPPAAAVSPQSVATTSAGSRRKRMKWTEEMNLFIIRSYYEITAGAGITSYRPLLHQRFVERFPQFAHVTVQRVADQYRFITRSDTIPATIRERVRLEVIGETGDRESMGAEAAASTTPRRTAGNRFSTRRSTLLHRPAEVSAEVRDEFQRACIEFSDMDPLHRPGIPRLYASPATPGILSQINDEIASRLCADMSLLQLQSLVYCGAVAAIRLHGQKIRFRVIGLSDKRDPPWKIRLERRRDSLRQDIARLIQISTGNASRRVRNKVQRVYRNYAIPCETPVVEILDTLKQKLSVICSRLRRYGESYSRRVQNATYARNQRSFFRSLNESQQSAQTIQFSMTEAKEYWGGLWGLPAQHAEHAEWITAEGTRHANTPGMNFADVTEEEVRRAINISKNWRGPGLDRVQNFWYKKFTSVHSRLARSINEVMSRPEEFPPFLTAGITYLIPKKDTVQDPADTRPITCLPTLYKFITSIISGRINAHLETNNILSEEQKGCRVGSRGCKEQLIIDSVVVGQATRGQRNLFSCYIDYAKAFDSVPHTWLIDILHLYRIDPKLIKFLATVMEGWHTTLSVRTSEGANTSEPIRIRRGIFQGDSLSPLWFCMALNPLSWLLNDARGHGFAIKYGLRAKCELTHLMYLDDIKVYAGTDNHLRSLLRIIDMFSRDIRMEFGLDKCRIQAIRKGHHEPHAGHSIGDLHIEAMTETDFYKYLGILQGTHARVGDLKEALLSEFLRRVKLVLKSHLSGKNKVSALNVFAIPSLAYAFGILPWTKTDLENVQRRIRTTMSKFRMHHPKSAVERMNLPRDIGGRGVVDVAAQHHRQVDSLRAYFYSKEQASPLHAAVCKADCGLTPLNLKDRSFNPLSGVKSDQERIEEWKSKAMHGKHVNCLWQPFVDLHLSNRWLCAGELFAETEGFMCAIQDGVVATRAYKKLIMKERVENDQCRMCGSALETLDHLISGCTVMAPVQYITRHNAVCKIIHQNLAYKHGLITGTCPVYRYEPQAVLDSSAYSMYWDRQVLTDRHTAHNKPDVLLVDKTGRSAYIIDVAIPHNSNIERKYVEKKVNYEPLAREIKEIWRLERVVVVPIILSATGIVPKSLTASLDVLGLSHSLVQTMQKYTILHTCSMLRGVLDGFSH

SEQ ID NO: 2167 - protein, 1193 aa, Hermetia illucens
MHHQKMRRRRNLRSGTDNRRESSDLVTGSGSRNGQHGVETASRGAVRRLGATTTRSTAPPAAAVSPQPVATTSAGSRRKRMKWTEEMNLFIIRSYYEITAGAGTTSYRPLLHQRFVERFPQFAHVTVQQVADQYRFITRSDTVPATIRERVRLEVIGKTGDRESMGAEAAASTTQRRTAGNRFSTRRSTLLHRPAEVSAEVRDEFQRACMEFSDMDPLHRPGIPRLYASPATPGVLSQINDEIASRLCADMSLLQLQSLVYCGAVAAIRLHGQKIRFRVIGLSDKRDPPWKIRLEHRRDSLRQDIARLIQISTGNASRRVRNKVQRVYRNYAVPCETPAVEILDTLKQKLSVICSRLRRYGESYSRRVQNATYARNQRSFFRSLNESQQSAQTIQFSVTEAKEYWGGLWGLPAQHAEHAEWITAEDTRHANTPGMNFADVTEEEVRRAINISKNWRGPGLDRVQNFWYKKFTSVHSRLARSINEVMSRPEEFPPFLTAGITYLIPKKDTVQDPADTRPITCLPTLYKFITSIISGRINAHLETNNILSEEQKGCRVGSRGCKEQLIIDSVVVGQATRGQRNLFSCYIDYAKAFDSVPHTWLIDILHLYRIDPKLIKFLATVMEGWHTTLSVRTSEGANTSEPIRIRRGIFQGDSLSPLWFCMALNPLSWLLNDARGHGFAIKYGLRAKCELTHLMYLDDIKLYAGTDNHLRSLLRIIDMFSRDIRMEFGLDKCRIQAIRKGHHEPHAGHSIGDLHIEAMTETDFYKYLGILQGTHARVGDLKEALLSEFLRRVKLVLKSHLSGKNKISALNVFAIPSLAYAFGILPWTKTDLENVQRRIRTTMSKFRMHHPKSAVERMNLPRDIGGRGVVDVAAQHHRQVDSLRAYFYSKEQASPLHAGVCKEDCGLTPLNLKDRSFNPLSGVKSDQERIEEWKSKAMHGKHVNCLWQPFVDLHLSNRWLCAGEFFAETEGFMCAIQDGVVATRAYKKLIMKERVENDQCRMCGSALETLDHLISGCTVMAPVQYITRHNAVCKVIHQNLAYKHGLITGTCPVYRYEPQAVLDSSAYSMYWDRQVLTDRHTAHNKPDVLLVDKTGRSAYIIDVAIPHNSNIERKYVEKKVNYEPLAREIKEIWRLERVVVVPIILSATGIVPKSLTASLDVLGLSHSLVQTMQKCTILHTCSMLRGVLDGFSH

SEQ ID NO: 2168 - protein, 881 aa, Hermetia illucens
MSLLQLQSLVYFGAVAAIRLHGQKIRFRVIGLSDKRDPPWKIRLERRRDSLRQDIARLIQISTGNVSRRVRNKVQRVYRNYAIPCETPVVEILDTLKQKLSVICSRLRRYGESYSRRVQNATYARNQRSFFRSLNKSLQSVQTIQFSVTEAKEYWGELWGLPAQHAEHAEWITAEGTRHANTPGMNFADVTEEEVRRAINISKNWRGPGLDRVQNFWYKKFTSVHSRLARSINEVMSRPEEFPPFLTVGITHLIPKKDTVQDPADTRPITCLPTLYKFITSIISGRINAHLETNNILSEEQKGCRVGSRGCKEQLIIDSVVVGQATRGQRNLFSCYIDYAKAFDSVPHTWLIDILHLYRIDPKLIKFLATVMEGWHTTLSVRTSEGANTTEPIRIRRGIFQGDSLSPPWFCMALNPLSWLLNDARGHGFAIKYGLRAKCELTHLMYLDDIQLYAGTDNHLRSLLRIIDMFSRDIRMEFGLDKCRIQAIRKDHHEPHAGHSIGDLHIEAITETDFYKYLGILQGTHARVGDLKEALLSEFLRRVKLVLKSHLSGKNKISALNVFAIPSLAYAFGILLWTKTDLENVQRRIRTTMSKFRMHHPKSAVERMNLPRDIGGRGVVDVAAQHHRQVDSLRAYFYSKEQANPLHAAVCKADCGLTPLNLKDRSFNPLSGVKSDQERIEEWKSKAMHGKHVNCLWQPFVDLHLSSRWLCAGELFAETEGFMCAIQDGVVATRAYKKLIMKERVENDQCRMCGSALETLDHLISGCTVMAPVQYITRHNAVCKVIHQNLAYKHGLITGTCPVYRYEPQAVLDNSAYSMYWDRQVLTDRHTAHNKPDVLLVDKTGRSAYIIDAAIPHNSKIERKYVEKKVNYEPLAREIGL

SEQ ID NO: 2169 - protein, 1188 aa, Hermetia illucens
MRRRRNLRSGTDNRRESSDLVTGSGSRNGQHGVETASRGAVRRLGATTTRSTAPPAAAVSPQPVATTSAGSRRKRMKWTEEMNLFIIRSYYEITAGAGTTSYRPLLHQRFVERFPQFAHVTVQRVADQYRFITRSDTIPATIRERVRLEVIGETGDRESMGAEAAASTTSRRTAGNRFSTRRSTLLHRPAEVSAEVRDEFQRACIEFSDMDPLHRPGIPRLYASPATPGILSQINDEIASRLCADMSLLQLQSLVYCGAVAAIRLHGQKIRFRVIGLSDKRDPPWKIRLERRRDSLRQDIARLIQISTGNASRRVRNKVQRVYRNYAIPCETPVVEILDTLKQKLSVICSRLRRYGESYSRRVQNATYARNQRSFFRSLNESQQSAQTIQFSVTEAKEYWGGLWGLPAQHAEHAEWITAEGTRHVNTPGMNFADVTEEEVRRAINSSKNWRGPGLDRVQNFWYKKFTSVHSRLARSINEVMSRPEEFPPFLTAGITYLIPKKDTVQDPADTRPITCLPTLYKFITSIISGRINAHLETNNILSEEQKGCRVGSRGCKEQLVIDSVVVGQATRGQRNLFSCYIDYAKAFDSVPHTWLIDILHLYRIDPKLIKFLATVMEGWHTTLSVRTSEGANTSEPIRIRRGIFQGDSLSPLWFCMALNPLSWLLNDARGHGFAIKYGLRAKCELTHLMYLDDIKLYAGTDNHLRSLLRIIDMFSRDIRMEFGLDKCRIQAIRKGHHEPHAGHSIGDLHIEAMTETDFYKYLGILQGTHARVGDLKEALLSEFLRRVKLVLKSHLSGKNKISALNVFAIPSLAYAFGILPWTKTDLENVQRRIRTTMSKFRMHHPKSAVERMNLPRDIGGRGVVDVAAQHHRQVDSLRAYFYSKEQASPLHAAVCKADCGLTPLNLKDRSFNPLSGVKSDQERIEEWKSKAMHGKHVNCLWQPFVDLHLSNRWLCAGELFAETEGFMCAIQDGVVATRAYKKLIMKERVENDQCRMCGSALETLDHLISGCTVMAPVQYITRHNAVCKVIHQNLAYKHGLITGTCPVYRYEPQAVLDSSAYSMYWDRQVLTDRHTAHNKPDVLLVDKTGRSAYIIDVAIPHNSNIERKYVEKKVNYEPLAREIKEIWRLERVVVVPIILSATGIVPKSLTASLDVLGLSHSLVQTMQKYTILHTCSMLRGVLDGFSH

SEQ ID NO: 2170 - protein, 1188 aa, Hermetia illucens
MRRRRNLRSGTDNRRESSDLVTGSGSRNGQHGVETASRGAVRRLGATTTRSTAPPAAAVSPQPVATTSAGSRRKRMKWTEEMNLFIIRSYYEITAGAGTTSYRPLLHQRFVERFPQFAHVTVQRVADQYRFITRSDTIPATIRERVRLEVIGETGDRESMGAEAAASTTSRRTAGNRFSTRRSTLLHRPAEVSAEVRDEFQRACIEFSDMDPLHRPGIPRLYASPATPGILSQINDEIASRLCADMSLLQLQSLVYCGAVAAIRLHGQKIRFRVIGLSDKRDPPWKIRLERRRDSLRQDIARLIQISTGNASRRVRNKVQRVYRNYAIPCETPVVEILDTLKQKLSVICSRLRRYGESYSRRVQNATYTRNQRSFFRSLNESQQSAQTIQFSVTEAKEYWGGLWGLPAQHAEHAEWITAEGTRHVNTPGMNFADVTEEEVRRAINSSKNWRGPGLDRVQNFWYKKFTSVHSRLARSINEVMSRPEEFPPFLTAGITYLIPKKDTVQDPADTRPITCLPTLYKFITSIISGRINAHLETNNILSEEQKGCRVGSRGCKEQLIIDSVVVGQATRGQRNLFSCYIDYAKAFDSVPHTWLIDILHLYRIDPKLIKFLATVMEGWHTTLSVRTSEGANTSEPIRIRRGIFQGDSLSPLWFCMALNPLSWLLNDARGHGFAIKYGLRAKCELTHLMYLDDIKLYAGTDNHLRSLLRIIDMFSRDIRMEFGLDKCRIQAIRKGHHEPHAGHSIGDLHIEAMTETDFYKYLGILQGTHARVGDLKEALLSEFLRRVKLVLKSHLSGKNKISALNVFAIPSLAYAFGILPWTKTDLENVQRRIRTTMSKFRMHHPKSAVERMNLPRDIGGRGVVDVAAQHHRQVDSLRAYFYSKEQASPLHAAVCKADCGLTPLNLKDRSFNPLSGVKSDQERIEEWKSKAMHGKHVNCLWQPFVDLHLSNRWLCAGELFAETEGFMCAIQDGVVATRAYKKLIMKERVENDQCRMCGSALETLDHLISGCTVMAPVQYITRHNAVCKVIHQNLAYKHGLITGTCPVYRYEPQAVLDSSAYSMYWDRQVLTDRHTAHNKPDVLLVDKTGRSAYIIDVAIPHNSNIERKYVEKKVNYEPLAREIKEIWRLERVVVVPIILSATGIVPKSLTASLDVLGLSHSLVQTMQKYTILHTCSMLRGVLDGFSH

SEQ ID NO: 2171 - protein, 1145 aa, Hermetia illucens
MHHQKMRRRRNLRSGTDNRRESSDLVTGSGSRNGQHGVETASRGAVRRLGATTTRSTAPPAAAVSPQSVATTSAGSRRKRMKWTEEMNLFIIRSYYEITAGAGTTSYRPLLHQRFVERFPQFAHVTVQRVADQYRFITRSDTIPATIRERVRLEVIGETGDRESMGAEAAASTTPRRTAGNRFSTRRSTLLHRPAEVSAEVRDEFQRACIEFSDMDPLYRPGIPRLYASPATPGILSQINDEIASRLCADMSLLQLQSLVYCGAVAAIRLHAQKIRFRVIGLSHKRDPPWKIRLERRRDSLRQDIARLIQISTGNASRRVRNKVQRVYRNYAIPCETPVVEILDTLKQKLSVICSRLRRYGESYSRRVQNATYARNQGSFFRSLNESQQSAQTIQFSVTEAKEYWGGLWGLPAQHAEHAEWITAEGTRHANTPGMNFADVTEEEVRRAINISKNWRGPGLDRVQNFWYKKFTSVHSRLARSINEVMSRPEEFPPFLTAGITYLIPKKDTVQDPADTRPITCLPTLYKFITSIISGRINAHLETNNILSEEQKGCRVGSRGCKEQLIIDSVVVGQATRGQRNLFSCYIDYAKAFDSVPHTWLIDILHLYRIDPKLIKFLATVMEGWHTTLSVRTSEGANTSEPIRIRRGIFQGDSLSPLWFCMALNPLSWLLNDARGHGFAIKYGLRAKCELTHLMYLDDIKLYAGTDDHLRSLLRIIDMFSRDIRMEFGLDKCRIQAIRKGHHEPHAGHSIGDLHIEAMTETDFYNYLGILQGTHSRVGDLKEALLSEFLRRVKLVLKSHLSGKNKITALNVFAIPSLAYAFGILPWTKTDLENVQRRIRTTMSKFRMHHPKSAVERMNLPRDIGGRGVVDVAAQHHRQVDSLCAYFYSKEQASPLHAAVCKADCGLTPLTLKDRSFNPLSGVRSDQERIEEWKSKAMHGKHVNCLWQPFVDLHLSNRWLCAGELFAETEGFMCAIQDGVVATRAYKKLIMKERVENDQCRMCGSALETLDHLNSGCTVMAPVQYITRHNAVCKVIHQNLAYKHGLITGTCPVYRYEPQAVLDSSAYSMYWDRQVLTDRHTAHNKPDVLLVDKTGRSAYIIDVAIPHNSNIERKYVEKKVNYEPLAREIKEIWRLKRVVVVPIIL

SEQ ID NO: 2172 - protein, 1193 aa, Hermetia illucens
MHHQKMRRRRNLRSGTDNRRESSDLVTGSGSRNGQHGVETASRGAVRRLGATTTRSTAPPAAAVSPQSVATTSAGSRRKRMKWTEEMNLFIIRSYYEITAGAGTTSYRPLLHQRFVERFPQFAHVTVQRVADQYRFITRSDTIPATIRERVRLEVIGETGDRESMGAEAAASTTSRRTAGNRFSTRRSTLLHRPAEVSAEVRDEFQRACIEFSDMDPLHRPGIPRLYASPATPGILSQINDEIASRLCADMSLLQLQSLVYCGAVAAIRLHGQKIRFRVIGLSDKRDPPWKIRLERRRDSLRQDIARLIQISTGNASRRVRNKVQRVYRNYAIPCETPVVEILDTLKQKLSVICSRLRRYGESYSRRIQNATYARNQRSFFRSLNESQQSAQTIQFSVTEAKEYWGGLWGLPAQHAEHAEWITAEGTRHVNTPGMNFADVTEEEVRGAINSSKNWRGPGLDRVQNFWYKKFTSVHSRLARSINEVMSRPEEFPPFLTAGITYLIPKKDTVQDPADTRPITCLPTLYKFITSIISGRINAHLETNNILSEEQKGCRVGSRGCKEQLIIDSVVVGQATRGQRNLFSYYIDYAKAFDSVPHTWLIDILHLYRIDPKLIKFLATVMEGWHTTLSVRTSEGANTSEPIRIRRGIFQGDSLSPLWFCMALNPLSWLLNDARGHGFAIKYGLRAKCELTHLMYLDDIKLYAGTDNHLRSLLRIIDMFSRDIRMEFGLDKCRIQAIRKGHHEPHAGHSIGDLHIEAMTETDFYKYLGILQGTHARVGDLKEALLSEFLRRVMLVLKSHLSGKNKISALNIFAIPSLAYAFGILPWTKTDLENVQRRIRTTMSKFRMHHPKSAVERMNLPRDIGGRGVVDVAAQHHRQVDSLRAYFYSKEQASPLHAAVCKADCGLTPLNLKDRSFNPLSGVKSDQERIEEWKSKAMHGKHVNCLWQPFVDLHLSNRWLCAGELFAETEGFMCAIQDGVVATRAYKKLIMKERVENDQCRMCGSALETLDHLISGCTVMAPVQYITRHNAVCRVIHQNLAYKHGLITGTCPVYRYEPQAVLDSSAYSMYWDRQVLTDRHTAHNKPDVLLVDKTGRSAYIIDVAIPHNSNIERKYVEKKVNYEPLAREIKEIWRLERVVVVPIILSATGIVPKSLTASLDVLGLSHSLVQTMQKYIILHTCSMLRGVLDGFSH

SEQ ID NO: 2173 - protein, 979 aa, Hermetia illucens
MDPLHRPGIPRLYASPATPGILSQINDEIASRLCADMSLLQLQSLVCCGAVAAIRLHGQKIRFRVIGLSDKRDPPWKIRLERRRDSLRQDIARLIQISTGNASRRVRNKVQRVYRNYAIPCETPVVEILDTLKHKLSVICSRLRRYGESYSRRVQNATYARNQRSFFRSLNESQQSTQTIQFSVTEAKEYWGGLWGLPAQHAEHAEWITAEGTRHVNTPGMNFADVTEEEVRRAINSSKNWRGPGLDRVQNFWYKKFTSVHSRLARSINEVMSRPEEFPPFLTAGITYLIPKKDTVQDPADTRPITCLPTLYKFITSIISGRINAHLETNNILSEEQKGCRVGSRGCKEQLIIDSVVVGQATRGQRNLFSCYIDYAKAFDSVPHTWLIDILHLYRIDPKLIKFLATAMEGWHTTLSVRTSEGANTSEPIRIRRGIFQGDSLSPLWFCMALNPLSWLLNDARGHGFAIKYGLHAKCELTHLMYLDDIKLYAGTDNHLRSLLRIIDMFSRDIRMEFGLDKCRIQAIRKGHHEPHAGHSIGDLHIEAMTETDFYKYLGILQGTHARVGDLKEALLSEFLRRVKLVLKSHLSGKNKISALNVFAIPSLAYAFGILPWTKTDLENVQRRIRTTMSKFRMHHPKSAVERMNLPRDIGGRGVVDVAAQHHRQVDSLCAYFYSKEQASPLHAAVCKADCGLTPLNLKDRSFNPLSGVKSDQERIEEWKSKAMHGKHVNCLWQPFVDLYLSNRWLCAGELFAETEGFMCAIQDGVVATRAYKKLIMKERVENDQCRMCGSALETLDHLISGCTVMAPVQYITRHNAVCKVIHQNLAYKHGLITGTCPVCRYEPQAVLDSSAYSMYWDRQVLTDRHTAHNKPDVLLVDKTGRSAYIIDVAIPHNSNIERKYVEKKVNYEPLAREIKEIWRLERVVVVPIILSATGIVPKSLTASLDVLGLSHSLVQTMQKYTILHTCSMLRGVLDGFSH

SEQ ID NO: 2174 - protein, 1188 aa, Hermetia illucens
MRRRRNLRSGTDNRRESSDLVTGSGSRNGQHGVETASRGAVRRLGATTTRSTAPPAAAVSPQFVATTSAGSRRKRMKWTEEMNLFIIRSYYEITAGAGTTSYRPLLHQRFVERFPQFAHVTVQRVADQYRFITRSDTIPATIRERVGLEVIGETGDRESMGAEAAASTTPRRTAGNRFSTRRSTLLHRPAEVSAEVRDEFQRTCIEFSDMDPLHRPGIPRLYASPATPGILSQINDEIASRLCADMSLLQLQSLVYCGAVAAIRLHGQKIRFRVIGLSDKRDPPWKIRLERRRDSLRQDIARLIQISTGNASRRVRNKVRRVYRNYAIPCETPVVEILDTLKQKLSVICSRLRRYDESYSRRVQNATYARNQRSFFRSLNESQQSAQTIQFSVTEAKEYWGGLWGLPAQHAEHAEWITAEGTRHANTPGMNFADVTEEEVRRAINISKNWRGPGLDRVQNFWYKKFTSVHSRLARSINEVMSRPEEFPPFLTAGITYLIPKKDTVQDPADTRPITCLPTLYKFITSIISGRINAHLETNNILSEEQKGCRVGSRGCKEQLIIDSVVVGQATRGQRNLFSCYIDYAKAFDSVPHTWLIDILHLYRIDPKLIKFLATVMEGWHTTLSVRTSEGANTSEPIRIRRGIFQGDSLSPLWFCMALNPLSWLLNDARGHGFAIKYGLRAKCELTHLMYLDDIKLYAGTDNHLRSLLRIIDMFSRDIRMEFGLDKCRIQAIRKGHHEPHAGHSIGDLHIEAMTETDFYKYLGILQGTHARVGDLKEALLSGFLRRVKLVLKSHLSGKNKISALNVFAIPSLAYAFGILPWTKTDLENVQRRIRTTMSKFRMHHPKSAVERMNLPRDIGGRGVVDVAAQHHRQVDSLRAYFYSKEQASPLHAAVCKADCGLTPLNLKDRSFNPLSGVKSDQERINEWKSKAMHGKHVNCLWQPFVDLHLSNRWLCAGELFAETEGFMCAIQDGVVATRAYKKLIMKERVENDQCRMCGSALETLDHLISGCTVMAPVQYITRHNAVCKVIHQNLAYKHGLITGTCPVYRYEPQAVLDSSAYSMYWDRQVLTDRHTAHNKPDVLLVDKTGRSAYIIDVAIPHNSNIERKYVEKKVNYEPLAREIKEIWRLERVVVVPIILSATGIVPKSLTASLDVLGLSNSLVQTMQKYTILHTCSMLRGVLDGFSH

SEQ ID NO: 2175 - protein, 1193 aa, Hermetia illucens
MHHQKMRRRRSLRSGMDNRRESSDLVTGSGSRNGQHGVETASRGAVRRLGATTTRSTAPPAAAVSPQSVATTSAGSRRKRMKWTEEMNLFIIRSYYEITAGAGTTSYRPLLHQRFVERFPQFAHVTVQRVADQYRFITRSDTIPATIRERVRLEVIGETGDRESMGAEAAVSTTPRRTAGNRFSTRRSTLLHRPAEVSAEVRDEFQRACIEFSDMDPLHRPGIPRLYASPATPGILSQINGEIASRLCADMSLLQLQSLVYCGAVAAIRLHGQKIRFRVIGLSDKRDPPWKIRLERRRDSLRQDIARLIQISTGNASRRVRNKVQRVYRNYAIPCETPVVEILDTLKQKLSVICSRLRRYGESYSRRVQNATYARNQRSFFRSLNESQQSAQTIQFSVTEAKEYWGGLWGLPAQHAEHAEWITAEGTRHANTPGMNFADVTEEEVRRAINISKNWRGPGLDRVQNFWYKKFTSIHSRLARSINEVMSRPEEFPPFLTAGITYLIPKKDTVQDPADTRPITCLPTLYKFITSIISGRINAHLETNNILSEEQKGCRVGSRGCKEQLIIDSVVVGQATRGQRNLFSCYIDYAKAFDSVPHTSLIDILHLYRIDPKLIKFLATVMEGWHTTLSVRTSEGANTSEPIRIRRGIFQGDSLSPLWFCMALNPLSWLLNDARGHGFAIKYGLRSKCELTHLMYLDDIKLYAGTDNHLRSLLRIIDMFSRDIRMEFGLDKCRIQAIRKGHHEPHAGHSIGDLHIEAMTETDFYKYLGILQGTHARVGDLKEALLSEFLRRVKLVLKSHLSGKNKISALNVFAIPSLAYAFGILPWTKTDLENVQRRIRTTMSKFRMHHPKSAVERMNLPRDIGGRGVVDVAAQHHRQVDSLRAYFYSKEQASPLHAAVCKADCGLTPLNLKDRSFNPLSGVKSDRERIEEWKSKAMHGKHVNCLWQPFVDLHLSNRWLCAGELFAETEGFMCAIQNGVVATRAYKKLIMKERVENDQCRMCGSALETLDHLISGCTVMAPVQYITRHNAVCKVIHQNLAYKHGLITGTCPVYRYEPQAVLDSSAYSMYWDRQVLTDRHTAHNKPDVLLVDKTGRSAYIIDVAIPHNSNIERKYVEKKVNYEPLAREIKEIWRLERVVVVPIILSATGIVPKSLTASLDVLGLSHSLVQTMQKYTILHTCSMLRGVLDGFSH

SEQ ID NO: 2176 - protein, 1193 aa, Hermetia illucens
MHHQKMRRRRNLRSGTDNRRESSDLVTGSGSRNGQHGVETASRGAVRRLGATTTRSTAPPAAAVSPQSVATTSAGSRRKRMKWTEEMNLFIIRSYYEITAGAGTTSYRPFLHQRFVERFPQFAHVTVQRVADQYRFITRSDTIPATIRERVRLEVIGETGDRESMGAEAAASTTPRRTAGNRFSTRRSTLLHRPAEVSAEVRDEFQRACIEFSDMDPLHRPGIPRLYASPATPGILSQINDEIASRLCADMSLLQLQSLVYCGAVAAIRLHGQKIRFRVIGLSDKRDPPWKIRLERRRDSLRQDIARLIQISTGSASRRVRNKVQRVYRNYAIPCETPVVEILDTLKQKLSVICSRLRRYGESYSRRVQNATYARNQRSFFRSLNESQQSAQTIQFSVTEAKEYWGGLWGLPAQHAEHAEWITADGTRHVNTPGMNFADVTEEEVRGAINSSKNWRGPGLHRVQNFWYKKFTSVHSRLARSINEVMSRPEEFAPFLTAGITYLIPKKDTVQDPADTRPITCLPTLYKFITSIISGRINAHLETNNILSEEQKGCRVGSRGCKEQLIIDSVVVGQATRGQRNLFSCYIDYAKAFDSVPHTWLIDILHLYRIDPKLIKFLATVMEGWHTTLSVRTSEGANTSEPIRIRRGIFQGDSLSPLWFCMALNPLSWLLNDARGHGFAIKYGLRAKCELTHLMYLDDIKLYAGTDNHLRSLLRIIDMFSRDIRMEFGLDKCRIQAIRKGHHEPHAGHSIGDLHIEAMTETDFYKYLGILQGTHARVGDLKEALLSEFLRRVKLVLKSHLSGKNKISALNVFAIPSLAYAFGILPWTKTDLENVQRRIRTTMSKFRMHHPKSAVERMNLPRDIGGRGVVDVAAQHHRQVDLLRAYFYSKEQASPLHAAVCKADCGLTPLNLKDRSFNPLSGVKSDQERIEEWKSKAMHGKHVNCLWQPFVDLHLSNRWLCAGEPFAETEGFMCAIQDGVVATRAYKKLIMKERVENDQCRMCGSALETLDHLISGCTVMAPVQYITRHNAVCRVIHQNLAYKHGLITGTCPVYRYEPQAVLDSSAYSMYWDRQVLTDRHTAHNKPDVLLVDKTGRSAYIIDVAIPHNSNIERKYVEKKVNYEPLAREIKEIWRLERVVVVPIILSATGIVPKSLTASLDVLGLSHSLVQTMQKYTILHTCSMLRGVLDGFSH

SEQ ID NO: 2177 - protein, 943 aa, Hermetia illucens
MSLLQLQSLVYCGAVAAIRLHGQKIRFRVIGLSDKRDPPWKIRLERRRDSLRQDIARLIQISTGSASRRVRNKVQRVYRNYAIPCETPVVEILDTLKQKLSVICSRLRRYGESYSRRVQNATYARNQRSFFRSLNESQQSAQTIQFSVTEAKEYWGGLWGLPAQHAEHAEWITAEGTRHVNTPGMNFADVTEEEVRRAINSSKNWRGPGLDRVQNFWYKKFTSVHSRLARSINEVMSRPEEFPPFLTAGITYLIPKKDTVQDPADTRPITCLPTLYKFITSIISGRINAHLETNNILSEEQKGCRVGSRGCKEQLIIDSVAVGQATRGQRNLFSCYIDYAKAFDSVPHTWLIDILHLYRIDPKLIKFLATVMEGWHTTLSVRTSEGANTSEPIRIRRGIFQGDSLSPLWFCMALNPLSWLLNDARGHGFAIKYGLRAKCELTHLMYLDDIKLYAGTDNHLRSLLRIIDMFSRDIRMEFGLDKCRIQAIRKGHHEPHAGHSIGGLYIEAMIETDFYKYLGILQGTHARVGDLKEALLSEFLRRVKLVLKSHLSGKNKISALNVFAIPSLAYAFGILPWTKTDLENVQRRIRTTMSKFRMHHPKSAVERMNLPRDIGGRGVVDVAAQHHRQVDSLRTYFYSKEQASPLHATVCKADCGLTPLNLKDRSFNPLSGVKSDQERIEEWKSKAMHGKHVNCLWQPFVDLHLSNRWLCAGELFTETEGFMCAIQDGVVATRAYKKLIMKERVENDQCRMCGSALETLDHLISGCTVMAPVQYITRHNAVCRVIHQNLAYKHGLITGTCPVYRYEPQAVLDSSAYSMYWDRQVLTDRHTAHNKPDVLLVDKTGRSAYIIDVAIPHNSNIERKYVEKKVNYEPLAREIKEIWRLERVVVVPIILSATGIVPKSLTASLDVLGLSHSLVQTMQKYTILHTCSMLRGVLDGFSH

SEQ ID NO: 2178 - protein, 1188 aa, Hermetia illucens
MRRRRSLRSGTDNRRESSDLVTGSGSRNGQHGVETASRGAVRRLGATTTRSTAPPAAAVSPQSVATTSAGSRRKRMKWTEEMNLFIIRSYYEITAGAGITSYRPLLHQRFVERFPQFAHVTVQRIADQYRFITRSDTIPATIRERVRLEVIGETGDRESMGAEAAASTTPRRTAGNRFSTRRSTLLHRPAEVSAEVRDEFQRACMEFSDMDPLHRPGIPRLYASPATPGILSQINDEIASRLCADMSLLQLQSLVYCGAVAVIRLHGQKIRFRVIGLSDKRDPPWKIRLERRRDSLRQDIARLIQISTGSVSRRVRNKVQRVYRNYAIPCETPVVEILDTLKQKLSVICSGLRRYGESCSRRVHNATYARNQRSFFRSLNESQQSAQTIQFSVTEAKEYWGGLWGLPAQHAEHAEWITDEGTRHANTPGMNFADVTEEEVRRAINSSKNWRGPGLDRVQNFWYKKFTSVHSRLARSINEVMSRPEEFPPFLTAGITYLIPKKDTVQDPADTRPITCLPTLYKFITSIISGRINAHLETNNILSEEQKGCRVGSRRCKEQLIIDSVAVGQATRGQRNLFSCYIDYAKAFDSVPHTWLIDILHLYRIDPKLIKFLATVMEGWHTTLSVRTSEGANTSEPIRIRRGVFQGDSLSPLWFCMALNPLSWLLNDARGHGFAIKYGLRAKCELTHLMYLDDIKLYAGTDDHLRSLLRIIDMFSRDIRMEFGLDKCRIQAIRKGHHEPHAGHSIGDLHIEAMTETDFYKYLGILQGTHARVGDLKEALLSEFLRRVKLVLKSHLSGKNKISALNVFAIPSLAYAFGILPWTKTDLENVQRRIRTTMSKFRMHHPKSAVERMNLPRDIGGRGVVDVAAQHHRQVDSLRAYFYSKEQASPLHAAVCKADCGLTPLNLKDRSFNPLSGVKSDQERIDEWKSKAMHGKHVNCLWQPFVDLHLSNRWLCAGELFAETEGFMCAIQDGVVATRAYKKLIMKERVENDQCRMCGSALETLDHLISGCTVMAPVQYITRHNAVCKVIHQNLAYKHGLIMGTCPVYRYEPQAVLDSSACSMYWDRQVLTDRHTAHNKPDVLLVDKTGRSAYIIDVAIPHNSNIERKYVEKKVNYEPLAREIKEIWRLERVVVVPIILSATGIVPKSLTASLDVLGLSHSLVQTMQKYTILHTCSMLRGVLDGFSH

SEQ ID NO: 2179 - protein, 1029 aa, Hermetia illucens
MGAEAAASTTPRRTAGNRFSTRRSTLLHRPAEVSAEVRDEFQRACIEFSDMDPLHRPGIPRLYASPATPGILSQINDEIASRLCADMSLLQLQSLVYCGAVAAIRLHGQKIRFRVIGLSDKRDPPWKIRLERRRDSLRQDIARLIQISTGNASRRVRNKVQRVYRNYAIPCETPVVEILDTLKQKLSVICSRLRRYGESYSRRVQNATYARYQRSFFRSLNESQQSAQTIQFSVTEAKEYWGGLWGLPAQHAEHAEWITAEGTRHANTPGMNFADVTEEEVRRAINISKNWRGPGLDRVQNFWYKKFTSVHSRLARSINEVMSRPEEFPPFLTAGITYLIPKKDTVQDPADTRPITCLPTLYKFITSIISGRINAHLETNNILSEEQKGCRVGSRGCKEQLIIDSVVVGQATRGQRNLFSCYIDYAKAFDSVPHTWLIDILHLYHIDPKLIKFLATVMEGWHTTLSVRTSEGANTSEPIRIRRGIFQGDSLSPLWFCMALNPLSWLLNDARGHGFAIKYGLRAKCELTHLMYLDDIKLYAGTDNHLRSLLRIINMFSRDIRMEFGLDKCRIQAIRKGHHEPHAGHSIGDLHIEAMTETDFYKYLGILQGTHARVGDLKEALLSEFLRRVKLVLKSHLSGKNKISALNVFAIPSLAYAFGILPWTKTDLENVQRRIRTTMSKFRMHHPKSAVERMNLPRDIGGRGVVDVAAQHHRQVDSLRAYFYSKEQASPLHAAVCKADCGLTPLNLKDRSFNPLSGVKSDQERIEEWKSKAMHGKHVNCLWQPFVDLHLSNRWLCAGELFAETEGFMCAIQDGVVATRAYKKLIMKERVENDQCRMCGSALETLDHLISGCTVMAPVQYITRHNAVCKVIHQNLAYKHGLITGTCPIYRYEPQAVLDSSAYSMYWDRQVLTDRHTAHNKPDVLLVDKTGRSAYIIDVAIPHNSNIERKYVEKKVNYEPLAREIKEIWRLERVIVVPIILSATGIVPKSLTASLDVLGLSHSLVQTMQKYTILHTCSMLRGVLDGFSH

SEQ ID NO: 2180 - protein, 1188 aa, Hermetia illucens
MRRRRNLRSGTDNRRESSDLVTGSGSRNGQHGVETASRGAVRRLGATTTRSTAPPAAVVSPQPVATTSAGSRRKRMKWTEEMNLFIIRSYYEITAGAGTTSYRPLLHQRFVERFPQFAHVTVQRVADQYRFITRSDTIPATIRERVRLEVIGEIGDRESMGAEAAASTTSRRTAGNRFSTRRSTLLHRPAEVSAEVRDEFQRACIEFSDMDPLHRPGIPRLYASPATPGILSQINDEIASRLCADMSLLQLQSLVYCGAVAAIRLHGQKIRFRVIGLSDKRDPPWKIRLERRRDSLRQDIARLIQISTGNASRRVRNKVQRVYRNYAIPCETPVVEILDTLKQKLSVICSGLRRYGESYSRRVQNATYARNQRSFFRSLNESQQSAQTIQFSVTEAKEYWGGLWGLPAQHAEHAEWITAEGTRHVNTPGMNFADVTEEEVRRAINSSKNWRGPGLDRVQNFWYKKFTSVHSRLARNINEVMSRPEEFPPFLTAGITYLIPKKDTVQDPADTRPITCLPILYKFITSIISGRINAHLEINNILCEEQKGCRVGSRGCKEQLIIDSVVAGQATRGQRNLFSCYIDYAKAFDSVPHTWLIDILHLYRIDPKLIKFLATVMEGWHTTLSVRTSEGANTSEPIRIRRGIFQGDSLSPLWFCMALNPLSWLLNDARGHGFAIKYGLRAKCELTHLMYLDDIKLYAGTDNHLRSLLRIIDMFSRDIRMEFGLDKCRIQAIRKGHHEPHAGHSIGDLHIEAMTETDFYKYLGILQGTHPRVGDLKEALLSEFLRRVKLVLKSHLSGKNKISALNVFAIPSLAYAFGILPWTKTDLENVQRRIRTTMSKFRMHHPKSAVERMNLPRDIGGRGVVDVAAQHHRQVDSLRAYFYSKEQASPLHAAVCKADCGLTPLNLKDRSFNPLSGVKSDQERIEEWKSKAMHGKHVNCLWQPFVDLHLSNRWLCAGELFAETEGFMCAIQDGVVATRAYKKLIMKERVKNDQCRMCGSALETLDHLISGCTVMEPVQYITRHNAVCKVIHQNLAYKHGLIAGTCPVYRYEPQAVLDSSAYSMYWDRQVLTDRHTAHNKPDVLLVDKTGRSAYVIDVAIPHNSNIERKYVEKKVNYEPLAREIKEIWRLERVVVVPIILSATGIVPKSLTASLDVLGLSHSLVQTMQKYTILHTCSMLRGVLDGFSH

SEQ ID NO: 2181 - protein, 956 aa, Hermetia illucens
MCADMSLLQLQSLVYCGAVAAIRLHGQKIRFRVIGLSDKRDPPWKIRLERRRDSLRRDIARLIQISTGSASRRVRNKVQRVYRNYAIPSETPVVEILDTLKQKLSVICSRLRRYGESYSRRIQNATYARKQRSFFRSLNESQQSAQTIQFSVTEAKEYWGGLWGLPAQHAEHAEWITAEGTRHANTPGMNFADVTEEEVRRAINSSKNWRGPGVDRVQNFWYKKFTSVHSRLARSINEVMSRPEEFPPFLTAGITYLIPKKDTVQDPADTRPITCLPTLYKFITSIISGRINAHLETNNILSEEQKGCRVGSRGCKEQLIIDSVVVGQATRGQRNLFSCYIDYAKAFDSVPHTWLIDILHLYRIDPKLIKFLATVLEGWHTTLSVRTSEGANTSEPIHIRRGIFQGDSLSPLWFCMALNPLSWLLNDARGHGFAIKYGLRAKCELTHLMYLDDIKLYAGTDDHLRSLLRIIDMFSRDIRMEFGLDKCRIQAIRKGHHEPHAGHSIGDLHIEAMTETDFYKYLGILQGTHARVGDLKEALLSELLRRVKLVQKSHLSGKNKISALNVFAIPSLAYAFGILPWTKTDLENVQRRIRTTMSKFRMHHPKSAVERMNLPRDIGGRGVVDVAAQHHRQVDSLRAYFYSKEQTSPLHAAVCKADCGLTPLNLKDRSFNPLSGVKSDQERIDEWKSKAMHGKHVNCLWQPFVYLHLSNRWLCAGELFAETEGFMCAIQDGVVATRAYKKLIMKERVVNDQCRMCGSALETLDHLISGCTVMAPVQYITRHNAVCKVIHQNLAYKHGLITGTCPVYRYEPQAVLDSSAYSMYWDQQVLTDRHTAHNKPDVLLVDKTGRSAYIIDVAIPHNSNIERKYVEKKVNYEPLAREIKEIWRLERVVVVPITLCLNPSRFPLMSWDFRTVWFKPCRSTPFCIRARCSGEYSTDSPTDLPPATTTSAPFSF

SEQ ID NO: 2182 - protein, 1185 aa, Hermetia illucens
MRRRRNLRSGTDNRRESSDLVTGSGSRNGQHGVETASRGAVRRLGATTTRSTAPPAAAVSPQPVATTSAGSRRKRMKWTEEMNLFIIRSYYEITAGAGTTSYRPLLHQRFVERFPQFAHVTVQRVADQYRFITRSDTIPATIRERVRLEVIGETGDRESMGAEAAASTTSRRTAGNRFSTRRSTLLHRPAEVSAEVRDEFQRACIEFSDMDPLHRPGIPRLYASPATPGILSQINDEIASRLCADMSLLQLQSLVYCDAVAAIRLHGQKIRFRVIGLSDKRDPPWKIRLERRRDSLRQDIARLIQISTGNASRRVRNKVQRVYRNYAIPCETPVVEILDTLKQKLSVICSRLRRYGESYSRRVQNATYARNQRSFFRSLNESQQSAQTIQFSVTEAKEYWGGLWGLPAQHAEHAEWITAEGTRHVNTPGMNFADVTEEEVRRAINSSKNWRGPGLDRVQNFWYKKFTSVHSRLARSINEVMSRPEEFPPFLTAGITYLIPKKDTVQDPADTRPITCLPTLYKFITSIISGRINAHLETNNILSEEQKGCRVGSRGCKEQLIIDSVVVGQATRGQRNLFSCYIDYAKAFDSVPHTWLIDILHLYRIDPKLIKFLATVMEGWHTTLSVHTSEGANTSEPIRIRRGIFQGDSLSPLWFCMALNPLSWLLNDARGHGFAIKYGLRAKCELTHLMYLDDIKLYAGTDNHLRSLLRIIDMFSRDIRMEFGLDKCRIQAIRKGHHEPHAGHSIGDLHIEAMTETDFYKYLGILQGTHARVGDLKEALLSEFLRRVKLVLKSHLSGKNKKSALNVFAIPSLAYAFGILPWTKTDLENVQRRIRTTMSKFRMHHPKSAVERMNLPRDIGGRGVVDVAAQHHRQVDPLRAYFYSKEQASPLHAAVCKADCGLTPLNLKDRSFNPLSGVKSDQERIEEWKSKAMHGKHVNCLWQPFVDLHLSNRWLCAGELFAETEGFMCAIQDGVVATRAYIKLIMKERVENDQCRMCGSALETLDHLISGCTVMAPVQYITRHNAVCKVIHQNLAYKHGLITGTCPVYRYEPQAVLDSSAYSMYWDRQVLTDRHTAHNKPDVLLVDKTGRSAYIIDVAIPHNSNIERKYVEKKVNYEPLAREIKEIWRLVRVVVVPIILSATGIVPKSLTASLDVLGLSHSLVQTMQKYTILHTCSMLRGVIDG

SEQ ID NO: 2183 - protein, 1193 aa, Hermetia illucens
MHHQKMRRRRNLRSGTDNRRESSDLVTGSGSRNGQHGVETASRGAVRRLGATTTRSTAPPAAAVSPQSVATTSAGSRRKRMKWTEEMNLFIIRSYYEITAGAGTTSYRPLLHQRFVERFPQFAHVTVQRVADQYRFITRSDTIPATIRERVRLEVIGETGDRESMGAEAAASTTSRRTAGNRFSTRRSTLLHRPAEVSAEVRDEFQRACIEFSDMDPLHRPGIPRLYASPATPGILSQVNDEIASRLCADMSLLQLQSLVYCGAVAAIRLHGQKIRFRVIGLSDKRDPPWKIRLERRRDSLRQDIARLIQISTGNTSRRVRNKVQRVYRNYAIPCETPVVEILDTLKQKLSVICSRLRRYGESYSRRVQNATYARNQRSFFRSLNESQQSAQTIQFSVTEAKEYWGGLWGLPAQHAEHAEWITAEGTRHVNTPGMNFADVTEEEVRRAINSSKNWRGPGLDRVQNFWYKKFTSVHSRLARSINEVMSRPEEFPPFLTAGITYLIPKKDTVQDPADTRPITCLPTLYKFITSIISGRINAHLETNNILSEEQKGCRVGSRGCKEQLIIDSVVVGQATRGQRNLFSCYIDYAKAFDSVPHTWLIDILHLYRIDPKLIKFLATVMEGWHTTLSVRTSEGANTSEPIRIRRGIFQGDSLSPLWFCMALNPLSWLLNDARGHGFAIKYGLRAKCELTHLMYLDDIKLYAGTDNHLRSLLRIIDMFSRDIRMEFGLDKCRIQAIRKGHHEPHAGHSIGDLHIEAMTETDFYKYLGILQGTHARVGDLKEALLSEFLRRVKLVLKSHLSGKNKISALNVFAIPSLAYAFGILPWTKTDLENVQRRIRTTMSKFRMHHPKSAVERMNLPRDIGGRGVVDVAAQHHRQVDSLRAYFYSKEQASPLHAAVCKADCGLTPLNLKDRSFNPLSGVKSDQERIEEWKSKAMHGKHVNCLWQPFVDLHLSNRWLCAGELFAETEGFMCAIQDGVVATRAYKKLIMKERVENDQCRMCGSALETLDHLISGCTVMAPVEYITRHNAVCKVIHQNLAYKHGLITGTCPVYRYEPQAVLDSSAYSMYWDRQVLTDRHTAHNKPDVLLVDKTGRSAYIIDVAIPHNSNIERKYVEKKVNYEPLAREIKEIWRLERVVVVPIILSATGIVPKSLTASLDVLGLSHSLVQTMQKYTILHTCSMLRGVLDGFSH

SEQ ID NO: 2184 - protein, 1193 aa, Hermetia illucens
MHHQKMRRKRNLRSGTDNRRESSDLVTGSGSRNGQHGVETASRGAVRRLGATTTRSTAPPAVAVSPQSVATTSAGSRRKRMKWTEEMNLFIIRSYYEITAGAGTTSYRPLLHQRFVERFPQFAHVTVQRVEDQYRFITRSATIPATIRERVRLEVIGETGDRESMGAEAAASTTPRRTAGNRFSTRRSTLLHRPNEVSAEVRDEFQRACIEFSDMDPLHRPGIPRLYASPATPGILSQINDEIASRLCADMSLLQLQSLVYCGTVAAIRLHGQKIRFRVIGLSDKRDPPWKIRLERRRDSLRQDIARLIQISTGNASRRVRNKVQRVYRNYAIPCETPVVEILDTLKQKLSFICSRLRRYGESCSRRVQNATYARNQRSFFRSLNESQQSAQTIQFSVTEAKEYWGGLWGLPAQHAEHAEWITAEATRHANTPGMNFADVTEEEVRRAINISKNWRGPGLDRVQNFWYKKFTSVHSRLARSINEVMSRPEEFPPFLTAGITYLIPKKDTVQDPADTRPITCLPTLYKFITSIISGRINAHLETNNILSEEQKGCRVGSRGCKEQLIIDSVTVGQATRGQRNLFSCYIDYAKAFDSVPHTWLIDILHLYRIDPKLIKFLATVMEGWHTTLSVRTSEGANTSEPIRIRRGIFQGDSLSPLWFCMALNPLSWLLNDARGHGFAIKYGLRAKCELTHLMYLDDIKLYAGTDDHLRSLLRIINMFSRDIRMEFGLDKCRIQAIRKGHHEPHAGHSIGDLHIEAMTETDFYKYLGILQGTHARVGDLKEALLSEFLRRVKLVLKSHLSGKNKISALNVFAIPSLAYAFGILPWTKTDLENVQRRIRTTMSKFRMHHPKSAVERMNLPRDIGGRGVVDVAAQHHHQVDSLRAYFYSKEQASPLHAAVCKADCGLTPLNLKDRSFNPLSGVKSDQERIDEWKSKAMHGKHVNCLWQPFVDLHLSNRWLCAGELFAETEGFMCAIQDGVVATRAYKKLIMKERVENDQCRMCGSTLETLDHLISGCTVMAPVQYITRHNAVCKVIHQNLAYKHGLITGTCPVYRYEPQAVLDSSAYSMYWDRQVLTDRHTAHNKPDVLLVDKTGRSAYIIDVAIPHNSNIERKYVEKKVNYEPLAREIKEIWRLERVVVVPIILSATGIVPKSLTASLDVLGLSHSLVQTMQKYTILHTCSMLRGVLDGFSH

SEQ ID NO: 2185 - protein, 1038 aa, Hermetia illucens
MQIEKCTKFTKNGKVLPPITLLHRPAEVSAEVRDEFQRACIEFSDMDPLHRPGIPRLYASPATPGILSQVNDEIASRLCADMSLLQLQSLVYCGAVAAIRLHGQKIRFRVIGLSDKRDPPWKIRLERRRDSLRQDIARLIQISTGNASRRVRNKVQRVYRNYAIPCETPVVEILDTLKQKLSVICSRLRRYGESYSRRVQNATYARNQRSFFRSLNESQQSAQTIQFSVTEAKEYWGGLWGLPAQHAEHAEWITAEGTRHANTPGMNFADVTEEEVRRAINISKNWRGPGLDRVQNFWYKKFTSVHSRLARSINEVMSRPEEFPPFLTAGITYLIPKKDTVQDPADTRPITCLPTLYKFITSIISGRINAHLETNNILSEEQKGCRVGSRGCKEQLIIDSVVVGQATRGQRNLFSCYIDYAKAFDSVPHTWLIDILHLYRIDPKLIKFLATVMEGWHTTLSVRTSEGANTSEPIRIRRGIFQGDSLSPLWFCMALNPLSWLLNDTRGHGFAIKYGLRAKCELTHLMYLDDIKLYAGTDNHLRSLLRIIDMFSRDIRMEFGLDKCRIQAIRKGHHEPHAGHSIGDLHIEAMTETDFYKYLGILQGTHARVGDLKEALLSEFLRRVKLVLKSHLSGKNKISALNVFAIPSLAYAFGILPWTKTDLENVQRRIRTTMSKFRMHHPKSAVERMNLPRDIGGRGVVDVAAQHHRQVDSLRAYFYSKEQASPLHAAVCKADCGLTPLNLKDRSFNPLSGVKSDQERIEEWKSKAMHGKHVNCLWQPFVDLHLSNRWLCAGELFAETEGFMCAIQDGVVATRAYKKLIMKERVENDQCRMCGSALETLDHLISGCTVMAPVQYITRHNAVCKVIHQNLAYKHGLITGTCPVYRYEPQAVLDSSAYSMYWDRQVLTDRHTAHNKPDVLLVDKTGRSAYIIDVAIPHNSNIERKYVEKKVNYEPLAREIKEIWRLERVVVVPIILSATGIVPKSLTASLDVLGLSHSLVQTMQKYTILHTCSMLRGVLDGFSHWPTTGHHHQCPFSF

SEQ ID NO: 2186 - protein, 1185 aa, Hermetia illucens
MRRKRNLRSGTDNRRESSDLVTGSGSRNGQHGVETASRGAVRRLGATTTRSTAPPAAAVSPQSVATTSAGSRRKRMKWTEEMNLFIIRSYYEITAGAGITSYRPLLHQRFVERFPQFAHVTVQRVADQYRFITRSDTIPATIRERVRLEVIGEIGDRESMGAEAAASTTPRRTAGNRFSTRRSTLLHRPAEVSAEVRDEFQRACIEFSDMDPLHRPGIPRLYASPATPGILSQINDEIASRLCADMSLLQLQSLVYCGAVAAIRLHGQKIRFRVIGLSDKRDPPWKIRLERRRDSLRQDIARLIQISTGSASRRVRNKVQRVYRNYAIPCETPVVEILDTLKQKLSVICSRLRRYGESYSRRVQNATYARNQRSFFRSLNESQQSAQTIQFSVTEAKEYWGGLWGLPAQHAEWITAEGTRHANTPGMNFADVTEEEVRRAINISKNWRGPGLDRVQNFWYKKFTSVHSRLARSINEVMSRPEEFPPFLTAGITYLIPKKDTVQDPADTRPITCLPTLYKFITSIISGRINAHLETNNILSEEQKGCRVGSRGCKEQLIIDSVVVGQATRGQRNLFSCYIDYAKAFDSVPHTWLIDILHLYRIDPKLIKFLATVMEGWHTTLSVRTSEGANTSEPIRIRRGIFQGDSLSPLWFCMALNPLSWLLNDARGHGFAIKYGLRAKCELTHLMYLDDIKLYAGTDNHLRSLLRIIDMFSRDIRMEFGLDKCRIQAIRKGHHEPHAGHSIGDLHIEAMTETDFYKYLGILQGTHARVGDLKEALLSEFLRRVKLVLKSHLSGKNKISALNVFAIPSLAYAFGILPWTKTDLENVQRRIRTTMSKFRMHHPKSAVERMNLPRDIGGRGVVDVAAQHHRQVDSLRAYFYSKEQAIPLHAAVCKADCGLTPLNLKDRSFNPLSGVKSDQERIEKWKSKAMHGKHVNCLWQPFFDLNLSNRWLCAGELFAETEGFMCAIQDGVVATRAYKKLIMKERVENDQCRMCGSALETLDHLISGCTVMAPVQYITRHNAVCKVIHQNLAYKHGLITGTCPVYRYEPQAVLDSSAYSMYWDRQVLTDRHTAHNKPDVLLVDKTGRSAYIIDVAIPHNSNIERKYVEKKVNYEPLAREIKEIWRLERVVVVPIILSATGIVPKSLTASLDVLGLSHSLVQTMQKYTILHTCSMLRGVLDGFSH

SEQ ID NO: 2187 - protein, 1193 aa, Hermetia illucens
MHHQKMRRRRNLRSGTDNRRESSDLVTGSGSRNGQHGVETASRGAVRRLGATTTRSTAPPAAAVSPQSVATTSAGSRRKRMKWTEEMNLFIIRSYYEITAGAGTTSYRPLLHQRFVERFPQFAHVTVQRVTDQYRFITRSDTIPATIRERVRLEVIGEIGDRESMGAEAAASTTPRRTAGNRFSTRRSTLLHRPAEVSAEVRDEFQRACIEFSDMDPLHRPGIPRLYASPATPGILSQINDEIASRLCADMSLLQLQSLVYCGAVAAIRLHGQKIRFRVIGLSDKRDPPWKIRLERRRDSLRQDIARLIQISTGNASRRVRNKVQRVYRNYAIPCETPVVEILDTLKQKLSVICSRLRRYGESYSRRVQNATYARNQRSFFRSLNESQQSAQTIQFSVTEAKEYWGGLWGLPAQHAEHAEWITAEGTRHANTPGMNFADVTEEEVRRAINISKNWRGPGLDRVQNFWYKKFTSVHSRLARSINEVMSRPEEFPPFLTAGITYLIPKKDTVQDPADTRPITCLPTLYKFITSIISGRINAHLETNNILSEEQKGCRVGSRGCKEQLIIDLVVVGQATRGQRNLFSCYIDYAKAFDSVPHTWLIDILHLYRIDPKLIKFLATVMEGWHTTLSVRTSEGANTSEPIRIRRGIFQRDSLSPLWFCMALNPLSWLLNDARGHGFAIKYGLRAKCELTHLMYLDDIKLYAGTDNHLRSLLRIIDMFSRDIRMEFGLDKCRIQAIRKGHHEPHAGHSIGDLHIEAMTETDFYKYLGILQGTHARVGDLKEALLSEFLRRVKLVLKSHLSGKNKISALNVFAIPSLAYAFGILPWTKTDLENVQRRIRTTMSKFRMHHPKSAVERMNLPRDIGGRGVVDVAAQHHRQVDSLRAYFYSKEQASPLHAAVCKADCGLTPLNLKDRSFSPLSGVKSDQERIEEWKSKAMHGKHVNCLWQPFVDLHLSNRWLCAGELFAETEGFMCAIQDGVVATRAYKKLIMKERVENDQCRMCGSALETLDHLISGCTVMAPVQYITRHNAVCKVIHQNLAYKHGLITGTCPVYRYEPQAVLDSSAYSMYWDRQVVTDRHTAHNKPDVLLVDKTGRSAYIIDVAIPHNSNIERKYVEKKLNYEPLAREIKEIWRLERVVVVPIILSATGIVPKSLTASLDVLGLSHSLVQTMQKYTILHTCSMLRGVLDGFSH

SEQ ID NO: 2188 - protein, 1193 aa, Hermetia illucens
MHHQKMRRRRNLRSGTDNRRESSDLVTGSGSRNGQHGVETASRGAVRRLGATTTRSTAPPAAAVSPQSVATTSAGSRRKRMKWTEEINLFIIRSYYEITAGAGITSYRPLLHQRFVERFPQFAHVTVQRVADQYRFITRSDTIPATIRERVRLEVIGETGDRESMGAEAAASTTPRRTAGNRFSTRRSTLLHRPAEVSAEVRDEFQRACIEFSDMDPLHRPGIPRLYASPATPGILSQINDEIASRLCADMSLLQLQSLVYCGAVAAIRLHGQKIRFRVIGLSDKRDPPWKIRLERRRDSLRQDIARLIQISTGNASRRVRNKVQRVYRNYAIPCETPVVEILDTLKQKLSVICSRLRRYGESYSRRVQNATYARNQRSFFRSLNESQQSAQTIQFSVTEAKEYWGGLWGLPAQHAEHAEWITAEATRHTNTPGMNFADVTEEKVRRAINISKNWRGPGLDRVQNFWYKKFTSVHSRLARSINEIMSRPEEFPPFLTAGITYLIPKKDTVQDPTDTRPITCLPTLYKFITSIISGRINAHLETNNILSEEQKGCRVGSRGCKEQLIIDSVVVGQATRGQRNLFSCYIDYAKAFDSVPHTWLIDILHLYRIDPKLIKFLATVMQGWHTTLSVRTSEGANTSEPIRIRRGIFQGDSLSPLWFCMALNRLSWLLNDARGHGFAIKYGLRAKWELTHLMYLDDIKLYAGTDNHVRSLLRIIDMFSRDIRMEFGLDKCRIQAIRKGHHEPHAGHSIGDLHIEAMTETDFYKYLGILQGTHARVGDLKEALLSEFLRRVKLVLKSHLSGKNKISALNVFAIPSLAYAFGILPWTKTDLENVQRRIRTTMSKFRMHHPKSAVERMNLPRDIGGRGVVDVAAQHHRQVDSLRAYFYSKEQASPLHAAVCKADCGLTPLNLKDRSFNPLSGVKSDQERIDEWKSKAMHGKHVNCLWQSFVDLHLSNRWLCAGELFAETEGFMCAIQDGVVATRAYKKLIMKERVENDQCRMCGSALETLDHLISGCTVMAPVQYITRHNAVCKVIHQNLAYKHGLITGTCPVYRYEPQAVLDSSAYSMYWDRQVLTDRHTAHNKPDVLLVDKTGRSAYIIDVAIPHNSNIERKYVEKKVNYEPLAREIKEIWRLERVVVVPIILSATGIVPKSLTASLDVLGLSHSLVQTMQKYTILHTCSMLRGVLDGFSH

SEQ ID NO: 2189 - protein, 852 aa, Hermetia illucens
MSLLQLQSLVYCGAVAAIRLHGQKIRFRVIGLSDKRDPPWKIRLERRRDSLRQDIARLIQISTGNASRRMRNKVQRVRNYAIPCETPVVEILDTLKQKLSVICSRLRRYGESYSRRVQNATYARNQRSFFRSLNEFQQSAQTIQFSVTEAKEYWGGLWGLPAQHAEHAEWITAEGTRHVNTPGMNFADVTEEEVRRAINISKNWRGPGLDRVQNFWYKKFTSVHSRLARSINEVMSRPEEFPPFLTAGITYLIPKKDTVQDPADTRPITCLPTLYKFITSIISGRINADLETNNILSEKQKGCRVGSTGCKEQLIIDSVVVGQATRGQRNLFSCYIDYVKAFDSVPHTWLIDILHLYRIDPKLIKVLATVMEGWHTTLSVRTSEGANTSEPIRIRRGIFQGDSLSPLWFCMALNPLSWLLNDARGHGFAIKYGLSAKCDDIKLYAGTDNHLRSLLRIIDMFSRDIRMEFGLDKCRIQAIRKGHYEPHARHSNGDLHIEAMTETDFYKYLGILQGTHARVGDLKDALLSEFLRRVKLVLKSHLSGKNKISTLNVFPIPSLAYAFGILPWTKTDLENVQRRIRTTMSKFRMHHPKSPVERMNLPRDIGGRGVVDVAAQHHRQVDSLRAYFYIKEQASPLHAAVCKADCGLIPLNLKDRSFNPLSGVKSDQERIDEWKSKAMHGKHVNCLWQPFVDLHLSNRWLCAGELFDETEGFMCAIQDGVVATRAYKKLIMKERVENDQCRMCGSALETLDHLISGCIVMAPVQCITRHNAVCKVIHQNLAYKHGLITGTCPVYQYEPQAVLDSSAYSMYWDRQVLTDRHTAHNKPDVLLVDKTGRSAYIIDVAEICIIAA

SEQ ID NO: 2190 - protein, 1194 aa, Hermetia illucens
MHHQKMRRRRNLRSGTDNRRESSDLVTGSGSRNGQHGVETASREAVRRLGATTTRSTAPPAAAVSPQSVATTSAGSRRKRMKWTEEMNLFIIRSYYEITAGAGTTSYRPLLHQRFVERFPQFAHVTVQRVADQYRFITRSDTIPATIRERVRLEVIGETGDRESMGIEAAASTTPRRTAGNRFSTRRRTLLHRPAEVSAEVRDEFQRACIEFSDMDPLHRPGIPRLYASPATPGILSQINDEIASRLCADMSLLQLQSLLYCGAVAAIRLHGQKIRFRVIGLSDKRDPPWKIRLERRRDSLRQDIARLIQISTGNASRRVRNKVQRVYRNYAIPCETPVVEILDTLKHKLSVICSRLRRYGESYSRRVQNATYARNQRSFFRSLNESQQSAQTIQFSVTEAKEYWGGLWGLPAQHAEHAEWITAEGTRHANTPGMNFADVTEEEVRRAINISKNWRGPGLDRVQNFWYKKFTGVHSRLARSINEVMSRPEEFPPFLTAGITYLIPKKDTVQDPADTRPITCLPTLYKFITSIISGRINAHLETNNILSEEQKGCRVGSRGCKEQLIIDSVVVGQATRGQRNLFSCYIDYAKAFDSVPHTWLIDILHLYRIDPKLIKFLATVMEGWHTTLSVRTSEGANTSEPIRIRRGIFQGDSLSPLWFCMALNPLSWLLNDARGHGFAIKYGLRAKCELTHLMYLDDIKLYAGTDNHLRSLLRIIDMFSRDIRMEFGLDKCRIQAIRKGHHEPHAGHSIGDLHIEAMIETDFYKYLGILQRTYAGGVGDLKEALLSEFLRRVKLVLKSHLSGKNKISALNVFAIPSLAYAFGILPWTKTDLENVQRRIRTTMSKFRMQHPKSAVERMNLPRDIGGRGVVDVAAQHHRQVDSLRAYFYSKEQASPLHAAVCKADCGLTPLNLKDRSFNPLNGVKSDQERIEEWKSKAMHGKHVNCLWQPFVDLHLSNRWLCAGELFAETEGFMCAIQDGVVTTRAYEKLIMKERVENDQCRMCGSALETFDHLISGFTVMTPVQYITRRNAVCKVIHQNLAYKHGLITGTCPVYRYEPQAVLDSSAYSMYWDRQVLTDRHTAHNKPDVLLVDKTGGSAYIIDVAIPHNSNIERKYVEKKVNYEPLAREIKEIWRLERVVVVPIILSATGIVPKSLTASLDGLGLSHSLVQTMQKYTILHTCSMLRGVLDGFSH

SEQ ID NO: 2191 - protein, 1022 aa, Hermetia illucens
MGAEAAASTTPRRTAGNRFSTRRSTLLHRPAEVSAEVRDEFQRACIEFSDMDPLHRPGIPRLYASPATPGILSQINDEIASRLCADMSLLQLQSLVYCGAVAVIRLHGQKIRFRVIGLSDKRDPPWKIRLERRRDTLRQDIARLIQISTGNASRRVRNKVQRVYRNYAIPCETPVVEILDTLKQKLSVICSRLRWYAESYSRRVQNATYARNQRSFFRSLNESQQSAQTIQFSVTEAKEYWGGLWGLPAQHAEHAEWITAEGTRHANTPGMNFADVTEEEVRRAINISKNWRGPGLDRVQNFWYKKFTSVHSRLARSINEVMSRPEEFPPFLTAGITYLIPKKDTVQDPADTRPITCLPTLYKFITSIISGRINAHLETNNILSEEQKGCRVGSRGCKEQLIIDSVVVGQATRGQRNLFSCYIDYAKAFDSVPHTWLIDILHLYRIDPKLIKFLATVMEGWHTTLSVRTSEGANTSEPIRIRRGIFQGDSLSPLWFCMALNPFSWLLNDARGHGFAIKYGLRAKCELTHLMYLDDIKLYAGTDNHLRSLLRIIDMFSRDIRMEFGLDKCRIQAIRKGHHEPHAGHSIGDLHIEAMTETGFYKYLGILQGTHARVGDLKEALLSEFLRRVKLVLKSHPSEKNKISALNVFAIPSLLPWTKTDLENVQRRIRTTMSKFRMHHPKSAVERMNLPRDIGGRGVVGVAAQHHRQVALRAYFYSKEQASPLHAAVCKADCGLTPLNLKDRSFNPLSGVKSDQERIEEWKSKAMHGKHVNCLWQPFVDLHLSNRWLCAGELFAETEGFMCAIQDGVVATRAYKKLIMKERVENDQCRMCGSALETLDHLISGCTVMAPVQYITRHNAVCKVIHQNLAYKHGLITGTCPVYRYEPQAVLDSSAYSMYWDRQVLTDRHTAHNKPDVLLVDKTGRSAYIIDVAIPHNSNIERKYVEKKVNYEPLAREIKEIWRLERVVVVPIILSATGIVPKSLTASLDVLGLSHSLVQTMQKYTILHTCSMLRGVLDGFSH

SEQ ID NO: 2192 - protein, 1110 aa, Hermetia illucens
MKWTEEMNLFIIRSYYEITAGAGITSYRPLLHQRFVERFPQFAHVTVQRVADQYRFITRSDTIPATIRERVRLEVIGETGDRESMGAETAASTTPRRTAGNRFSTRRSTLLHRPAEVSAEGRDEFQRACIEFSDMDPLHRPGIPRLYASPATPGILSQINDEIASRLCADMSLLQLQSLVYCGAVAAIRLHGQKIRFRVIGLSDKRDPPWKIRLERRRDSLRQDIARLIQISTGNASRRVRNKVQRVYRNYAIPCETPVVEILDTLKQKLSVICSRLRRYGESYSRRVQNATYARNQRSFFRSLNESQQSAQTIQFSVTEAKEYWGGLWGLPAQHAEHAEWITAEGTRHANTPGMNFADVTEEEVRRAINISKNWRGPGLDRVQNFWYKKFTSVHSRLARSINEVMSRPEEFPPFLTAGTTYLIPKKDTVQDPADTRPITCLPTLYKFITSIISGRINAHLETNNILSEEQKGCRVGSRGCKEQLIIDSVVVGQATRGQRNLFSCYIDYAKAFDSVPHTWLIDILHLYRIDPKLIKFLATVMEGWHTTLSVRTSEGANTSEPIRIRRGIFQGDSLSPLWFCMALNPLSWLLNDARGHGFAIKYGLRAKCELTHLMYLDDIKLYAGTDNHLRSLLRIIDMFSRMEFGLDKCRIQAIRKGHHEPHAGHSIGDLHIEAMTETDFYKYLGILQGTHARVGDLKEALLSEFLRRVKLVLKSHLSGKNKISALNVFAIPSLAYAFGILPWTKTDLENVQRRIRTTMSKFRMHHPKSAVERMNLPRDIGGRGVVDVAAQHHRQVDSLRAYFYSKEQASPLHAAVCKADCGLTPLNLKDRSFNPLSGVKSDQERIEEWKSKAMHGKHVNCLWQPFVDLHLSNRWLCAGELFAETEGFMCAIQDAVVATRAYKKLIMKERVENDQCRMCGSALETLDHLISGCTVMAPVQYITRHNAVCKVIHQNLAYKHGLITGTCPVYRYEPQAVLDSSAYSMYWDRQVLTDRHTAHNKPDVLLVDKTGRFAYIIDVAIPHNSNIERKYVEKKVNYEPLAREIKEIWRLERVVVVPIILSATGIVPKSLTASLDVLGLSHSLVQTMQKYTILHTCSMLRGVLDGFSH

SEQ ID NO: 2193 - protein, 1183 aa, Hermetia illucens
MHHQKMRRRRNLRSGTDNRRESSDLVTGSGSRNGQHGVETASRGAVRRLGATTTRSTAPLAAAVSPQSVATTSAGSRRKRMKWTEEMNLFIIRSYYEITAGAGITSYRPLLHQRFVERFPQLAHVTVQRVADQYRFIIRSDTIPATIRERVRLEVIGETGDRESMGAEAAASTTPRRTAGNRFSTRRSTLLHRPAEVSAEVRDEFQRACIEFSDMDPLHRPGIPRLYASPATPGILSQINDEIASRLCADMSLLQLQSLVYCGAVAAIRLHGQKIRFRVIGLSDKRDPPWKIRLERRRDSLRQDIARLIQISTGNASRRVRNKVQRVYRNYVIPCETPVVEILDTLKQKLSVICSRLRRYGESYSRRVQNATYARNQRSFFRSLNESQQSAQTIQFSVTEAKEYWGGLWGLNAQHAEWITAEGTRHANTPGMNFADVTEEEVRRAINISKNWRGPGLDRVQNFWYKKFTSVHSRLARSINEVMSRPEEFPPFLTAGITYLIPKKDTVQDPADTRPITCLPTLYKFITSIISGRINAHLEINNILSEEQKGCRVESRGCKEQLIIVSVVVGQATRGQRNLFSCYIDYAKAFDSVPHTWLIDILHLYRIDPKLIKFLATVMEGWHTTLSVHTSEGANTSEPIRIRRGVFQGDSLSPLWFCMALHDARGHGFAIKYGLRAKCELTHLMYLDDIKLYAGTDNHLRSLLRIIDMFSRDIRMEFGLDKCRIQAIRKGHHEPHVGHSIGDLHIEAMTETDFYKYLGILQGIHARVGDLKEPLLSEFLRRVKLVLKSHLSGKNKISALNVFAIPSLAYAFGILPWTKTDLENVQRRIRTTMSKFRMHHPKSAVERMNLPRDIGGRGVVDVAAQHHRQVDSLRAYFYSKEQASPLHAAVCKADCELTPLNLKDRSFNPLSGVKSDQEWIEEWKSKAMHGKHVNCLWQPFVDLHLSNRWLCAGELFAETEGFMCAIQDGVVATRAYKKLIMKERVENDQCRMCGSALETLDHLISGCTVMAPVQYITRHNAVCKVIHQNLAYKHGLITGTCPVYRYEPQAVLDSSAYSMYWDRQVLTDRHTAHNKPDVLLVDKTGRSAYIIDVAIPHNRNIERKYVEKKVNYEPLAREIKEIWRLERVVVVPVILSATGIVPKSLTASLDVLGLSHSLVQTMQKYTILHTCSMLRGVLDGFSH

SEQ ID NO: 2194 - protein, 1188 aa, Hermetia illucens
MHHQKMRRRRDLRSGTDNRRESSDLVTGSGSRNGQYGVETASRGAVRRLGATTTRSTAPPAAAVSPQSLATTSAGSRRKRMKWTEEMNLFIIRSYYEITAGAGITSYRPLLHQRFVERFPQFAHVTVQRVADQYRFITRSDTIPATIRERVRLEVFGETGDRESMGAEAAASTTPRRTAGNRFSTRRSTLLHRPSEVSAEVRDEFQRACIEFSDMDPLHRPGIPRLYASPATPGILSQINDEIASRLCADMSLLQLQLLVYCGAVAAIRLHGQKIRFRVIGLSDKRDPPWKIRLERRRDSLRQDIARLIQISTGNASRRVRNKVQTVYRNYAIPCETPVVEILDTLKQKLSVICSRLRRYGESYSRRVQNATYARNQRSFFRSLNESQQSAQTIQFSVTEAKEYWGGLWGLPAQHAEHAEWITAEGTRPANTPGMNFADVTEEEVRRAINISKNWRGPGLDRVQNFWYKKFTSVHSRLARSINEVMSRPEEFPPFLTAGITYLIPKKDTVQDPADTRPITILPTLYKFITSIISGRINAHLETNNILSEEQKGCRVGSRGCKEQLIIDSVVVGQATRGQRNLFSCYIDYAKAFDSVPHTWLIDILHLYRIDPKLIKFLATVMEGWHTTLSVRTSEGANTSEPIRIRRGIFQGDSLSPLWFCMALNPLSWLLNDARGHGFAIKYGLRAKCELTHLMYLDDIKLYAGTDNHLRSLLRIIDMFSRDIRMEFGLDKCRIQAIRKGHHEPHVGHSIEAMTETDFYKYLGILQGTHARVGDLKEALLSEFLRRVKLVLKSHLSGKNKISALNVFAIPSLAYAFGILPWTKTDLENVQRRIRTTMSKFRMHHPKSAVERMNLPRDIGGRGVVDVAAQHHRQVDSLRAYFYSKEQASPLHAAVCKADCGLTPLNLKDRSFNPLSGVKSDQERIEEWKSKAMHAKHVNCLWQPFVDLHLSNRWLCAGELFAETEGFMCAIQDGVVATRAYKKLIMKERVENDRCRMCGSALETLDHLISGCTVMAPVQYITRHNAVCKVIHQNLAYKHGLITGTCPVYRYEPQAVLDSSAYSMYWDRQVLTDRHTAHNKPVVLLVDKTGRSAYIIDVAIPHNSNIERKYVEKKVNYEPLAREIKEIWRLERVVVVPIILSATGIVPKSLTASLDVLGLSHSLVQTMQKYTILHTCSMLRGVLDGFSH

SEQ ID NO: 2195 - protein, 953 aa, Hermetia illucens
MHHQKMRRRRNLRSGTDNRRESSDLVTGSGSRNGQHGVETASRGAVRRLGATTTRSTAPPAAAVSPQSVATTSAGSRRKRMKWTEEMNLFIIRSYYEITVGAGTTSYRPLLHQSQLRRLRRYGESYSRRVQNATYARNQRSFFRSLNESQQSAQTIQFLVTEAKEYWGRLWGLPAQHAEHAEWITAEGTRHANTPGMNFADVTEEEVRRAINISKNWRGPGLDRVQNFWYKKFTSVHSRLARSINDIMSRPEEFPSFLTAGITYLIPKKDTVQDPADTRPITCLPTLYKFITSIISGRINAHLETNNILSEEQKGCRVGSRGCKEQLIIDSVVVGQATRSQRNLFSCYIDYAKAFDTVPHTWLIDILHLYRIDPKLIKFLATVLEGWHTTLSVRTSEGANTSEPIRIRRGIFQGDSLSPLWFCMALNPLSWLLNDARGHGFALKYGLRAKCELTHLMYLDDIKLYAGTDNHLRSLLRIIDMFSRDIRMELDKCRIQAIRKGHHEPHAGHSIGDLHIEAMTETDFYKYLGILQGTHARVGDLKEALLSEFLRRVKLVLKSHLSGKNKISALNVFAIPSLAYAFGILPWTKTDLENVQRRIRTTMSKFRMHHPKSAVERMNLPRDIGGRGVVDVAAQHHRQVDSLRAYFYSKEQASPLHAAVCKADCGLTPLNLKDRSFNPLSGVKSDQERIEERKSKAMHGKHVNCLWQPFVDLHLSNRWLCAGELFAETEGFMCAIQDGVVATRAYKRLIMKERVENDQCRMCGSALETLDHLISGCTVMAPVQYITRRNAVCKVIHQNLAYKHGLITGTCPVYRYEPQAVLDSSAYSMYWDRQVLTDRHTAHNKPDVLLVDKTGRSAYIIDVAIPHNSNIERKYVEKKVNYEPLAREIKEIWRLERVVVVPIILSATGIVPKSLTASLDVLGLSHSLVQTMQKYTILHTCSMLRGVLDGFSH

SEQ ID NO: 2196 - protein, 1186 aa, Hermetia illucens
MRRRRNLRSGTDNRRESSDLVTGSGSRNGQHGVETASRGAVRRLGATTTRSTAPPAAAVSPQPVATTSAGSRRKRMKWTEEMNLFIIRSYYEITAGAGTTSYRPLLHQRFVERFPQFAHVTVQRVADQYRFITRSDTIPATIRERVRLEVIGETGDRESMGAEAAASTTSRRTAGNRFSTRRSTLLHRPAEVSAEVRDEFQRACIEFSDMDPLHRPGIPRLYASPATPGILSQINDEIASRLCADMSLLQLQSLVYCGAVAAIRLHGQKIRFRVIGLSDKRDPPWKIRLERRRDSLRQDIARLIQISTGNASRRVRNKVQRVYRNYAIPCETPVVEILDTLKQKLSVICSRLRRYGESYSRRVQGATYARNQRSFFRSLNESQQSAQTIQFSVTEAKEYWGGLWGLPAQHAEHAEWITAEGTRHVNTPGMNFADVTEEEVRRAINSSKNWRGPGLDRVQNFWYKKFTSVHSRLARSINEVMSRPEEFPPFLTAGITYLIPKKDTVQDPADTRPITCLPTLYKFITSIISGRINAYLETNNILSEEQKGCRVGSRGCKEQLIIDSVVVGQATRGQRNLFSCYIDYAKAFDSVPHTWLIDILHLYRIDPKLIKFLATAMEATTLSVRTSEGANTSEPIRIRRGIFQGDSLSPLWFCMALNPLSWLLNDARGHGFAIKYGLRAKCELTHLMYLDDIKLYAGTDNHLRSLLRIIDMFSRDIRMEFGLDKCRIQAIRKGHHEPHAGHSIGDLHIEAMTETDFYKCLGILQGTHARVGDLKEALLSEFLRRVKLVLKSHLSGKNKISALNVFAIPSLAYAFGILPWMKTDLENVQRRIRTTMSKFRMHHPKSAVERMNLPRDIGGRGVVDVAAQHHRQVDSLRAYFYSKEQASPLHAAVCKADCGLTPLNFKDRSFNPLSGVKSDQERIEEWKSKAMHGKHVNCLWQPFVDLHLSNRWLCAGELFAETEGFMCAIQDGVVATRAYKKLIMKERVENDQCRMCGSALETLDHLISGCTVMAPVQYITRHNAVCKVIHQNLAYKHGLIAGTCPVYRYEPQAVLDSSAYSMYWDRQVLTDRHTAHNKPDVLLVDKTGRSAYIIDVAIPHNSNIERKYVEKKVNYEPLAREIKEIWRLERVVVVPIILSATGIVPKSLTASLDVLGLSHSLVQTMQKYTILHTCSMLRGVQDGFSH

SEQ ID NO: 2197 - protein, 1234 aa, Mimas tiliae
MNEFILRTYLYLTTMETDTKAYLLPLHTKFTDKFPYMQVSKQNLGDQRRAIIRRKLLPQTTIDQIYNEVKDELNTVQAEIEHHHFQAPQTGQRMKWTNEYNESIMRAYYTITRLETDKTAYRKQLHEYFVNKFPHLAHLSEQRISDQRRVIINNSLVSKNRLDTIRQQIAQELRISQPSFTQNTDRNDVMSLSNHESTQIVINNASSSTSENRAHTNVEEEEINTAFATALEYFTNTSPTNRPYIPRQKSSKKLSRIVNFINENILPTKLHDDIDFNTLQTILYCAAWTTSKINGSKLTIPPTEPVTRTQYNQKPKWQRRLENKIAVLRVNLGRLTQYIRGNRSTKLKKHIHNILNHYKIHTTHEEENTQLTQFLDTLKQKLAVSSSRLDRYTNCTLRKKQNVEFITNERKFYRNLKTNTTNQTDSTRNICTPEPDKLKDFWANIWENPVTHNHDTPWIRSEIQQAENIVTMSYEHIPMEVFKRIINQLHNWKAPGSDHLHNFWYKHLTCAHPYIYNHINNFIQNPQEMPDYITTGITYMLPKDESDFSNPAKYRPITCLQTIYKIITACLADLIYTHTQNNNILAEQQKGCRKFSRGCKEQITIDSVILGQVQHTKNSLYTTYIDYKKAFDSVPHSYLLQILHIYKINPQIINFLNTTINKWSTQLNLKTSNGILTSDQIKIQRGIFQGDALSPLWFCLALNPLSHILNSTKIGYKLKYTETHHNNSTREYTLNHLLYMDDIKLYATTKTGLNKLIDATEQFSTHINMEFGIDKCKVNSVRAGQLIQHNYQLQSGETIHSLAENETYKYLGLNQSRQIHNKDTKNNFTTEFKHRLNTIFKSQLHSKNIIKALNTYAVPILTYSFGILNWSKTELKNLQRSINVIMTKHRKHHPRACVQRQTLPRKEGGRGIIDLINLHNKQITNMRTYFHNKFDSKLHLAIAQNDCKLTPLNLQDKNAHPNEIQTSMQTKVMEWTRKSLHGRHRQDLSQTNVDKNASNDWLVRGELFPETEGFMVAIQDQVMETRNYQKYIIKNPNLSTDTCRRCNSSSETIQHITGACKSIVQTDYKHRHDQVAYIVHQKLAIKYNLLSSSTPYYKYTPDAILENTSHKLYFDRAVLTDRTINYNRPDIILIDKIKKTALLIDIAIPNTHNLQSTISEKLSKYIDLKDEVARIWHLNKVTIVPVVLSTTGVIPIQLHDSLKTLQLPKFLYSSLQKAVIINTCRIVRKFLQMA

SEQ ID NO: 2198 - protein, 1352 aa, Mimas tiliae
MENNRNCKYNLRSLPGGRRGTPGAGAGCLSNANTGGGSIRLAPAQHNNATADARSETESVPSLFSSIPSSITPSYRITRSHSSSISIHSEDVAQEVISISDAVPTTSTHTTRRKWTAEMNEFILRTYLYLTTMETDTKAYLLPLHTKFTDKFPYMQVSKQNLGDQRRAIIRRKLLPQTTIDQIYNEVKDELNTVQAEIEHHHFQAPQTGQRMKWTNEYNESIMRAYYTITRLETDKTAYRKQLHEYFVNKFPHLAHLSEQRISDQRRVIINNSLVSKNRLDTIRQQIAQELRISQPSFTQNTDRNDVMSLSNHESTQIVINNASSSTSENRAHTNVEEEEINTAFATALEYFTNTSPTNRPYIPRQKSSKKLSRIVNFINENILPTKLHDHIDFNTLQTILYCAAWTTSKINGSKLTIPPTEPVTRTQYNQKPKWQRRLENKIAVLRVNLGRLTQYIRGNRSTKLKKHIHNILNHYKIHTTHEEENTQLTQFLDTLKQKLAVSSSRLDRYTKCTLRKKQNVEFITNERNFYRNLKTNTTNQTDSTRNISTPEPDKLKDFWANIWENPVTHNQDTPWIRSEIQQAENIVTMSYEHIPMEVFKRIINRLHNWKAPGSDHLHNFWYKHLTCAHPYIYNHINNFIQNPQEMPDYITTGITYMLPKDESDFSNPAKYRPITCLQTIYKIITACLADLIYTHTQNNNILAEQQKGCRKFSRGCKEQITIDSVILGQVQHTKNSLYTTYIDYKKAFDSVPHSYLLQILHIYKINPQIINFLNTTINKWSTQLNLKTSNGILTSDQIKIQRGIFQGDALSPLWFCLALNPLSHILNSTKIGYKLKYTETHHNNSTREYTLNHLLYMDDIKLYATTKTGLNKLIDATEQFSTHINMEFGIDKCKVNSVRAGQLIQHNYQLQSGETIHSLAENETYKYLGLNQSRQIHNKDTKNNLTTEFKHRLNTIFKSQLHSKNIIKALNTYAVPILTYSFGILNWSKTELKNLQCSINVIMTKHRKHHPRACVQRQTLPRKEGGRGIIDLINLHNKQITNMRTYFHNKFDSKLHIAIAENDCKLTPLNLQDKNAHPNEIQTSMHTKVMEWTRKSLHGRHRQDLSQTNVDKNASNDWLVRGELFPETEGFMVAIQDQVMETRNYQKYIIKNPNLSTDTCRRCNSSSETIQHITGACKSIVQTDYKHRHDQVAYIVHQKLAIKYNLLSSSTPYYKYTPDAILENTSHKLYFDRAVLTDRTIHYNRPDIILIDKINKTALLIDIAIPNTHNLQSTISEKLSKYIDLKDEVARIWHLNKVTIVPVVLSTTGVIPIQLHDSLKTLQLPKFLYSSLQKAVIINTCRIVRKFLQMA

SEQ ID NO: 2199 - protein, 1198 aa, Mimas tiliae
MQVSKQNLGDQRRAIIRRKLLPQTTIDQIYNEVKDELNTVQAEIEHHHFQAPQTGQRMKWTNEYNESIMRAYYTITRLETDKTAYRKQLHEYFVNKFPHLAHLSEQRISDQRRVIINNSLVSKNRLDTIRQQIAQELRISQPSFTQNTDRNDVMSLSNHESTQIVINNASSSTSENRAHTNVEEEEINTAFATALEYFTNTSPTNRPYIPRQKSSKKLSRIVNFINENILPTKLHDDIDFNTLQTILYCAAWTTSKINGSKLTIPPTEPVTRTQYNQKPKWQRRLENKIAVLRVNLGRLTQYIRGNRSTKLKKHIHNILNHYKIHTTHEEENTQLTQFLDTLKQKLAVSSSRLDRYTKCTLRKKQNVEFITNERKFYRNLKTNTTNQTDSTRNISTPEPDKLKDFWANIWENPVTHNHDTPWIRSEIQQAENIVTMSYEHIPMEVFKRIINQLHNWKAPGSDHLHNFWYKHLTCAHPYIYNHINNFIQNPQEMPDYITTGITYMLPKDESEFSNPAKYRPITCLQTIYKIITACLADLIYTHTQNNNILAEQQKGCRKFSRGCKEQITIDSVILGQVQHTKNSLYTTYIDYTKAFDSVPHSYLLQILHIYKINPQIINFLNTTINKWSTQLNLKTSNGILTSDQIKIQRGIFQGDALSPLWFCLALNPLSHILNSTKIGYKLKYTETHHNNSTKEYTLNHLLYMDDIKLYATTKTGLNKLIDATEQFSTHINMEFGIDKCKVNSVRAGQLIQHNYQLQSGETIHSLAENETYKYLGLNQSRQIHNKDTKNNLTTEFKHRLNTIFKSQLHSKNIIKALNTYAVPILTYSFGILNWSKTELNNLQRSINVIMTKHRKHHPRACVQRQTLPRKEGGRGIIDLINLHNKQITNMRTYFHNKFDSKLHLAIAQNDCKLTPLNLQDKNAHPNEIQTSMQTKVMEWTRKSLHGRHRQDLSQTNVDKNASNDWLVRGELFPETEGFMVAIQDQVMETRNYQKYIIKNPNLSTDTCRRCNSSSETIQHITGACKSIVQTDYKHRHDQVAYIVHQKLAIKYNLLSSSTPYYKYTPDAILENTSHKLYFDRAVLTDRTIHYNRPDIILIDKINKTALLIDIAIPNTHNLQSTISEKLSKYIDLKDEVARIWHLNKVTIVPVVLSTTGVIPIQLHDSLKTLQLPKFLYSSLQKAVIINTCRIVRKFLQMA

SEQ ID NO: 2200 - protein, 958 aa, Mimas tiliae
MNDNNKTILYCAAWTTSKINGSKLTIPPTEPVTRTQYNQKPKWQRRLENKIAVLRVNLGRLTQYIRGNRSTKLKKHIHNILNHYKIHTTHEEENTKLTQFLDTLKQKLAVSSSRLDRYTKCTLRKKQNVEFITNERKFYRNLKTNTTNQTDSTRNISTPEPDKLKDFWANIWENPVTHNHDTPWIRSEIQQAENIVTMSYEHIPMEVFKRIINQLHNWKAPGSDHLHNCWYKHLTCAHPYIYNHINNFIQNPQEMPDYITTGITYMLPKDESDFSNPAKYRPITCLQTIYKIITACLADLIYTHTQNNNILAEQQKGCRKFSRGCKEQITIDSVILGQVQHTKNSLYTTYIDYKKAFDSVPHSYLLQILHIYKINPQIINFLNTTINKWSTQLNLKTSNGILTSDQIKIQRGIFQGDALSPLWFCLALNPLSHILNSTKIGYKLKYTETHHNNSTREYTLNHLLYMDDIKLYATTKTGLNKLIDATEQFSTHINMEFGIDKCKVNSVRAGQLIQHNYQLQSGETIHSLAENETYKYLGLNQSRQIHNKDTKNNLTTEFKHRLNTIFKSQLHSKNIIKALNTYAVPILTYSFGILNWSKTELKNLQRSINVIMTKHRKHHPRACVQRQTLPRKEGGRGIIDLINLHNKQITNMRTYFHNKFDSKLHLAIAQNDCKLTLLNLQDKNAHPNEIQTSMQTKVMEWTRKSLHGRHRQDLSQTNVDKNASNDWLVRGELFPETEGFMVAIQDQVMETRNYQKYIIKNPNLSTDTCRRCNSSSETIQHITGACKSIVQTDYKHRHDQVAYIVHQKLAIKYNLLSSSTPYYKYTPDAILENTSHKLYFDRAVLTDRTIHYNRPDIILIDKIKKTALLIDIAIPNTHNLQSTISEKLSKYLKDEVARIWHLNKVTIVPVVLSTTGVIPIQLHDSLKTLQLPKFLYSSLQKAVIINTCRIVRKFLQMA

SEQ ID NO: 2201 - protein, 1356 aa, Deilephila porcellus
MENSSNCKYNLRSLPGGRRGTPGAGAGCFSNANTGGGSTSRLAPAQHNNATADAFSETESAPSLFPSSSSITPSYRMSSVHSSSISIHSEDAAQEAIHVSDSVPTTSAKAKRRKWTTDMNEFILRTYLTLTLMETDTKSYLLPLHTKFSEKYPEMQVSRQRLGDQRRAIIRNNLLPQETIDKISREARQQLQIINTEIEQNRSQTAVTGHRMRWTNDLNETIIKAYYTITQLETNKTAYRKQLHEYFINKFPHLAHITEQRVADQRRVIINNALIKKNRLDAIKQQVAEELRHSNQLPVEDIQVEIAQNINNTIEAALDDNIEVLNNDLNTSTGEEAIDEIDLTFATAFEYFINTDPTNRPYVPRQKPSKKFTKIVRYLNNIVLPKKLVNDIDFYTLQTIIYCTAWTASKINGSKLTIPPRDLNHNPHNIIKPKWQKRLENKIVDLRSKIGRLTQYMRGNRNRKLVKHVQDIFRFYKIHTIHEDTNTHVAEFLDTLKQKLSVASSRLHRYLKCTLRKTQNNSFITNERKFYLNLKLNTTNHTNTTSDIGAPETRELKDFWSNIWENPITHNSNAGWIKFEIDKSANTTPMPFEYIPIEIFMKVITNIHNWKTPGSDRIHNFWYKKLTSIHPYIYNHINNFIKNPQQIPDYITTGTTFMLRKGESDSNNPANYRPITCLQTIYKIITACLADLIYTHTQNNNILAEQQKGCRKLSRGCKEQITIDSVILGQVKKTKNSLYSMYIDYKKAFDSVPHSYLLQILDIYKIHPDIINFLTTTIQKWATKLNLKTNNGTITSESIKIQRGIFQGDALSPLWFCLALNPLSNILNSVHSGYPLKYIETDQLRRTKEYKLNHLLYMDDIKLYADTEIELNKLIDLCAQFSKDVNMEFGIDKCKINSFTAGKLIPLTYQLQNGETIESLADHETYKYLGLNQSRQIHTKDTKNKLIVEFKHRLNTILKSELNSRNTTKAINTFAIPVLTYSFGILNWSKTELKNLQRIINVTMTKNRKHHPRSCIQRQILPRKEGGRGIIDIANLHNTQIGNLRSFFHEKASNSTLHLAITQNDQHLTPLNLQDTRAQPNEALVNIAAKITEWTRKSLHGRHRQDISQPNVDKAASNDWLVQGELFPETEGFMIAIQDQVIETRNYQKYIIKTRNLPTDTCRRCNSASETIQHITGACKSIVQTDYKHRHDQVANIIHQKLAVKYSLVTSSVPYYKYTPDSVLENQTHKLYFDRAILTDRTTHYNRPDITLVDKSNKTAIIIDIAVPNTHNLQSTIAEKMSKYTDLKEEITRMWHLNKVTIVPIVLSTTGIIPLQLHESIKTLQLPKFIYRSLQKAVILNTCRIVRKFLQIDKNH

SEQ ID NO: 2202 - protein, 1356 aa, Deilephila porcellus
MENSSNCKYNLRSLPGGRRGTPGAGAGCFSNANTGGGSTSRLAPAQHNNATADAFSETESAPSLFPSSSSITPSYRMSSVHSSSISIHSEDAAQEAIHVSDSVPTTSAKAKRRKWTTDMNEFILRTYLTLTLMETDTKSYLLPLHTKFSEKYPEMQVSRQRLGDQRRAIIRNNLLPQETIDKINREALQQLQIINTEIEQNRSQTAVTGHRMRWTNDLNETIIKAYYTITQLETNKTAYRKQLHEYFINKFPHLAHITEQRVADQRRVIINNALINKNKLDAIKQQVAEELRHSNQLPVEEIQVEIAQNINNTIEAALDDNIEVLNNDLNTSTGEEAIDEIDLTFATAFEYFMNTDPTNRPYVPRQKPSKKFTKIVRYLNNIVLPKKLVNDIDFYTLQTIIYCTAWTASKINGSKLTIPPRDLNHNPHNIIKPKWQKRLENKIVDLRSKIGRLTQYMRGNRNRKLVKHVQDIFRFYKIHTIHEDTNTHVAEFLDTLKQKLSVASSRLHRYLKCTLRKTQNNSFITNERKFYLNLKLNTTNHTNTTSDIGAPETRELKDFWSDIWENPITHNSNAGWIKSEIDKSANTTPMPFEYIPIEIFMKVITNIHNWKTPGSDRIHNFWYKKLTSIHPYIYNHINNFIKNPQQIPDYITTGTTFMLRKGESDSNNPANYRPITCLQTIYKIITACLADLIYTHTQNNNILAEQQKGCRKLSRGCKEQITIDSVILGQVKKTKNSLYSMYIDYKKAFDSVPHSYLLQILDIYKIHPDIINFLTTTIQKWATKLNLKTNNGTITSESIKIQRGIFQGDALSPLWFCLALNPLSNILNSVHSGYPLKYIETDQLRRTKEYKLNHLLYMDDIKLYAGTEIELNKLIDLCAQFSKDVNMEFGIDKCKINSFTAGKLIPLTYQLQNGETIESLADHETYKYLGLNQSRQIHTKDTKNKLIVEFKHRLNTILKSELNSRNTTKAINTFAIPVLTYSFGILNWSKTELKNLQRIINVTMTKNRKHHPRSCIQRQILPRKEGGRGIIDIANLHNTQIGNLRSFFHEKASNSTLHLAITQNDQHLTPLNLQDTRAQPNEALVNIAAKITKWTRKCLHGRHRQDISQPNVDKAASNDWLVQGELFPETEGFMIAIQDQVIETRNYQKYIIKTRNLPTDTCRRCNSASETIQHITGACKSIVQTDYKHRHDQVANIIHQKLAVKYSLVTSSVPYYKYTPDSVLENQTHKLYFDRAILTDRTTHYNRPDITLVDKSNKTAIIIDIAVPNTHNLQSTIAEKMSKYTDLKEEITRMWHLNKVTIVPIVLSTTGIIPLQLHESIKTLQLPKFIYRSLQKAVILNTCRIVRKFLQIDKNH

SEQ ID NO: 2203 - protein, 1356 aa, Deilephila porcellus
MENSSNCKYNLRSLPGGRRGTPGAGAGCFSNANTGGGSTSRLAPAQHNNATADAFSETESAPSLFPSSSSITPSYRMSSVHSSSISIHSEDAAQEAIHVSDSVPTTSAKAKRRKWTTDMNEFILRTYLTLTLMETDTKSYLLPLHTKFSEKYPEMQVSRQRLGDQRRAIIRNNLLPQETIDKISREARQQLQIINTEIEQNRSQTAVTGHRMRWTNDLNETIIKAYYTITQLETNKTAYRKQLHEYFINKFPHLAHITEQRVADQRRVIINNALINKNRLDAIKQQVAEELRHSNQLPVEDIQVEIAQNINNTIEAALDDNIEVLNNDLNTSTGEEAIDEIDLTFATAFEYFINTDPTNRPYVPRQKPSKKFTKIVRYLNNIVLPKKLVNDIDFYTLQTIIYCTAWTASKINGSKLTIPPRDLNHNPHNIIKPKWQKRLENKIVDLRSKIGRLTQYMRGNRNRKLVKHVQDIFRFYKIHTIHEDTNTHVAEFLDTLKQKLSVASSRLHRYLKCTLRKTQNNSFITNERKFYLNLKLNTTNHTNTTSDIGAPETRELKDFWSNIWENPITHNSNAEWIKSEIDKSANTTPMPFEYIPIEIFMKVITNIHNWKTPGSDRIHNFWYKKLTSIHPYIYNHINNFIKNPQQIPDYITTGTTYMLRKGESDSNKPANYRPITCLQTIYKIITACLADLIYTHTQNNNILAEQQKGCRKLSRGCKEQITIDSVILGQVKKTKNSLYSMYIDYKKAFDSVPHSYLLQILDIYKIHPDIINFLTTTIQKWATKLNLKTNNGTITSESIKIQRGIFQGDALSPLWFCLALNPLSNILNSVHSGYPLKYIETDQVRRTKEYKLNHLLYMDDIKLYADTEIELNKLIDLCAQFSKDVNMEFGIDKCKINSFTAGKLIPLTYQLQNGETIESLADHETYKYLGLNQSRQIHTKDTKNKLIVEFKHRLNTILKSELNSRNTTKAINTFAIPVLTYSFGILNWSKTELKNLQRIINVTMTKNRKHHPRSCIQRQILPRKEGGRGIIDIANLHNTQIGNLRSFFHEKASNSTLHLAITQNDQHLTPLNLQDTRAQPNEALVNIAAKITEWTRKSLHGRHRQDISQPNVDKAASNDWLEQGELFPETEGFMIAIQDQVIETRNYQKYIIKTRNLPTDTCRRCNSASETIQHITGACKSIVQTDYKHRHDQVANIIHQKLAVKYSLVTSSVPYYKYTPDSVLENQTHKLYFDRAILTDRTTHYNRPDITLVDKSNKTAIIIDIAVPNTHNLQSTIAEKMSKYTDLKEEITRMWHLNKVTIVPIVLSTTGIIPLQLHESIKTLQLPKFIYRSLQKAVILNTCRIVRKFLQIDKNH

SEQ ID NO: 2204 - protein, 1280 aa, Deilephila porcellus
MSSVHSSSISIHSEDAAQEAIHVSDSVPTTSAKAKRRKWTTDMNEFILRTYLTLTLMETDTKSYLLPLHTKFSEKYPEMQVSRQRLGDQRRAIIRNNLLPQETIDKINREARQQLQMINTEIEQNRSQTAVTGHRMRWTNDLNETIIKAYYTITQLETNKTAYRKQLHEYFINKFPHLAHITEQRVADQRRVIINNALIHKNRLDAIKQQVAEELRHSNQLPVEDIQVEIAQNINNTIEAALDDNIEVLNNDLNTSTGEEAIDEIDLTFATAFEYFINTDPTNRPYVPRQKPSKKFTKIVRYLNSIVLPKKLVNDIDFYTLQTIIYCTAWTASKINGSKLTIPPRDLNHNPHNIIKPKWQKRLENKIVDLRSKIGRLTQYMRGNRNRKLVKHVQNIFRFYKIHTIHEDTNTHVAEFLDTLKQKLSVASSRLHRYLKCTLRKTQNNSFITNERKFYLNLKLNTTNHTNTTSDIGAPETRELKDFWSNIWENPITHNCNAGWIKSEIDKSANTTPMPFEYIPIEIFMKVITNIHNWKTPGSDRIHNFWYKKLTSIHPYIYNHINNFIKNPQQIPDYITTGTTFMLRKGESDSNNPANYRPITCLQTIYKIITACLADLIYTHTQNNNILEEQQKGCRKLSRGCKEQITIDSVILGQVKKTKSSLYSMYIDYKKAFDSVPHSYLLQILDIYKIHPDIINFLTTTIQKWATKLNLKTNNGTITSESIKIQRGIFQGDALSPLWFCLALNPLSNILNSVHSGYPLKYIETDQLRRTKEYKLNHLLYMDDIKLYAGTEIELNKLIDLCAQFSKDVNMEFGIDKCKINSFTAGKLIPLTYQLQNGETIESLADHETYKYLGLNQSRQIHTKDTKNKLIVEFKHRLNTILKSELNSRNTTKAINTFAISVLTYSFGILNWSKTELKNLQRIINVTMTKNRKHHPRSCIQRQILPRKEGGRGIIDIANLHNTQIGNLRTFFHEKASNSTLHLAITQNDQHLTPLNLQDTRAQPNEALVNIAAKITEWTRKSLHGRHRQDISQPNVDKAASNDWLVQGELFPETEGFMIAIQDQVIETRNYQKYIIKTRNLPTDTCRRCNSASETIQHITGACKSIVQTDYKHRHDQVANIIHQKLAVKYSLVTSSVPYYKYTPDSVLENQTHKLYFDRAIFTDRTTHYNRPDITLVDKSNKTAIIIDIAVPNTHNLQSTIAEKMSKYTDLKEEITRMWHLNKVTIVPIVLSTTGIIPLQLHESIKTLQLPKFIYRSLQKAVILNTCRIVRKFLQIDKNH

SEQ ID NO: 2205 - protein, 1356 aa, Deilephila porcellus
MENSSNCKYNLRSLPGGRRGTPGAGAGCFSNANTGGGSTSRLAPAQHNNATADAFSETESAPSLFPSSSSITPSYRMSSVHSSSISIHSEDAAQEAIHVSDSVPTTSAKAKRRKWTTDMNEFILRTYLTLTLMETDTKSYLLPLHTKFSEKYPEMQVSRQRLGDQRRAIIRNNLLPQETIDKINREARQQLQIINTEIEQNRSQTAVTGHRMRWTNDLNETIIKAYYTITQLETNKTAYRKQLHEYFINKFPHLAHITEQRVADQRRVIINNALINKNRLDAIKQQVAEELRHSNQLPVEDIQVEIAQNINNTIGAALDDNIEVLNNDLNTSTDEEAIDEIDLTFATAFEYFINTDPTNRPYVPRQKPSKKFTKIVRYLNNIVLPKKLVNDIDFYTLQTIIYCTAWTASKINGSKLTIPPRDLNHNPHNIIKPKWQKRLENKIVDLRSKIGRLTQYMRGNRNRKLVKHVQDIFRFYKIHTIHEDTNTHVAEFLDTLKQKLSVASSRLHRYLKCTLRKTQNNSFITNERKFYLNLKLNTTNHTNTTSDIGAPETRELKDFWSNIWENPITHNSNAGWIKSEIDKSANTTPMPFEYIPIEIFMKVITNIHNWKTPGSDRIHNFWYKKLTSIHPYIYNHINNFIKNPQQIPDYITTGTTFMLRKGESDSNNPANYRPITCLQTIYKIITACLADLIYTHTQNNNILAEQQKGCRKLSRGCKEQITIDSVILGQVKKTKNSLYSMYIDYKKAFDSVPHSYLLQILDIYKIHPDIINFLTTTIHKWATKLNLKTNNGTITSESIKIQRGIFQGDALSPLWFCLALNPLSNILNSVHSGYPLKYIETDQLRRTKEYKLNHLLYMDDIKLYADTEIELNKLIDLCAQFSKDVNMEFGIDKCKINSFTAGKLIPLTYQLQNGETIESLADHETYKYLGLNQSRQIHTKDTKNKLIVEFKHRLNTILKSELNSRNTTKAINTFAIPVLTYSFGILNWSKTELKNLQRIINVTMTKNRKHHPRSCIQRQILPRKEGGRGIIDIANLHNTQIGNLRSFFHEKAINSTLHLAITQNDQHLTPLNLQDTHAQPNETLVNIAAKITEWTRKSLHGRHRQDISQPNVDKAASNDWLVQGELFPETEGFMIAIQDQVIETRNYQKYIIKTRNLPTDTCRRCNSASETIQHITGACKSIVQTDYKHRHDQVANIIHQKLAVKYSLVTSSVPYYKYTPDSVLENQTHKLYFDRAILTDRTTHYNRPDITLVDKSNKTAIIIDIAVSNTHNLQSTIAEKISKYTDLKEEITRMWHLNKVTIVPIVLSTTGIIPLQLHESIKTLQLPKFIYRSLQKAVILNTCRIVRKFLQIDKNY

SEQ ID NO: 2206 - protein, 1402 aa, Fabriciana adippe
MANVAMVTHQLLMETRSKSKRLGPLPGGDRRGAPGAGAGCYSLRSVSGSELSRRAPTDKNVTADPSPSPSSPNSLPPPPPSSSSSPKSLFSSLPSSPPSYLGAITESSSQSVQSENVAQEIVSISDAEPTSRRTRTKWTPEMNQFILRTYLYLTAMGTDTKAYLEPLHTKFTEKFPHIHVTRNIIGGQRRAIVDKKYIPKDIVDKIHAEVKAELDNIQSATKTQQHLMTQTIAPAPGKRMKWSTDLYETLVRGYYTVTRLETNKTAYRQQLHQYFINAHPHLSHVSEQQVADQRGQVFKNRRLISADRLNAIKQQVADELRLDNPRTDNPLTQDITIGTPNTQQMIDIFSNIDTEISQETEPNTTAEEEKIRNLEIDKTFQTTLSYFAHTSPTERPYIPKQRLSKKLAQTIEYINKIILPTKIDNHTPFETLQTLIYCAAWTASKINGTKLIIPSTTPETITTHRNRKPNWQRRIENKISDLRAKIARLTQYIRGIRTESLTNHINKILKQYKVHSTYENSNTELSQFLDTLKQKLTVASSRLKRYKKCTQRKTQNNDFKNNERKFYQNIRNSTSNQTHHNVGPDSQQIKDFWGKVWDNPVSHNADAEWIQSEKNKFINIEPMSYEHIPLSVFTNVINKLHNWKAPGSDHIYNYWYKKFTFAHPYIYNSLNHFIQNPQDLPDYFTAGTTYMLPKDPDDHLNPAKYRPITCLQSIYKILTACLADLIYSHVENNNILAEQQKGCRKFSRGCKEQITIDAVILSQVQRNKKDLYSMYIDYKKAFDSVPHTWLLEILHIYKIHPKLITFLETAVTNWNTKLNLKTNNGSLTTESIKIRRGIFQGDTLSPLWFCLALNPLSNLLNSIDAGYELKYKDTNVETWTEQTKTLKLNHLLYMDDIKLYAKTQTQLNDLAEITETFSTDINMEFGIDKCKINSVKAGKTIQHNYDLQTGDTIESLSENETYKYLGLNQSRQIHHKETRHKLTQEFKHRLNTILKSQLNSKNIVKAINTFAIPILTYTFGILNWPKSEIKKLQRIINVSMTKHRKHHPRACIQRQILPRKEGGRGIIDLENLHNNQIHNLRKYFHNKALNSDLHLAITQNDTKLTALNLHDTSTLTSETTIETKIGEWTRKSLHGRHRQDLCQPNVDKDASNEWLVRGDLFPETEGFMIAIQDQVIETRNYQKHIIRTPNLRTDICRRCNSATETIQHITGACKAIVQTDYKHRHDQVANILHQKLALKYKLISSWTPYYKYTPDTVLENSTHKLYFDRAILTDRTVHHNRPDITLVDKTHKTAQLIDIAIPNTHNIQNTIAEKFSKYIDLKDEIARMWKLNKVTIVPIVLSTTGVIPTQLHQSLETLQLPKYTYITLQKAAILNTCRIVRKFLQTDHSETSAEQSHSLNLP

SEQ ID NO: 2207 - protein, 1261 aa, Fabriciana adippe
MNQFILRTYLYLTAMGTDTKAYLEPLHTKFTEKFPHIHVTRNIIGGQRRAIVDKKYIPKDIVDKIHAEVKAELDNIQSATKTQQHLMTQTIAPAPGKRMKWSTDLYETLVRGYYTVTRLETNKTAYRQQLHQYFINAHPHLSHVSEQQVADQRGQVFKNRRLISADRLNAIKQQVADDLRLDNLRTDNPLTQDITIGTPNTQQMIDIFSNIDTEISQETEPNTTAEEEKIRNLEIDKTFQTTLSYFAHTSPTERPYIPKQRLSKKLAQTIEYINKIILPTKIDNHTPFETLQTLIYCAAWTASKINGTKLIIPSTTPETITTHRNRKPNWQRRIENKISDLRAKIARLTQYIRGIRTESLTNHVNKILKQYKVHSTYENSNTELPQFLDTLKQKLTVASSRLKRYKKCTQRKTQNNDFKNNERKFYQNIRNSTSNQTHHNVGPDSQQIKDFWGKVWDNPVSHNADAEWIQSEKNKFINIELMSYEHIPLSVFTNVINKLHNWKAPGSDHIHNYWYKKFTFAHPYIYNSLNHFIQNPQDLPDYFTAGTTYLLPKDPDDHLNPAKYRPITCLQSIYKILTACLADLIYSHVENNNILAEQQKGCRKFSRGCKEQITIDAVILSQVQRNKKDLYSMYIDYKKAFDSVPHTWLLEILHIYKIHPKLITFLETAVTNWNTKLNLKTNNGSLTTESIKIRRGIFQGDTLSPLWFCLALNPLSNLLNSIDAGYELKYKDTNVETWTEQTKTLKLNHLLYMDDIKLYAKTQTQLNDLAEITETFSTDINMEFGIDKCKINSVKAGKTIQHNYDLQTGATIESLSENETYKYLGLNQSRQIHHKETRHKLTQEFKHRLNTILKSQLNSKNIVKAINTFAIPVLTYTFGILNWPKSEIKKLQRIINVSMTKHRKHHPRACIQRQILPRKEGGRGIIDLENLHNSQIHNLRKYFHNKALNSDLHLAITQNDTNLTALNLHDPSTLTNETTIETKISEWTRKSLHGRHRQDLCQPNVDKDASNEWLVRGELFPETEGFMIAIQDQVIETRNYQKHIIRTPNLRTDICRRCNSATETIQHITGACKTIVQTDYKHRHDQVANILHQKLALKYKLISSWTPYYKYTPDTVLENSTHKLYFDRAILTDRTVHHNRPDITLVDKTHKTAQLIDIAIPNTHNIQNTIAEKFSKYIDLKDEIARMWKLNKVTIVPIVLSTTGVIPTQLHQSLETLQLPKYTYITLQKAAILNTCRIVRKFLQTDHSETSAEQSHSLNLP

SEQ ID NO: 2208 - protein, 1402 aa, Fabriciana adippe
MANVAMVTHQLLMETRSKSKRLGPLPGGDRRGAPGAGAGCYSLRSVSGSELSRRAPTDKNVTADPSPSPSSPNSLPPPPPSSSSSPKSLFSSLLSSPPSYLGAITESSSQSVQSENVAQEIVSISDAVPTSRRTRTKWTPEMNQFILRTYLYLTAMGTDTKAYLEPLHTKFTEKFPHIHVTRNIIGGQRRAIVDKKYIPKDIVDKIHAEVKAELDNIQSATKTQQHLMTQTIAPAPGKRMKWSTDLYETLVRGYYTVTRLETNKTAYRQQLHQYFINAHPHLSHVSEQQVADQRGQVFKNRRLISADRLNAIKQQVADELRLDNPRTDNPLTQDITIGTPNTQQMIDIFSNIDTEISQETEPNTTAEEEKLRNLEIDKTFQTTLSYFAHTSPTERPYIPKQRLSKKLAQTIEYINKIILPTKIDNHTPFETLQTLIYCAAWTASKINGTKLIIPSTTPETITTHRNRKPNWQRRIENKISDLRAKIARLTQYIRGIRTESLTNHVNKILKQYKVHSTYENSNTELSQFLDTLKQKLTVASSRLKRYKKCTQRKTQNNDFKNNERKFYQNIRNSTSNQTHHNVGPDSQQIKDFWGKVWDNPVSHNADAEWIQSEKNKFINIEPMSYEHIPLSVFTNVINKLHNWKAPGSDHIYNYWYKKFTFAHPYIYNSLNHFIQNPQDLPDYFTAGTTYMLPKDPDDHLNPAKYRPITCLQSIYKILTACLADLIYSHVENNNILAEQQKGCRKFSRGCKEQITIDAVILSQVQRNKKDLYSMYIDYKKAFDSVPHTWLLEILHIYKIHPKLITFLETAVTNWNTKLNLKTNNGSLTTESIKIRRGIFQGDTLSPLWFCLALNPLSNLLNSIDAGYELKYKDTNVETWTEQTKTLKLNHLLYMDDIKLYAKTQTQLNDLAEITETFSTDINMEFGIDKCKINSVKAGKTIQHNYDLQTGATIESLSENETYKYLGLNQSRQIHHKETRHKLTQEFKHRLNTILKSQLNSKNIVKAINTFAIPILTYTFGILNWPKSEIKKLQRIINVSMTKHRKHHPRACIQRQILPRKEGGRGIIDLENLHNNQIHNLRKYFHNKALNSDLHLAITQNDTKLTALNLHDTSTLTSETTIETKIGEWTRKSLHGRHRQDLCQPNVDKDASNEWLVRGDLFPETEGFMIAIQDQVIETRNYQKHIIRTPNLRTDICRRCNSATETIQHITGACKAIVQTDYKHRHDQVANILHQKLALKYKLISSWTPYYKYTPDTVLENSTHKLYFDRAILTDRTVHHNRPNITLVDKTHKTAQLIDIAIPNTHNIQNTIAEKFSKYIDLKDEIARMWKLNKVTIVPIVLSTTGVIPTQLHQSLETLQLPKYTYITLQKAAILNTCRIVRKFLQTDHSETSAEQSHSLNLP

SEQ ID NO: 2209 - protein, 945 aa, Hemaris fuciformis
MNGAKLTLPPPELSNNTEYLMKPRWQKRLENKIADIRAKIGRLTQYIQGNRNIKVTKHVNRILDSYKIHTTHEEANTEISQFLDTLKQKLSVFSGRLHRYLKCTNRKSQNNKFTNNERKFYQNLKSNTTNQTHTHPNNISPDLEKLKEFWANIWENPMTHNSDTNWIQTELDQADKVADMSYDHIPLAVFKNVIRNLHNWKTPGSDRIHNFWYKKLTNVHPYIYNHINSFIKNPQDVPDYITIGTTFMLPKDETDISDPAKYRPITCLQTIYKIMTACLADLIYVHTQGNNILAEQQKGCKKSSRGCKEQITIDSVILGQAQHTKNSLYSTYIDYKKAYDSVPHSYLLKILEIYKINPQIITFLSTIMNKWSTQLSLKCNNKIIRTDMIKIQRGIFQGDALSSLWFCLALNPLSNILNSVDTGFPLKYKETNHISHLKLYKINHLLYMDDIKLYGSTENELKMLISLTEQFSKDIKMTFGIDKCKINSYRAGHLLQLNYQLQSGETIESLTEHESYKYLGLSQSRQIHNKEIKKKLTLAFKHRLNSILKTELNSKNTTKAINTFAIPVLTYSFGIINWSKTELKKLQRTINVIMTKNRKHHPRACIQRQTLPRQEGGRGIIDLTNLHNAQISNLRSFFHEKSNHSNLHLAIAQNDINLTPLNLHDKTTQRNETQIDVKAKINEWTQKSLHGRHRLDISHPNVDKNASNEWLVQGQLFPETEGFMIAIQDQVIETRNYQKYIMKTPNLPTDICRRCNSASETIQHITGACKSIVQTDYKHRHDQVAYIIHQKLANKYNLIASSTPYYKYTPETILENEKYKLYFDRAILTDRTVHYNRPDITVVDKTNKTALLIDIAVPNSHNVQNTIAEKISKYIDLKDEISRIWHLNKVTIVPIVLSTTGVIPMQLHESLKFLDLPKFIYKSLQKAVLINTCRIVRKFLQTDQK

SEQ ID NO: 2210 - protein, 1358 aa, Deilephila porcellus
MENLRNSRYNLRSLPGGRRGTPGAGAGCLSNANTGGGSTSRLAPAQHNNTTADALSETESAPSLFSSISSSITPSYRISRTHSSSSTLSAHLEDAVQEGIPETVPTTSAITTRRKWSTEMNEFILRTYLYLTSMETDTKAYLVPLHTKFIEKFPHVDVSRQRLGDQRRAIVRNKLLPQATIDSIHSEVERELNIISTDIEQHLYTPNAGQRMKWTNDLNETIIKAYYTITRLETDKTAYRKQLHEYFVNKYPHLAHVTEQRIADQRRVIINNRLISNERLHAIKLEVTEELQLDQQPMNTEINENTMCRQNIAEAEETNNNYNNNYNTVNTNSMDGIEVIEEIDTAFASATVYFENISPTNRPYIPRQKTSKNFSKIVNYINNNILPNKLNNDTDFGTLQTLIYCSAWTASKMNDTKLSIPTAEQNNNTEFPMKPKWQKRLEYKIANLRAKIGRVTQYIRGNRSKKIIKHVENVLKYYKIHTTHEEANTQIPEFLDTLKQKLSVASGRLKRYLKCTQRKSQNNQFIHNERKFYQNLKSNTTNRTNISAHTSPPDPEQLQDFWTNIWETPITHNKDADWIQIESQKAADNIVTMSYEHIPLEVFKKVISKLHNWKTPGSDRIHNFWYKKLTNIHPYIYKHINNFIENPLTMPEYITTGTTFMLPKDETDTSNPAQYRPITCLQTIYKIVTACLADLIYTHTQDNNLLAEQQKGCKKHSRGCKEQITVDSVILGNVQQNKNSLYSTYIDYKKAFDSVPHSYLLHLLDIYKIHPTIINFLATTIKKWTTQLHLKTNNTTVTTGIIKIQRGIFQGDALSPLWFCLALNPLSNLLNSTDIGYPLKYTDTAEPDHIRIYRLNHLLYMDDIKLYADTEIDLNKLISLTEQFSRDINMEFGINKCKINSFRSGILLPIDYQLQSGETIHSLTERESYKYLGLQQSRQIHYKETKNKLTLEFRHRLNTILKSQLNSKNTSKAINTYAIPILTYSFGIINWSKTDLKKLQRTINVLMTKHRKHHPRACIQRQTLPRKEGGRGIIDLTNLHNSQISNLRLFFHRKSSDSNLHLAITQNDHSLTPLNLHDRNTQLNEVQIDVRSKINEWARKSLHGRHRSDISQANVDKNASNDWLVHGELFPETEGFMVAIQDQVIETRNYQKFIIKNRNLPTDVCRRCNSVPETIQHITGACKSIVQTDYKHRHDQVAHIIHQKLAIKYNLLTSSMPYYKYIPDTILENQTHKIYFDRAILTDRTIHYNRPDITVVNKSNKTALLIDIAIPNTHNLQSTISEKISKYTDLKNEISRIWNLDKVTIVPIILSTTGVIPLQLHESLKTLELPKYFYRSLQKAAILNTCRIVRKFLQTNEE

SEQ ID NO: 2211 - protein, 1415 aa, Hemaris fuciformis
MKKFNNSNNKPPKIQPHVLIEHLITWGAGNTMISFTDVANVAMVTLFNMENRINCKYNLRSLPGGRRGTPGAGAGCFSNANTGGESNRLALAQHNNATADASSERESTLSLFPSVPSSVTPSYQKNHSLSCSSSCHSSDNPKHLEDVVQEVIPDTAPTTSARSARRKWTSEINEFILRTYLNLTLMETDTKDYLLPLHTKFIEKFPHIQVSRQRLGDQRRAIMRNKLLKQETIDTIYKEVEQELQKVSADIRQQHLEIPNTGKRMKWTSDLNETIIKSYYTITRLETDKTAYRKQLHEYFINKYPHLSHITEQRIADQRRVIVNNCLISSERLETIKQQVAQELESSNLAVDKTAVTQCANKRRNSAETILTDVVNPVNVPDYNTLNDPIQEQGEQTIEDIDSVFTTAFNFYINTSPIDRPYIPRQKTSRNFAKIVHYINNNILPNIVTTDIDYTTLQTIIYCSAWTASKMNGAKLTLPPPELSNNTEYLMKPRWQKRLENKIADIRAKIGRLTQYIQGNRNIKVTKHVNRILDSYKIHTTHEEANTEIAQFLDTLKQKLSVFSGRLHRYLKCTNRKSQNNKFTNNERKFYQNLKSNTTNQTHTHPNNISPDLKKLKEFWANIWENPMMHNSEANWIQTELDQAAKVTDMSYDHIPLAVFKNVIRNLHNWKTPGSDRIHNFWYKKLTNVHPYIYNHINSFIKNPQDVPDYITIGTTFMLPKDETDISDPAKYRPITCLQTIYKIMTACLADLIYAHTQGNNILAEQQKGCKKSSRGCKEQITIDSVILGQAQHTKNSLYSTYIDYKKAYDSVPHSYLLKILEIYKINPQIITFLSTIMNKWSTQLSLKCNNKIIRTDMIKIQRGIFQGDALSPLWFCLALNPLSNILNSVDTGFPLKYKETNHISHLKLYKINHLLYMDDIKLYGSTENELKMLISLTEQFSKDIKMTFGIDKCKINSYRAGHLLQLDYQLQSGETIESLTEHESYKYLGLSQSRQIHNKEIKKKLTLAFKHRLNSILKTELNSKNTTKAINTFAIPVLTYSFGIINWSKTELKKLQRTINVIMTKNRKHHPRACIQRQTLPRQEGGRGIIDLTNLHNAQISNLRSFFHEKSNHSNLHLAIAQNDINLTPLNLHDKTTQRNETQIDVKAKINEWTQKSLHGRHRLDISHPNVDKNASNEWLVQGQLFPETEGFMIAIQDQVIETRNYQKYIMKTPNLPTDICRRCNSASETIQHITGACKSIVQTDYKHRHDQVAYIIHQKLANKYNLIASSTPYYKYTPETILENEKYKLYFDRAILTDRTVHYNRPDITVVDKTNKTALLIDIAVPNSHNVQNTIAEKISKYIDLKDEISRIWHLNKVTIVPIVLSTTGVIPMQLHESLKFLDLPKFIYKSLQKAVLINTCRIVRKFLQTDQK

SEQ ID NO: 2212 - protein, 1416 aa, Hemaris fuciformis
MTRAYNNNNNKPPKIQPHVLIEHLITWGAGNTMISFTDVANVAMVTLFNMENRINCKYNLRSLPGGRRGTPGAGAGCFSNANTGGESNRLALAQHNNATADASSERESTLSLFPSVPSSVTPSYQKNHSLSCSSSCHSSDNPKHLEDVVQEVIPDTAPTTSARSTRRKWTSEINEFILRTYLNLTLMETDTKDYLLPLHTKFIEKFPHIQVSRQRLGDQRRAIMRNKLLKQETIDTIYKEVEQELQKVSADIRQQHLEIPNTGKRMKWTSDLNETIIKSYYTITRLETDKTAYRKQLHEYFINKYPHLSHITEQRIADQRRVIVNNCLISSERLETIKQQVAQELESSNLAVDKTAVTQCANKRRNSAETILTDVVNPVNVPDYNTLNDPIQEQGEQTIEDIDSVFTTAFNFYINTSPIDRPYIPRQKTSRNFAKIVHYINNNILPNILTTDIDYTTLQTIIYCSAWTASKMNGAKLTLPPPELSNNTEYLMKPRWQKRLENKIADIRAKIGRLTQYIQGNRNIKVTKHVNRILDSYKIHTTHEEANTEIAQFLDTLKQKLSVFSGRLHRYLKCTNRKSQNNKFTNNERKFYQNLKSNTTNQTHTHPNNISPDLKKLKEFWANIWENPMMHNSEANWIQTELDQAAKVTDMSYDHIPLAVFKNVIRNLHNWKTPGSDRIHNFWYKKLTNVHPYIYNHINSFIKNPQDVPDYITIGTTFMLPKDETDISDPAKYRPITCLQTIYKIMTACLADLIYAHTQGNNILAEQQKGCKKSSRGCKEQITIDSVILGQAQHTKNSLYSTYIDYKKAYDSVPHSYLLKILEIYKINPQIITFLSTIMNKWSTQLSLKCNNKIIRTDMIKIQRGIFQGDALSPLWFCLALNPLSNILNSVDTGFPLKYKETNHISHLKLYKINHLLYMDDIKLYGSTENELKMLISLTEQFSKDIKMTFGIDKCKINSYRAGHLLQLDYQLQSGETIESLTEHESYKYLGLSQSRQIHNKEIKKKLTLAFKHRLNSILKTELNSKNTTKAINTFAIPVLTYSFGIINWSKTELKKLQRTINVIMTKNRKHHPRACIQRQTLPRQEGGRGIIDLTNLHNAQISNLRSFFHEKSNHSNLHLAIAQNDINLTPLNLHDKTTQRNETQIDVKAKINEWTQKSLHGRHRLDISHPNVDKNASNEWLVQGQLFPETEGFMIAIQDQVIETRNYQKYIMKTPNLPTDICRRCNSASETIQHITGACKSIVQTDYKHRHDQVAYIIHQKLANKYNLIASSTPYYKYTPETILENEKYKLYFDRAILTDRTVHYNRPDITVVDKTNKTALLIDIAVPNSHNVQNTIAEKISKYIDLKDEISRIWHLNKVTIVPIVLSTTGVIPMQLHESLIFLDLPKFIYKSLQKAVLINTCRIVRKFLQTDQK

SEQ ID NO: 2213 - protein, 1361 aa, Laothoe populi
MENNRVCRYNLRSLPGGRRGTPSAGAGYFSNANTGGGSSRLASAQHNNTTADARSETESTSSLFSSISSSITPSYRMTRSHASSISIRSEDVAQEVISISDTVPTTSINTTRRKWSTEMNEFILRTYLYLTTLETDTKAYLLPLHTKFTEKFPCMQVSKQSLGDQRRAIIRNKLLPQTTIDKIHNEVRHELNTVQAEIEHHHSQTPQIGVQRMKWTNEYNEAIIRAYYRITHLETDKTAYRKQLHEHFVNKFPHLAHISEQRISDQRRVIINNSLISKNRLNTIRQQIAQEFHISQPLSHTQNTDQYNTNTLPNHDLINLDDVLPNTLENRVHANVEGEEEILAEIDTTFDTALEYYTNISPTNRPYIPRQKPSKKLIKIINYINNKILPKKLHDSIEFNSLHTILYCSAWTASKINGSKLTIPPTVATTSTQTNRKPKWQQRLEKKIADLRVKIGRLAQYVKGNRGRKLTKHINKILNHYKVHTTHEDENTQLPQFLDTLKQKLAVTSSRLDRYTKCTLRKKQNSKFTTNERKFYRDLKSTTSNKTLTTCDISSPEPGQLKEFWANIWENPITHNNNTDWIRAEIQKSENIATMSYEHIPIEVFKKILGRLHNWKAPGSDHLHNFWYKQLTCAHPYNFNHINNFIQNPQDIPDYITTGITYMLPKDESNLSDPAKYRPITCLQTIYKIMTACLADLLYTHIQDNNILVEQQKGCRKFSRGCKEQITIDSVILGQVQHTKKSLYTTYIDYKKAFDSIPHSYLLQILHIYKIHPQVINFFNATINKWATQLNLKTNNGTVTTETIKIQRGIFQGDALSPLWFCLALNPLSNILNSTKIGYILKYKELDQNNHTEKYTLNHLLYMDDIKLYASTETGLNKLINITEQFSRDINMEFGIDKCKVNSVRAGQLINLTYQLQSGDAIQSLAENETYKYLGLNQSRQIHNKETKNKLTTEFKHRLNIILKSQLYSKHISKAINTYAVPILTYSFGILNWSKTELKKLQRSINVIMTKHRKHHPRACVQRQTLPRKEGGRGIIDIINLHNQQITNLRTYFHSKKADSKLHFAIAQNDCKLTPLNLHDKNTQHNETQTSMQTKLTEWTQKSLHGRHQQDLSQSNVDKIASNEWLVRGELFPETEGFMVAIQDQVIETRNYQKYIIKNTNLSTDTCRRCNNSSETIQHITGACKSIVQTDYKHRHDQVAHIIHQKLANKHNLLTSSTPYYKYTPEAILENTSHKLYFDRAVLTDRTTHYNRPDIILIDKINKTALLIDIAIPNTHNLQSTISEKLSKYTDLKDEVVRIWHLNKATIVPVVLSTTGVIPTQLHDSLKILGLPKFVHSTLQKAAVINTCRIVRKFLQIEQHN

SEQ ID NO: 2214 - protein, 1461 aa, Hemaris fuciformis
MVSRHRNPCDLGSLGLNYGREICNRGFPIKNFRLVEQSLEIMTLLYVLYNNNNNNKPPKIQPHVLIEHLITWGAGNTMISFTDVANVAMVTLFNMENRINCKYNLRSLPGGRRGTPGAGAGCFSNANTGGESNRLALAQHNNATADASSERESTLSLFPSVPSSVTPSYQKNHSLSCSSSCHSSDNPKHLEDVVQEVIPDTAPTTSARSTRRKWTSEINEFILRTYLNLTLMETDTKDYLLPLHTKFIEKFPHIQVSRQRLGDQRRAIMRNKLLKQETIDTIYKEVEQELQKVSADIRQQHLEIPNTGKRMKWTSDLNETIIKSYYTITRLETDKTAYRKQLHEYFINKYPHLSHITEQRIADQRRVIVNNCLISSERLEIIKQQVAQELESSNLAVDKTAVTQCANNRRNSAETILTDVVNPVNVPDYNTLNDPIQEQGEQTIEDIDSVFTTAFNFYINTSPIDRPYIPRQKTSRNFAKIVHYINNNILPNILTTHTDYTTLQTIIYCSAWTASKMNGAKLTLPPPELSNNTEYLMKPRWQKRLENKIADIRAKIGRLTQYIQGNRNIKVTKHVNRILVSYKIHTTHEEANTEISQFLDTLKQKLSVFSGRLHRYLKCTNRKSQNNKFTNNERKFYQNLKSNTTNQTHTHPNNISPDLKKLKEFWANIWENPMMHNSETNWIQTELDQAAKVTDMSYDHIPLAVFKNVIRNLHNWKTPGSDRIHNFWYKKLTNVHPYIYNHINSFIKNPQDVPDYITIGTTFMLPKDETDISDPAKYRPITCLQTIYKIMTACLADLIYAHTQGNNILAEQQKGCKKSSRGCKEQITIDSVILGQAQHTKNSLYSTYIDYKKAYDSVPHSYLLKILEIYKINPQIITFLSTIMNKWSTQLSLKCNNKIIRTDMIKIQRGIFQGDALSPLWFCLALNPLSNILNSVDTGFPLKYKETNHISHLKLYKINHLLYMDDIKLYGSTENELKMLISLTEQFSKDIKMTFGIDKCKINSYRAGHLLQLDYQLQSGETIESLTEHESYKYLGLSQSRQIHNKEIKKKLTLAFKHRLNSILKTELNSKNTTKAINTFAIPVLTYSFGIINWSKTELKKLQRTINVIMTKNRKHHPRACIQRQTLPRQEGGRGIIDLTNLHNAQISNLRSFFHEKSNHSNLHLAIAQNDINLTPLNLHDKTTQRNETQIDVKAKINEWTQKSLHGRHRLDISHPNVDKNASNEWLVQGQLFPETEGFMIAIQDQVIETRNYQKYIMKTPNLPTDICRRCNSASETIQHITGACKSIVQTDYKHRHDQVAYIIHQKLANKYNLIASSTPYYKYTPETILENEKYKLYFDRAILTDRTVHYNRPDITVVDKTNKTALLIDIAVPNSHNVQNTIAEKISKYIDLKDEISRIWHLNKVTIVPIVLSTTGVIPMQLHESLKFLDLPKFIYKSLQKAVLINTCRIVRKFLQTDQK

SEQ ID NO: 2215 - protein, 1384 aa, Hemaris fuciformis
MISFTDVANVAMVTLFNMENRINCKYNLRSLPGGRRGTPGAGAGCFSNANTGGESNRLALAQHNNATADASSERESTLSLFPSVPSSVTPSYQKNHSLSCSSSCHSSDNPKHLEDVVQEVIPDTAPTTSARSTRRKWTSEINEFILRTYLNLTLMETDTKDYLLPLHTKFIEKFPHIQVSRQRLGDQRRAIMRNKLLKQETIDTIYKEVEQELQKVSADIRQQHLEIPNTGKRMKWTSDLNETIIKSYYTITRLETDKTAYRKQLHEYFINKYPHLSHITEQRIADQRRVIINNCLISSERLETIKQQVAQELESSNLAVDKTAVTQCANNRRNSAETILTDVVNPVNVPDYNTLNDPIQEQGEQTIEDIDSVFTTAFNFYINTSPIDRPYIPRQKTSRNFAKIVHYINNNILPNILTTDTDYTTLQTIIYCSAWTASKMNGAKLTLPPPELSNNTEYLMKPRWQKRLENKIADIRAKIGRLTQYIQGNRNIKVTKHVNRILDSYKIHTTHEEANTKISQFLDTLKQKLSVFSGRLHRYLKCTNRKSQNNKFTNNERKFYQNLKSNTTNQTHTHPNNISPDLKKLKEFWANIWENPMMHNSETNWIQTELDQAAKVTDMSYDHIPLAVFKNVIRNLHNWKTPGSDRIHNFWYKKLTNVHPYIYNHINSFIKNPQDVPDYITIGTTFMLPKDETDISDPAKYRPITCLQTIYKIMTACLADLIYAHTQGNNILAEQQKGCKKSSRGCKEQITIDSVILGQAQHTKNSLYSTYIDYKKAYDSVPHSYLLKILEIYKINPQIITFLSTIMNKWSTQLSLKCNNKIIRTDMIKIQRGIFQGDALSPLWFCLALNPLSNILNSVDTGFPLKYKETNNISHLKLYKINHLLYMDDIKLYGSTENELKMLISLTEQFSKDIKMTFGIDKCKINSYRAGHLLQLYYQLQSGETIESLTEHESYKYLGLSQSRQIHNKEIKKKLTLAFKHRLNSILKTELNSKNTTKAINTFAIPVLTYSFGIINWSKTELKKLQRTINVIMTKNRKHHPRACIQRQTLPRQEGGRGIIDLTNLHNAQISNLRSFFHEKSNHSNLHLAIAQNDINLTPLNLHDKTTQRNETQIDVKAKINEWTQKSLHGRHRLDISHPNVDKNASNEWLVQGQLFPETEGFMIAIQDQVIETRNYQKYIMKTPNLPTDICRRCNSASETIQHITGACKSIVQTDYKHRHDQVAYIIHQKLANKYNLIASSTPYYKYTPETILENEKYKLYFDRAILTDRTVHYNRPDITVVDKTNKTALLIDIAVPNSHNVQNTIAEKISKYIDLKDEISRIWHLNKVTIVPIVLSTTGVIPMQLHESLKFLDLPKFIYKSLQKAVLINTCRIVRKFLQTDQK

SEQ ID NO: 2216 - protein, 761 aa, Hyles vespertilio
MPYEYIPTEVFKKIVGNLHNWKTPGSDHIHNFWYKKLTTTHPYIYNHINNFIKNPQQIPDYVTSGNTFMLPKGEADSLNPANYRPITCLQTIYKIMTACLADLIYTHIQNNNILAEQQKGCRKFSRGCKEQLTIDAVILGHVKNTKKSLYSIYIDYKKAFDTVPHSYLLQILDIYKIHPQVTGFLSTVIKKWTTNLNLKTNNNIITTGPIKIQRGIFQGDTLSPLWFCLALNPLSNILNSANAGYPLKYIKLDQNLTYNFNHLLYMDDIKLYANTQTKLNKLIEITEHFSRDIHMEFGIDKCKINSTTAGQLLQLNYLLETGKTIEPLTVEETYKYLGLNQSRQIHYKEIKNKLILEFKHRLNAILKSQLNSKNTCKAINTYAVPVLTYTFGILNWSKTDLKKLQRSINVQMTQHRKHHPRACIQRQTLPRREGGRGIIDLTNLHNNQIKNLRSYFHSKANTSNLHLAVSQNDDRLTPLNLKDTNTQANETHIDMAVKIADWTRKSLHGRHQQDISQPNVDKTASNDWLVQGELFPETEGFMIAIQDQVIETRNYQKHIIKNRTLPTDICRRCNSASETIQHITGACKSIVQTDYKHRHDQTAYIIHQKLAIQYNLLTSDNPYYKYTPDVILENETHKLYFDRAIFTDRTTHYNRPDITVIDKVNKTAILIDIAIPDTHNIQTTISEKLSKYIDLKEEITRIWHLNKVTIVPIVLSTTSVIPLQLHESLKTLQLPKYLYRTLQKAVILNTCRIVRKFLQMK

SEQ ID NO: 2217 - protein, 761 aa, Hyles vespertilio
MPYEHIPTEVFKKIVGNLHNWKTPGSDHIHNFWYKKLTTTHPYIYNHINNFIKNLQQIPDYVTSGNTFMLPKGEADSLNPANYRPITCLQTIYKIMTACLADLIYTHIQNNNILAEQQKGCRKFSRGCKEQLTIDAVILGHVKNTKKSLYSIYIDYKKAFDSVPHSYLLQILDIYKIHPQVTRFLSTVIKKWTTNLNLKTNNNIITTGPIKIQRGIFQGDTLSPLWFCLALNPLSNILNSANAGYPLKYIKLDQNLTYNFNHLLYMDDIKLYANTQTKLNKLIEITEHFSRDIHMEFGIDKCKINSTTAGQLLQLNYQLETGKTIEPLTVEETYKYLGLNQSRQIHYKEIKNKLILEFKHRLNAILKSQLNSKNTCKAINTYAVPVLTYTFGNLNWSKTDLKKLQRSINVLMTQHRKHHPRACIQRQTLPRREGGRGIIDLTNLHNNQIKNLRSYFHSKANNSNLHLAVSQNDDRLTPLNLKDTNTQPNETHIDMAVKIADWTRKSLHGRHQQDISQPNVDKTASNDWLVQGELFPETEGFMIAIQDQVIETRNYQKHIIKNRTLPTDICRRCNSASETIQHITGACKSIVQTDYKHRHDQTAYIIHQKLAIQYNLLTSDNPYYKYTPDVILENETHKLYFDRAILTDRTTHYNRPDITVIDKVNKTAILIDIAIPNTHNIQTTISEKLSKYIDLKEEITRIWHLNKVTIVPIVLSTTGVIPLQLHESLKTLQLPKYLYRTLQKAVILNTCRIVRKFLQMK

SEQ ID NO: 2218 - protein, 1357 aa, Deilephila porcellus
MEESSNRRYNLRSLPGGRRGTPGAGAGCLSNANTGGGSSRLAPAQHNHATADAFSEVESTSSLFSSTSSSIIPSYRLTRAHSSSISLHSEDAAQEMIHISETVPTTSATSTRRKWSVEMNEFILRTYLSLTSIETDTKSYLLPLHTKFTEKFPDMHVSRQRLGDQRRAIIRNKLLPQTTIDKIYDEVRQELLTLTAHIEQHNSQASHTGQRMKWTNDLNETIMEAYYTITRLESNKTAYRKQLHEHFVNKYPHFSHISEQRIADQRRVIVNNLLISKTKLDEIKQQVAEDLSYSTEVSIEVVEAETGTNYAENPLGADSINNLNVNNNEKNTNIIEEEEEVIEEIDLTFDTAFEYFINTHPTDRPYIPRQKTSKKFSKTVNYINSTILPRKITNDIDFTTLQTIIYCTAWAASKLNGSKLTIPPSVSAYSAQHPLKPRWQKRLENKITDLRAKIGRLTQYIQGNRNRKISKHVEAILKSYKIHTIHEDPNTQLPQFLDTLKQKLSVTSSRLQRYLKCTLRKSHNNRFINNEKKFYLNLINNSSNRIITTSNTCTLEPEDLKDFWSKIWENPITHNSDTDWLKSEMEKVIDIETMSYEHIPIEIFKKVVANLHNWKTPGSDRIHNFWYKKLTTTHPYIYNHINNFITNPQQVPDYITSGITFMMPKGETDSLNPANYRPITCLQTMYKIMTACLADLIYTHVENNNILAEQQKGCRKFSRGCKEQLTIDSVILRQVKNTKKSLYSIYIDYKKAFDSVPHSYLLQILDIYKINPKITNFLSAAIKTWTTYLNLKTNNNTITTGPIRIQRGIFQGDTLSPLWFCLALNPLSNILNSTNAGYPLKYTEIDQNRTYNLNHLLYMDDIKLYANTQLELNKLIEITEYFSKDIRMEFGIDKCKINSFNARQLLQINYQLETGQTIESLTAQESYKYLGLNQSKEIHSKEIKNKLTLEFKHRLNTILKSQLNSKNLIKAINTYAVPVLTYSFGILNWSKTHLKKFQRTINVMMTQHRKHHPRACVQRQTLPRREGGRGIIDLTNLHNKQIKNLRSFFHNKASDSSLHLAVSQNDNHLTPLNLKDTNAQPNETHVEMTVKIAEWTRKSLHGRHQQDLSQNHVDKPASNDWLVQGELFPETEGFMIAIQDQVIETRNYQKYIIKNRNLPTDICRHCNSASETIQHITGACKSIVQTDYKHRHDQTAYIIHQKLAIKYNLITSANPYYKYTPDVILENETHKLYFDRAILTDRTTHYNRPDITVIDKVNKTALLIDIAIPNTHNIQNTISEKLSKYVELKEEVTRMWHLNKVIIVPIVLSTTGVIPLQLHESLKTLQLPKYLYRTLQKAVILNTCRIVRKFLQLKEYN

SEQ ID NO: 2219 - protein, 1351 aa, Deilephila porcellus
MEKSSICRYNLRSLPGGRRGTPGAGAGCFSNANTGGGSSRLAPAQHNYVTADAFSEVDSASSLFSSPSSTIIPSYRLSRTHSSSISLHSEDVAQEMVYISESVPTTSTTTTRRKWSVEMNEFILRTYLSLTSMETDTKSYLLPLHTKFAEKFPDMQVSRQRLGDQRRAIIRNKLLPQATIDRIYNEVRQELQTITAHIEHHNSQAAHSGQRMKWTHDLNETIMKAYYTITRLETNKTAYRKQLHEYFVSKYPHLSYISEQRVADQRRVIVNNLLISQNRLDTLKQQVAEELSLSTELTTGIVEAEMVTSCSNNPIEVNLIDNLNVNNNETNINAIEEVIEEIDISFDTAFEYFINTHPTDRPYIPRQKSSKKFSKTVNYINNTILPRKISNDIDFNTLQTLIYCTAWTASKINGSKLAIPPSESAYTTKHPIKPRWQKRLENKIADLRVKIGRLTQYIRGNRNKKLSKHVEVILESYKVHTIHEDPNTQLPQFLDTLKQKLSVTSSRLQRYLKCTLRKSQNNSFINNERKFYQILKNNSSNLINTTPNILTPEPEDLKNFWSKIWENPIIHNSDTDWIKTELEQVINIETMSYEYIPIEVFKKIVVNLHNWKTPGSDRIHNFWYKKLTTTHPHIYNHINNFIKNPQLIPDYITLGNTFMMPKGETDSLNPANYRPITCLQTIYKIMTACLADLIYTHAQNNNILAEQQKGCRKFSRGCKEQLTIDAVILGQVKNTKKSLYSTYIDYKKAFDSVPHSYLLQILDIYKIHPQIINFLSTTMKKWTISLNLKANSNIITTGPIKIQRGIFQGDTLSPLWFCLALNPLSNILNSTITGYPLKYKEINNDRTYHLNHLLYMDDIKLYANTQTELNKLIEITEKFSKDIHMEFGIDKCKINSSNAGQLLQINYQLETGKTIESLSAEESYKYLGLNQSRQIHYKEIKNKLTLEFKHRLNTIFKSQLNSKNTSKAVNTYAVPVLTYSFGILNWSKTDLKKLQRTINVMMTQHRKHHPRACIQRQTLPRREGGRGIIDLTNLHNRQIKNLRSFFHSKATNSSLHLAISQNDNHLTPLNLQDINTQPNETHIEMKVKIAEWTRKSLHGRHQQDISQSNVDKSASNDWLVQGELFPETEGFMIAIQDQVIETRNYQKHIIKNRNLPTDICRRCNSASETIQHITGACKSIVQNDYKHRHDQTAYIIHQRLAIKYNLITSVNPYYKYTPEVILENETYKLYFDRAILTDRTTHYNRPDITVIDKVNKTALLIDITIPNTHNLQNAISEKLSKYVELKEEITRIWHLNKVTIVPIVLSATGVIPLQLHESLKTLQLPKYLYRTLQKAVILNTCRIVRKFLQMK

SEQ ID NO: 2220 - protein, 1351 aa, Deilephila porcellus
MEKSSICRYNLRSLPGGRRGTPGAGAGCFSNANTGGGSSRLAPAQHNYVTADAFSEVDSASSLFSSPSSTIIPSYRLSRSHSSSISLHSEDVAQEMVYISESVPTTSTTTTRRKWSVEMNEFILRTYLSLTSMETDTKSYLLPLHTKFAEKFPDMQVSRQRLGDQRRAIIRNKLLPQATIDRIYNEVRQELQTITAHIEHHNSQAAHSGQRMKWTHDLNETIMKAYYTITRLETNKTAYRKQLHEHFVSKYPHLSYISEQRVADQRRVIVNNLLISQNRLDTLKQQVAEELSLSTELTTGIVEAEMVTSCSNNPIEVNLIDNLNVNNNETNINAIEEVIEEIDISFDTAFEYFINTHPTDRPYIPRQKSSKKFSKTVNYINNTILPRKISNDIDFNTLQTLIYCTAWTASKINGSKLAIPPSESAYTTKHPIKPRWQKRLENKIADLRVKIGRLTQYIRGNRNKKLSKHVEVILESYKVHTIHEDPNTQLPQFLDTLKQKLSVTSSRLQRYLKCTLRKSQNNSFINNERKFYQILKNNSSNLINTAPNILTPEPEDLKNFWSKIWENPIIHNSDTDWIKTELEQVINIETMSYEYIPIEVFKKIVVNLHNWKTPGSDRIHNFWYKKLTTTHPHIYNHINNFIKNPQLIPDYITLGNTFMMPKGETDSLNPANYRPITCLQTIYKIMTACLADLIYTHAQNNNILAEQQKGCRKFSRGCKEQLTIDAVILGQVKNTKKSLYSTYIDYKKAFDSVPHSYLLQILDIYKIHPQIINFLSTTMKKWTISLNLKANSNIITTGPIKIQRGIFQGDTLSPLWFCLALNPLSNILNSTITGYPLKYKEINNDRTYHLNHLLYMDDIKLYANTQTELNKLIEITEKFSKDIHMEFGIDKCKINSSNAGQLLQINYQLETGKTIESLSAEESYKYLGLNQSRQIHYKEIKNKLTLEFKHRLNTIFKSQLNSKNTSKAVNTYAVPVLTYSFGILNWSKTDLKKLQRTINVMMTQHRKHHPRACIQRQTLPRREGGRGIIDLTNLHNRQIKNLRSFFHSKATNSSLHLAISQNDNHLTPLNLQDINTQPNETHIEMTVKIAEWTRKSLHGRHQQDISQSNVDKSASNDWLVQGELFPETEGFMIAIQDQVIETRNYQKHIIKNRNLPTDICRRCNSASETIQHITGACKSIVQNDYKHRHDQTAYIIHQRLAIKYNLITSVNPYYKYTPEVILENETYKLYFDRAILTDRTTHYNRPDITVIDKVNKTALLIDITIPNTHNLQNAISEKLSKYVELKEEITRIWHLNKVTIVPIVLSATGVIPLQLHESLKTLQLPKYLYRTLQKAVILNTCRIVRKFLQMK

SEQ ID NO: 2221 - protein, 1351 aa, Deilephila porcellus
MEKSSICRYNLRSLPGGRRGTPGAGAGCFSNANTGGGSSRLAPAQHNYATADAFSEVDSASSLFSSPSSTIIPSYRLSRSHSSSISLHSEDVAQEMVYISESVPTTSATTTRRKWSIEMNEFILRTYLSLTSMETDTKSYLLPLHTKFAEKFPDMQVSRQRLGDQRRAIIRNKLLPQATIDRIYNEVRQELQTITAHIEHHNSQAAHSGQRMKWTHDLNETIMKAYYTITRLETNKTAYRKQLHKHFVSKYPHLSYISEQRVADQRRVIVNNLLISQNRLDTLKQQVAEELSLSTELTTGIVEAEMVTSCSNNPLEINFIDNLNVNNNETNINAIEEVIEEIDITFDTAFEYFINTHPTDRPYIPRQKSSKKFSKTVNYINNTILPRKISNDIDFNTLQTLIYCTAWTASKINGSKLAIPPAESAYTTKHPIKPRWQKRLENKIADLRVKIGRLTQYIRGNRNKKLSKHVEVILESYKVHTIHEDPNTQLPQFLDTLKQKLSVTSSRLQRYLKCTLRKSQNNSFINNERKFYQILKNNSSNLINTTPNILTPEPEDLKNFWSKIWENPIIHNSDTDWIKTELEQVINIETMSYEYIPIEVFKKIVINLHNWKTPGSDRIHNFWYKKLTTTHPHIYNHINNFIKNPQLIPDYITLGNTFMMPKGETDSLNPANYRPITCLQTIYKIMTACLADLIYTHAQNNNILAEQQKGCRKFSRGCKEQLTIDAVILGQVKNTKESLYSTYIDYKKAFDSVPHSYLLQILVIYKIHPQIINFLSTTMKKWTINLNLKTNSNIITTGPIKIQRGIFQGDTLSPLWFCLALNPLSNILNSTITGYPLKYKEINNDRTYHLNHLLYMDDIKLYANTQTELNKLIEITEKFSKDIHMEFGIDKCKINSSNAGQLLQINYQLETGKTIESLSAEESYKYLGLNQSRQIHYKEIKNKLTLEFKHRLNTIFKSQLNSKNTSKAVNTYAVPVLTYSFGILNWSKTDLKKLQRTINVMMTQHRKHHPRACIQRQTLPRREGGRGIIDLTNLYNRQIKNLRSFFHSKATNSSLHLAISQNDNHFTPLNLQDLNTQPNETHIEITVKIAEWTRKSLHGRHQQDISQSNVDKSASNDWLVQGELFPETEGFMIAIQDQVIETRNYQKHIIKNRNLPTDICRRCNSASETIQHITGACKSIVQNDYKHRHDQTAYIIHQRLAIKYNLITSVNPYYKYTPEVILENETYKLYFDRAILTDRTTHYNRPDITVIDKVNKTALLIDITIPNTHNLQNAISEKLSKYVELKEEITRIWHLNKVTIVPIVLSATGVIPLQLHESLKTLQLPKYLYRTLQKAVILNTCRIVRKFLQMK

SEQ ID NO: 2222 - protein, 1390 aa, Boloria selene
METRSKSKRLGPLPGGDRRGAPGAGAGCYSLRSVSGSESSRRAPTDKNVTADPSPSPSSPNSLPPPPPSSSSPKSLFSSLPSSPPSYLDALTESSQSVQSGNVAQEIESISDAVPTSRRTRTKWTPEMNQFILRTYLYLTAMGTDTKAYLEPLHTKFTEKFPHIQVTRNIIGGQRRAIVDKKYIPKDIVDKIYAEVKAELDNIQSATHTQQHLTTQTIAHAPGKRMKWSTDLYESLVRGYYTVTRLETNKTAYRQQLHQYFINAHPHLSHVTEQQIADQRGQVFKNRRLISADRLNAIKQQVANELRLDNPRTDNPLTQDITTGTPNTQQIIDIFSNIDTEISQVTEPNATTEEEEARNLEIDTTFQTTLSYFAHTSPTERPYIPKQRTSKKLAQTVKYINSTILPTKIDNHTPFETLQTLIYCAAWTASKINGTKLIIPSTATETITTYRKRKPNWQRRIENKINNLRAKIARLTQYIRGIRTERLTNHVNKILMQYKVHSTYENPNTELPQFLDTLKQKLTVASSRLNRYKKCTQRKTQNNEFKYNERKFYQNIRNSTLNQTHHSIGPDTQQIKDFWSKIWNNPVSHNADAEWIQTEKNKFINTEPMRYEHIPMSVFANVINKLHNWKAPGSDHIHNYWYKKFTFVHPYIYNSLNHFIQNPQDLPDYFTAGTTYMLPKDVHDHLNPAKYRPITCLQSIYKILTACLADLIYSHVENNNILAEQQKGCRKFSRGCKEQITIDAVILNQVQRNKKDLYSMYIDYKKAFDSVPHTWLLEILHIYKIHPKLITFLETAVTNWNTKLNLKTNNGSLTTEPIKIRRGIFQGDTLSPLWFCLALNPLSNLLNNTDAGYEIKFKKTDVETRIEQTKTFKLNHLLYMDDIKLYAKTQTQLNDLTEITETFSTDINMEFGIDKCKINSVKAGKTIQHNYYLQTGATIESMSENETYKYLGLNQSRQIHHKETKHKLTQEFKHRLNTILKSQLNSINVVKAINTFAIPILTYTFGILNWPKSGIKKLQRIINVSMTKHRKHHPRACIQRQILPRKEGGRGIIDLENLHNCQIHNLRKYFHNKALNSDLHLAITQNDTKLTTLNLNDTSTLTNETTIDTKTKIYEWTRKSLHGRHRQDLCQPNVDKDASNEWLVRGELFPETEGFMIAIQDQVIETRNYQKHIIRTSNLRTDICRRCNSASETIQHITGACKAIVQTDYKHRHDQVANVLHQKLALKYNLISSWTPYYKYTPDTVLENTTHKLYFDRAILTDRTVHHNRPDITLVDKTHKTAQLIDIAIPNTHNIQNTIAEKLSKYIDLKDEIVRMWKLNKVTIVPIVLSTTGVIPNQLHQSLETLQLPKYTYVTLQKATILNTCRIVRKFLQSDQSQTSAEQHHSLNLT

SEQ ID NO: 2223 - protein, 782 aa, Boloria selene
MRYEHIPMSVFANVINKLHNWKAPGSDHIHNYWYKKFTFVHPYIYNSLNHFIQNPQDLPDYFTAGTTYMLPKDVNDHLNPAKYRPITCLQSIYKILTACLADLIYSHVENNNILAEQQKGCRKFSRGCKEQITIDAVILNQVQRNKKDLYSMYIDYKKAFDSVPHTWLLEILHIYKIHPKLITFLETAVTNWNTKLNLKTNNGSLTTESIKIRRGIFQGDTLSPLWFCLALNPLSNLLNNTDAGYEIKFKKTDVETRIEQTKTLKLNHLLYMDDIKLYAKTQTQLNDLTEITETFSTDINMEFGIDKCKINSVKAGKTIQHNYYLQTGATIESMSENETYKYLGLNQSRQIHHKETRHKLTQEFKHRLNTILKSQLNSINVVKAINTFAIPILTYTFGILNWPKSGIKKLQRIINVSMTKHRKHHPRACIQRQILPRKEGGRGIIDLENLHNSQIHNLRKYFHNKALNSDLHLAITQNDTKLTTLNLKDTSTLTSETTIDAKTKIYEWTRKSLHGRHRQDLCQPNVDKDASNEWLVRGELFPETEGFMIAIQDQVIETRNYQKHIIRTSNLRTDICRRCNSASETIQHITGACKAIVQTDYKHRHDQVANVLHQKLALKYNLISSWTPYYKYTPDTVLENTTHKLYFDRAILTDRTVHHNRPDITLVDKTHKTAQLIDIAIPNTHNIQSTIAEKLSKYIDLKDEIVRMWKLNKVTIVPIVLSTTGVITNQLHQSLETLQLPKYTYVTLQKATILNTCRIVRKFLQSDQSQTSAEQHHSLNLT

SEQ ID NO: 2224 - protein, 820 aa, Enchytraeus crypticus
MASLIRKRVSGVEVPVSDDERAKFRKSSRPRTPEESLRSIVTSKIEDGNLRAAVRILCSEESLAPNNDETYRELSLKHPSAVSTPRSLLSSASPQANTLQVTEAEVMQAVKSFPAGSSGGPDGLRPQHILQLVTCPIMGRETLTAITGFVNLLLLGKCHQEVKPFLFGANLIALKKKTGGLRPIAVGYSWRRIAAKCANSFALDRLSNSLQPIQVGVGVKGGCEAAVHATRRFISSMPDDWVVAKLDFCNAFNSLKRVPMLEAVDSSLPELGPFCRLSYEDPSVLRFGQRVIMSSEGVQQGDPLGPLLFSLTIHPLLQSLSSSLKIGYLDDITVGGVESTVADDISRLMVAGKALGLSLNINKCELITTRSDSNFPAINTFIRVKPVEASLLGAPLQTGQAMDLALNTQCSKLERAASRLKLISAHDALTILRSCVGSSKLIYLLRASPCAGHPALQNYDSIMRKSLSSIVNINVNEAQWIQASLPICYGGLGIRSVSSLAPSAFLASAAGTGVLQDSILSGFFQIPDLEISRIQGIWTALSTSEPPIGMMANSMKAWDSKVTTALHTELLAKPLLPQEKARLLAVSAPHSGDWIKALPISSCGLRLDDEAVRVAAGLRLGTTLCEPHNCICGVSVNALGIHGLSCKRSAGRISRHQFINDLIWRALSRANIPAIKEPLGLIRTDGKRPDGVSQIPWAEGKCVSWDVTVTDTFSVSNLGLSCAAAGAAAEAAANRKTLKYAEISGNYIFMPIAFETLGPINSLASDFIDEIGRRTSAITGDKCEKSFLWQRLSIALQRFNAVCFSGTLAKAASQSAEELF

SEQ ID NO: 2225 - protein, 982 aa, Enchytraeus crypticus
MPPRKHTWSLSQDANKRNGTCSVCLEVFQLHIRDGSVHLHGPRDNRCLGSHKPPIEAQGTFSSQRSSSDVRDEDHHPPVFPSNSIPPIRHPSDAATVFAHPNLTSGTIKHIPKSVRATCATYLINILDRISKCVDDLEAWKSLLAIGEDILLAPKRTGKRHNMASLIRKRVSGVEVPVSDDERAKFRKSSRPRTPEESLRSIVTSKIEDGNLRAAVRILCSEESLAPNNDETYRELSLKHPSAVSTPRSLLSSASPQANTLQVTEAEVMKAVKSFPAGSSGGPDGLRPQHILQLVTCPIMGRETLTAITGFVNLLLLGKCHQEVKPFLFGANLIALKKKTGGLRPIAVGYSWRRIAAKCANSFALDRLSNSLQPIQVGVGVKGGCEAAVHATRRFISSMPDDWVVAKLDFCNAFNSLKRVPMLEAVDSSLPELGPFCRLSYEDPSVLRFGQRVIMSSEGVQQGDPLGPLLFSLTIHPLLQSLSSSLKIGYLDDITVGGVESTVADDISRLMVAGKALGLSLNINKCELITTRSDSNFPAINSFIRVKPVEASLLGAPLQTGQAMDLALNTQCSKLERAASRLKLISAHDALTILRSCVGSSKLIYLLRASPCAGHPALQNYDSIMRKSLSSIVNINVNEAQWIQASLPICYGGLGIRSVSSLAPSAFLASAAGTGVLQDSILSGFFQIPDLEISRIQGIWTALSTSEPPIGMTANSMKAWDSKVTTALHTELLAKPLLPQEKARLLAVSAPHSGDWIKALPISSCGLRLDDEAVRVAAGLRLGTTLCEPHNCICGVSVNALGIHGLSCKRSAGRISRHQFINDLIWRALSRANIPAIKEPLGLIRTDGKRPDGVSQIPWAEGKCVSWDVTVTDTFSVSNLGLSCAAAGAAAEAAANRKTLKYAEISGNYIFMPIAFETLGPINSLASDFIDEIGRRTSAITGDKREKSFLWQRLSIALQRFNAVCFSGTLAKAASQSAEELF

SEQ ID NO: 2226 - protein, 982 aa, Enchytraeus crypticus
MPPRKHTWSLSQDANKRNGTCSVCLEVFQLHIRDGSVHLHGPRDNRCLGSHKPPIEAQGTFSSQRSSSDVRDEDHHPPVFPSNSIPPIRHPSDAATVFAHPNLTSGTIKHIPKSVRATCATYLINILDRISKCVDDLEAWKSLLAIGEDILLAPKRTGKRHNMASLIRKRVSGVEVPVSDDERAKFRKSSRPRTPEESLRSIVTSKIEDGNLRAAVRILCSEESLAPNNDETYRELSLKHPSAVSTPRSLLSSASPQANTLQVTEAEVMKAVKSFPAGSSGGPDGLRPQHILQLVTCPIMGRETLTAITGFVNLLLLGKCHQEVKPFLFGANLIALKKKTGGLRPIAVGYSWRRIAAKCANSFALDRLSNSLQPIQVGVGVKGGCEAAVHATRRFISSMPDDWVVAKLDFCNAFNSLKRVPMLEAVDSSLPELGPFCRLSYEDPSVLRFGQRVIMSSEGVQQGDPLGPLLFSLTIHPLLQSLSSSLKIGYLDDITVGGVESTVADDISRLMVAGKALGLSLNINKCELITTRSDSNFPAINSFIRVKPIEASLLGASLQTGQAMDLALNTQCSKLERAASRLKLISAHDALTILRSCVGSSKLIYLLRASPCAGHPALQNYDSIMRKSLSSIVNINVNEAQWIQASLPICYGGLGIRSVSSLAPSAFLASAAGTGVLQDSILSGFFQIPDLEISRIQGIWTALSTSEPPIGMTANSMKAWDSKVTTALHTELLAKPLLPQEKARLLAVSAPHSGDWIKALPISSCGLRLDDEAVRVAAGLRLGTTLCEPHNCICGVSVNALGIHGLSCKRSAGRISRHQFINDLIWRALSRANIPAIKEPLGLIRTDGKRPDGVSQIPWAEGKCVSWDVTVTDTFSVSNLGLSCAAAGAAAEAAANRKTLKYAEISGNYIFMPIAFETLGPINSLASDFIDEIGRRTSAITGDKREKSFLWQRLSIALQRFNAVCFSGTLAKAASQSAEELF

SEQ ID NO: 2227 - protein, 982 aa, Enchytraeus crypticus
MPPRKHTWSLSQDANKRNGTCSVCLEVFQLHIRDGSVHLHGPRDNRCLGSHKPPIEAQGTFSSQRSSSDVRDEDHHPPVFPSNSIPPIRHPSDAATVFAHPNLTSGTIKHIPKSVRATCATYLINILDRISKCVDDLEAWKSLLAIGEDILLAPKRTGKRHNMASLIRKRVSGVEVPVSDDERAKFRKSSRPRTPEESLRSIVTSKIEDGNLRAAVRILCSEESLAPNNDETYRELSLKHPSAVSTPRSLLSSASPQANTLQVTEAEVMKAVKSFPAGSSGGPDGLRPQHILQLVTCPIMGRETLTAITGFVNLLLLGKCHQEVKPFLFGANLIALKKKTGGLRPIAVGYSWRRIAAKCANSFALDRLSNSLQPIQVGVGVKGGCEAAVHATRRFISSMPDDWVVAKLDFCNAFNSLKRVPMLEAVDSSLPELGPFCRLSYEDPSVLRFGQRVIMSSEGVQQGDPLGPLLFSLTIHPLLQSLSSSLKIGYLDDITVGGVESTVADDISRLMVAGKALGLSLNINKCELITTRSDSNFPAINTFIRVKPVEASLLGAPLQTGQAMDLALNTQCSKLERAASRLKLISAHDALTILRSCVGSSKLIYLLRASPCAGHPALQNYDSIMRKSLSSIVNINVNEAQWIQASLPICYGGLGIRSVSSLAPSAFLASAAGTGVLQDSILSGFFQIPDLEISRIQGIWTALSTSEPPIGMTANSMKAWDSKVTTALHTELLAKPLLPQEKARLLAVSAPHSGDWIKALPISSCGLRLDDEAVRVAAGLRLGTTLCEPHNCICGVSVNALGIHGLSCKRSAGRISRHQFINDLIWRALSRANIPAIKEPLGLIRTDGKRPDGVSQIPWAEGKCVSWDVTVTDTFSVSNLGLSCAAAGAAAEAAANRKTLKYAEISGNYIFMPIAFETLGPINSLASDFIDEIGRRTSAITGDKREKSFLWQRLSIALQRFNAVCFSGTLAKAASQSAEELF

SEQ ID NO: 2228 - protein, 982 aa, Enchytraeus crypticus
MPPRKHTWSLSQDANKRNGTCSVCLEVFQLHIRDGSVHLHGPRDNRCLGSHKPPIEAQGTFSSQRSSSDVRDEDHHPPVFPSNSIPPIRHPSDAATVFAHPNLTSGTIKHIPKSVRATCATYLINILDRISKCVDDLEAWKSLLAIGEDILLAPKRTGKRHNMASLIRKRVSGVEVPVSDDERAKFRKSSRPRTPEESLRSIVTSKIEDGNLRAAVRILCSEESLAPNNDETYRELSLKHPSADSTPRSLLSSASPQANTLQVTEAEVMKAVKSFPAGSSGGPDGLRPQHILQLVTCPIMGRETLTAITGFVNLLLLGKCHQEVKPFLFGANLIALKKKTGGLRPIAVGYSWRRIAAKCANSFALDRLSNSLQPIQVGVGVKGGCEAAVHATRRFISSMPDDWVVAKLDFCNAFNSLKRVPMLEAVDSSLPELGPFCRLSYEDPSVLRFGQRVIMSSEGVQQGDPLGPLLFSLTIHPLLQSLSSSLKIGYLDDITVGGVESTVADDISRLMVAGKALGLSLNINKCELITTRSDSNFPAINSFIRVKPVEASLLGAPLQTGQAMDLALNTQCSKLERAASRLKLISAHDALTILRSCVGSSKLIYLLRASPCAGHPALQNYDSIMRKSLSSIVNINVNEAQWIQASLPICYGGLGIRSVSSLAPSAFLASAAGTGVLQDSILSGFFQIPDLEISRIQGIWTALSTSEPPIGMTANSMKAWDSKVTTALHTELLAKPLLPQEKARLLAVSAPHSGDWIKALPISSCGLRLDDEAVRVAAGLRLGTTLCEPHNCICGVSVNALGIHGLSCKRSAGRISRHQFINDLIWRALSRANIPAIKEPLGLIRTDGKRPDGVSQIPWAEGKCVSWDVTVTDTFSVSNLGLSCAAAGAAAEAAANRKTLKYAEISGNYIFMPIAFETLGPINSLASDFIDEIGRRTSAITGDKREKSFLWQRLSIALQRFNAVCFSGTLAKAASQSAEELF

SEQ ID NO: 2229 - protein, 982 aa, Enchytraeus crypticus
MPPRKHTRSLSQDANKRNGTCSVCLEVFQLHIRDGSVHLHGPRDNRRLGSHKPPIEAQGTFSSQRSSSDVRDEDHHPPVFPSNSIPPIRHPSDAATVFAHPNLTSGTIKHIPKSVRATCATYLINILDRISKCVDDLEAWKSLLAIGEDILLAPKRTGKRHNMASLIRKRVSGVEVPVSDDERAKFRKSSRPRTPEESLRSIVTSKIEDGNLRAAVRILCSEESLAPNNDETYRELSLKHPSADSTPRSLLSSASPQANTLQVTEAEVMKAVKSFPAGSSGGPDGLRPQHILQLVTCPIMGRETLTAITGFVNLLLLGKCHQEVKPFLFGANLIALKKKTGGLRPIAVGYSWRRIAAKCANSFALDRLSNSLQPIQVGVGVKGGCEAAVHATRRFISSMPDDWVVAKLDFCNAFNSLKRVPMLEAVDSSLPELGPFCRLSYEDPSVLRFGQRVIMSSEGVQQGDPLGPLLFSLTIHPLLQSLSSSLKIGYLDDITVGGVESTVADDISRLMVAGKALGLSLNINKCELITTRSDSNFPAINSFIRVKPVEASLLGASLQTGQAMDLALNTQCSKLERAASRLKLISAHDALTILRSCVGSSKLIYLLRASPCAGHPALQNYDSTMRKSLSSIVNINVNEAQWIQASLPICYGGLGIRSVSSLAPSAFLASAAGTGVLQDSILSGFFQIPDLEISRIQGIWTALSTSEPPIGMMANSMKAWDSKVTTALHTELLAKPLLPQEKARLLAVSAPHSGDWIKALPISSCGLRLDDEAVRVAAGLRLGTTLCEPHNCICGVSVNALGIHGLSCKRSAGRISRHQFINDLIWRALSRANIPAIKEPLGLIRTDGKRPDGVSQIPWAEGKCVSWDVTVTDTFSVSNLGLSCAAAGAAAEAAANRKTLKYAEISGNYIFMPIAFETLGPINSLASDFIDEIGRRTSAITGDKREKSFLWQRLSIALQRFNAVCFSGTLAKAASQSAEELF

SEQ ID NO: 2230 - protein, 982 aa, Enchytraeus crypticus
MPPRKRTWSLSQDANKRNGTCSVCLEVFQLHIRDGSVHLHGPRDNRCLGSHKPPIEAQGTFSSQRSSSDVRDEDHHPPVFPSNSIPPIRHPSDAATVFAHPNLTSGTIKHIPKSVRATCATYLINILDRISKCVDDLEAWKPLLAIGDDILLAPKRTGKRHNMASLIRKRVSGVEVPVSDDERAKFRKSSRPRTPEESLRSIVTSKIEDGNLRAAVRILCSEESLAPNNDETYRELSLKHPSADSTPRSLLSSASPQANTLQVTEAEVMKAVKSFPAGSSGGPDGLRPQHILQLVTCPIMGRETLTAITGFVNLLLLGKCHQEVKPFLFGANLIALKKKTGGLRPIAVGYSWRRIAAKCANSFALDRLSNSLQPIQVGVGVKGGCEAAVHATRRFISSMPDDWVVAKLDFCNAFNSLKRVPMLEAVDSSLPELGPFCRLSYEDPSVLRFGQRVIMSSEGVQQGDPLGPLLFSLTIHPLLQSLSSSLKIGYLDDITVGGVESTVADDISRLMVAGKALGLSLNINKCELITTRSDSNFPAINTFIRVKPVEASLLGAPLQTGQAMDLALNTQCSKLERAASRLKLISAHDALTILRSCVGSSKLIYLLRASPCAGHPALQNYDSIMRKSLSSIVNINVNEAQWIQASLPICYGGLGIRSVSSLAPSAFLASAAGTGVLQDSILSGFFQIPDLEISRIQGIWTALSTSEPPIGMTANSMKAWDSKVTTALHTELLAKPLLPQEKARLLAVSAPHSGDWIKALPISSCGLRLDDEAVRVAAGLRLGTTLCEPHNCICGVSVNALGIHGLSCKRSAGRISRHQFINDLIWRALSRANIPAIKEPLGLIRTDGKRPDGVSQIPWAEGKCVSWDVTVTDTFSVSNLGLSCAAAGAAAEAAANRKTLKYAEISGNYIFMPIAFETLGPINSLASDFIDEIGRRTSAITGDKREKSFLWQRLSIALQRFNAVCFSGTLAKAASQSAEELF

SEQ ID NO: 2231 - protein, 997 aa, Enchytraeus crypticus
MPPRKHTWSLSQDANKRNGTCSVCLEVFQLHIRDGSVHLHGPRDNRCLGSHKPPIEAQGTFSSQRSSSDVRDEDHHPPVFPSNSIPPIRHPSDAATVFAHPNLTSGTIKHIPKSVRATCATYLINILDRISKCVDDLEAWKSLLAIGEDILLAPKRTGKRHNMASLIRKRVSGVEVPVSDDERAKFRKSSRPRTPEESLRSIVTSKIEDGNLRAAVRILCSEESLAPNNDETYRELSLKHISQYTPAVSTPRSLLSSASPPANTLQVTEAEVMKAVKSFPAGSSGGPDGLRPQHILQLVTCPIMGRETLTAITGFVNLLLLGKCHQEVKPFLFGANLIALKKKTGGLRPIAVGYSLRRIAAKCAKCANSFALDRLSNSLQPIQVGVGVKGGCEAAVHATRRFISSMPDDWVVAKLDFCNAFNSLKRVPMLEAVDSSLPELGPFCRLSYEDPSVLRFGQRVIMSSEGVQQGDPLGPLLFSLTIHPLLQSLSSSLKIGYLDDITVGGVESTVADDISRLMVAGKALGLSLNINKCELITTRSDSNFPAINTFIRVKPVEASLLGAPLQTGQAMDLDLNTQCSKLERAASRLKLISAHDALTILRSCVGSSKLIYLLRASPCAGHPAWQNYDSIMRKSLSSIVNINVNEAQWIQASLPICYGGLGIRSVSSLAPSAFLASAAGTGVRQDSILSGFFQIPDLEISRIQGIWTALSTIEPPIGMMANSMRVLDSKVTTALHTELLAKPLLPQEKARLLAVSAPHSGDWIKALPISSCGLRLDDEAVRVAAGLRLGTTLCEPHNCMCGVSVNALGIHGLSCKRSAGRISRHQFINDLIWRALSRVNIPAIKEPLGLIRTDGKRPDGVSQIPWAEGKCVSWDVTVTDTFSVSNLGLSCAAAGAAAEAAANRKTLKYAKISGNYIFMPIAFETLGPINSLASDFIDEIGRRTSAITGDKREKSFCGSDCLLLSSDSMQSASVALWLKRLPRVQRNYFNRFLNTFN

SEQ ID NO: 2232 - protein, 950 aa, Enchytraeus crypticus
MPPRKHTWSLSQDANKRNGTCSVCLEVFQLHIRDGSVHLHGPRDNRCLGSHKPPIEAQGTFSSQRSSSDVRDEDHHPPVFPSNSIPLIRHPSDAATVFAHPNLTSGTIKHIPKSVRATCATYLINILDRISKCVDDLEAWKSLLAIGEDILLAPKRTGKSHNMASLIRKRVSGVDVPVSDDERAKFRKSSRPRTPEESLQSIVTSKIEDGNLRAAVRILCSEESLAPNNDETYRELILKHPSADSTPRSLLSSASPQANTLQVTEAEVMKAVKSFPAGSSGGPDGLRPQHILQLVTCPIMGREALTAIASSVNLLLLGKCHQEVKPFLFGANLIALKKNTGGLRPIAVGYSWRRIAAKCANSFALDRLLNSLQPIQVGVGVKGGCEAAVHATRRFISSMPDDWVVAKLDFCNAFNSLKMVPMLEAVDSSLPELGPFCRLSYEDPSVLRFGQRVIMSSEGVQQGDPLGPLLFSLTIHPLLQSLSSSLKIGYLDDITVGGVESTVADDISRLMVAGKALGLSLNINKCELITTRSDSNFPASNSFIRVKPVEASLLGAPLQTGQAMDLALNTQCSKLDRAASRLKLISAHDALTILRSCVGSSKLIYLLRASPCAGHPALQNYDSIMRKSLSSIVNINVNEAQWIQTSLPICYGGLGIRSVSSLAPSAFLASAAGTGVLQDSILSGFFQIPDLEISRSQGIWTALSTSEPPIGMMANSMKAWDSKVTTAFHTELLAKPLLPQEKARLLAVSAPHSGDWIKALPISSFGLRLDDEAVRVAAGLRLGTTLCEPHNCICGVSVHALGIHGLSCKRSAGRISRHQFINDLIWRALSRANTPAIKEPLGLIRTDGKRPDGVSQIPWAEGKCVSWDVTVTDTFSVSNLGLSCAAAGAAAEAAANRKPLKYAEISGNYIFMPIAFETLGSMNSLASDFIDEIGRRTSAITGDKREKSFL

SEQ ID NO: 2233 - protein, 941 aa, Apotomis turbidana
MNMSNPNLQSCPFCPDDSRQFVAPRGLSVHISRVHRGTGGHGSQASNVAESTAQNTNIDLEFSKLPDLRKRVKVLRHIPKGARNLAAGKLCSVIQNCLRNNEVDDWFALLSFSFTALRVPESTDHRSLTSRVKENIDNCFLYFPAEIGRKPSSVYRSIEAKVHDGDLRGAVRLLLSDSTLAPADADTLKVLSDKHPAPSRQLDLPSEPDLSSPFLTVTEGEVAIALASFYNGSASGLDGLRPQHLKELTSPAAGNNGTKLMESLTRLCNFLLRGMVNPQVCPYLYGASLCALAKKDGGIRPIAVGNTLRRLVAKLACRAVREDMANYLQPHQVGFGTPLGCEAAIHAVRSFTMAQDNVADVILKLDIKNAFNSVERDIILKEAKDRVPSLYPFLHQCYSSPSNLFYDSSPISSQVGAQQGDPLGPLLFCLAVQKVVVSLESPLNIWYLDDGTLGGRPDVVLGDVRKLLTALSGVGLEVNSDKCELFPCGPGSIDSLSDFQAILPGLKVVDKSSFMLLGAPIYSEAVSGVIQDKAAAMAGSIEHLQHLSAHVSLVLLRNCFSMPRVTYTLRTAPTWMFPQVMQDFDLILRKGLEVILNVSFDESQWCQVTLPIRHGGLGVRRMQDVGLVAFLASSYASLDLVGRILSRNIESIHMPYLEEALAEWSVRCSSGSRPEQLKVQRSWDDILCRQAYNSLLEGASGVELARLKAAIEPESGAWLNALPSSHLGTLLDDDSLRVGVALRLGCRVCEPHLCVCGVMVEANGHHGLSCVRCAGRFPRHHAINDIVRRAMVSANLPCVLEPQGLSRLDGKRPDGLTLVPWAKGRSLLWDATCVSTFATSHLAQTTRSAGGAAENAAKLKHAKYSNLKPMYDFIPLAVETAGPWCSEAKQFIRALGKRMRDRGCDERSGSYLVQRISLAIQRGNAAGIFGTFEPGTYQAVR

SEQ ID NO: 2234 - protein, 941 aa, Apotomis turbidana
MNMSNPNLQSCPFCPDDSRQFVAPRGLSVHISRVHRGTGGHGSQASNVAENTAQNTNIDLEFSKLPDLRKRVKVLRHIPKGARNLAAGKLCSVIQNCLRNNEVDDWFALLSFSFTALRVPESTDHRSLTSRVKENIDNCFLYFPAEIGRKPSSVYRSIEAKVHDGDLRGAVRLLLSDSTLAPADADTLKVLSDKHPAPSRQLDLPSEPDLSSPFLTVTEGEVAIALASFYNGSASGLDGLRPQHLKELTSPAAGNNGTKLMESLTRLCNFLLRGMVNPQVCPYLYGASLCALAKKDGGIRPIAVGNTLRRLVAKLACRAVREDMANYLQPHQVGFGTPLGCEAAIHAVRSFTMAQDNVADVILKLDIKNAFNSVERDIILKEAKDRVPSLYPFLHQCYSSPSNLFYDSTPISSQVGAQQGDPLGPLLFCLAVQKVVVSLESPLNIWYLDDGTLGGRPDVVLGDVRKLLTALSGVGLEVNSDKCELFPCGPGSIDSLSDFQAILPGLKVVDKSSFMLLGAPIYSEAVSGVIQDKAAAMAGSIEHLQHLSAHVSLVLLRNCFSMPRVTYTLRTAPTWMFPQVMQDFDLILRKGLEVILNVSFDESQWCQVTLPIRHGGLGVRRMQDVGLVAFLASSYASLDLVGRILSRNIESIHMPYLEEALAEWSVRCSSGSRPEQLKVQRSWDDILCRQAYNSLLEGASGVELARLKAAIEPESGAWLNALPSSHLGTLLDDDSLRVGVALRLGCRVCEPHLCVCGVMVEANGHHGLSCVRCAGRFPRHHAINDIVRRAMVSANLPCVLEPQGLSRLDGKRPDGLTLVPWAKGRSLLWDATCVSTFATSHLAQTTRSAGGAAENAAKLKHAKYSNLKPMYDFIPLAVETAGPWCSEAKQFIRALGKRMRDRGCDERSGSYLVQRISLAIQRGNAAGIFGTFEPGTYQAVR

SEQ ID NO: 2235 - protein, 941 aa, Apotomis turbidana
MNMSNPNLQSCPFCPDDSRQFVAPRGLSVHISRVNRGTGGHGSQASNVAESTAQNTNIDLEFSKLPDLRKRVKVLRHIPKGARNLAAGKLCSVIQNCLRNNEVDDWFALLSFSFTALRVPESTDHRSLTSRVKENIDNCFLYFPAEIGRKPSSVYRSIEAKVHDGDLRGAVRLLLSDSTLAPADADTLKVLSDKHPAPSRQLDLPSEPDLSSPFLTVTEGEVAIALASFYNGSASGLDGLRPQHLKELTSPAAGNNGTKLLESLTRLCNFLLRGMVNPQVCPYLYGASLCALAKKDGGIRPIAVGNTLRRLVAKLACRAVREDMANYLQPHQVGFGTPLGCEAAIHAVRSFTMAQDNVADVILKLDIKNAFNSVERDIILKEAKDRVPSLYPFLHQCYSSPSNLFYDSSPISSQVGAQQGDPLGPLLFCLAVQKVVVSLESPLNIWYLDDGTLGGRPDVVLGDVRKLLTALSGVGLEVNSDKCELFPCGPGSIDSLSDFQAILPGLKVVDKSSFMLLGAPIYSEAVSGVIQDKAAAMAGSIEHLQHLSAHVSLVLLRNCFSMPRVTYTLRTAPTWMFPQVMQDFDLILRKGLEVILNVSFDESQWCQVTLPIRHGGLGVRRMQDVGLVAFLASSYASLDLVGRILSRNTESIHMPYLEEALAEWSVRCSSGSRPEQLKVQRSWDDILCRQAYNSLLEGASGVELARLKAVIEPESGAWLNALPSSHLGTLLDDDSLRVGVALRLGCRVCEPHLCVCGVMVEANGHHGLSCVRCAGRFPRHHAINDIVRRAMVSANLPCVLEPQGLSRLDGKRPDGLTLVPWAKGRSLLWDATCVSTFATSHLAQTTRSAGGAAENAAKLKHAKYSNLKPMYDFIPLAVETAGPWCSEAKQFIRALGKRMRDRGCDERSGSYLVQRISLAIQRGNAAGIFGTFEPGTYQAVR

SEQ ID NO: 2236 - protein, 938 aa, Cydia splendana
MSNPNLQACPYCPGAARQYVVPRGLNVHISRVHRDVIGVQVRPSTGEELGPGVGNDVEITKLAELKKNVRVLRHVPRGARNLAAGKLCGIIQDCLSNNELKDWFSLLTFSFTALRVPEGANHGSLTSKVKENVDSCCLYFPAEVGLKTSSVYRTIEAKVHDGDLRGAVRLLFSDSTLAPANGDTLEALVGKHPSPSRQLDFPPDPDLSSPFLTVTQEEVVGALGSFYNGSASGLDGLRPQHLKELTSLSAGDNGRKLLESLTRLCNFLLRGMVNPQACPYLYGASLCALAKRDGGIRPIAVGNTLRRLVSKLACRAVKEEMAKYLQPFQVGFGTPLGCEAAIHAVRSFAMAQENVSSVLLKVDIRNAFNTVERDVILREVKDRVPSLYPFLHQCYSSPSNLFYGTNPIASRVGAQQGDPLGPLLFCLAVQGVIRSLASPLNVWYLDDGTLGGAPDVVLGDVRKLVQALSAVGLQINAEKCELFLCSSDRGGSVADFEAVLPGLRLVERSSLSLLGAPIFPEGVSQVVQEKTVALSESVKHLQHLSAHVSLVLLRNCLSIPRVTYTLRTAPTWMHMQVVLQFDQVLQSGLESILNVRFEGSQWCQAALPIRHGGLGVRRMQDVGLVAFLASSYASRGLVARILSISEGDVHMPFLGAALGEWSVRCSDDTRPDNLGVQRSWDDVLCRQMYERLLEGASGVELARLKAVVAPESGAWLHALPSSHLGTLLDNDSLRIGAALRLGCAVCEPHLCVCGVMVEANGHHGLSCARCAGRFPRHHAINDIVRRAMVSANLPCMLEPQGLSRTDGKRPDGLTLVPWAKGRSLLWDATCVSTFAASHLAQTTRAAGGAAENAARQKHAKYSNLKPVYDFVPLAVESAGPWCSEAKVFVMDLGKRMRDRGCDPRSGSYLVQRISLAIQRGSAAGILGTFVPGTYRIRI

SEQ ID NO: 2237 - protein, 667 aa, Apotomis turbidana
MVNPQVCPYLYGASLCALAKKDGGIRPIAVGNILRRLVAKLACRAVREDMANYLQPHQVGFGTPLGCEAAIHAVRSFTMAQDNVADVILKLDIKNAFNSVERDIILKEAKDRVPSLYPFLHQCYSSPSNLFYDSSPISSQVGAQQGDPLGPLLFCLAVQKVVVSLESPLNIWYLDDGTLGGRPDVVLGDVRKLLTALSGVGLEVNSDKCELFPCGPGSIDSLSDFQAILPGLKVVDKSSFMLLGAPIYSEAVSGVIQDKAAAMAGSIEHLQHLSAHVSLVLLRNCFSMPRVTYTLRTAPTWMFPQVMQDFDLILRKGLEVILNVSFDESQWCQVTLPIRHGGLGVRRMQDVGLVAFLASSYASLDLVGRILSRNIESIHMPYLEEALAEWSVRCSSGSRPEQLKVQRSWDDILCRQAYNSLLEGASGVELARLKAVIEPESGAWLNALPSSHLGTLLDDDYLRVGVALRLGCRVCEPHLCVCRAMVEANGHHGLSCVRCAGRFPRHHAINDIVRRAMVSANLPCVLEPQGLSRLDGKRPDGLTLVPWAKGRSLLWDATCVSTFATSHLAQTTRSAGGAAENAAKLKHAKYSNLKPVYDFIPLAVETAGPWCSEAKQFIRALGKRMRDRGCDERSGPYLVQRISLAIQRGNAAGIFGTFEPGTYQAVR

SEQ ID NO: 2238 - protein, 1008 aa, Phalera bucephala
MPILPEVSPKSCQLLNLSRIFLIFCVFCMFLTVCIYISNFLALALSLLLFLFLSHSVRMLTTASQPELLPCRQCSDGRLFKGTRGLKIHTARCHIRSITSSLPAGQGVPPIPTSSATSFTSATQPTFPFEILISRLYRSTPIVKRIPRGARVSLARSLSFTIGKCFDNSEKSWRDLFTFAFSHLHADKSINTTLTHQLKQHCFTHSDPVLPPLVNCPRIYNFKHKIESKVQEGDLRNAARLLFSNDTLAPNNDLTLDSLREKHPSANSVSQLPNPPQINIKKLQINEKDVLEAIMSFPSGSSGGIDGITPQHLKDLVSASAGDAGGALISSLTKLCNFMLAGHVNRSFLPYLYGARLCAFNKKDGGIRPIAIGATIRRLTSKIVCRHIASTLKSKFQPIQLGFGSKGGCEAAVHATRTFVLSNEMEVLLKVDVRNAFNSLDRAALLNEVASQLPEIYPYIWQCYSDSSKLIFGENSIDSAVGVQQGDPLGPALFSLGIHRHISSLKSKLNVWYLDDGTLGGKANTVFSDFIKINNTFKNLGLELNLSKCEFFVSESLPLNEKQFITEKFQKFAPGVKILSRNSLCLLGAPLFDDGVKPFLESKIKQFQDNSFRLGVLNRHIAYTILKYCLFVPKLTYATRASPIWKFSALIDQMDTALKDNLEKILNLSLNEASWTQATLPIRHGGIGVRKIASIALPAFLASVYSVQELCSKILSNTELVAGAAEALEAWKRICPNDNIPKEVNVQKLWDMPLVQIAKDYLAEIIVSDRDRARLLALGQKESGHWLHSIPASNLGTLLDSESFRIAIGIRLGAPICEEHRCPCGAEVDRSGLHGLSCRKSAGRFSRHGSLNDIIKRTLATINVPSVLEPAGIFRDDGKRPDGMSLIPWERGRALVWDATCVDTLAPSHLRESISRAGAAAEKADLGKRRKYAAISNNYIFVPFAVETLGPWSSASKQFINKITPTLITSSGDKRAGSFLAQKIGLSIQRGNAASILATIPRGCGLFD

SEQ ID NO: 2239 - protein, 977 aa, Phalera bucephala
MFSSVCLYIICLFVLVLSLLVFVVRAQMLGSSSQPELLPCRQCGDGRRFKGARGLKIHIARSHNQSIPSSLPTVHDVSPITSTSVFPINSTNSPTIPFEITISRLHRCIPIVKRIPRGARMSLAKSFSNIIEKCVHNSTESWQELFTFAFNHLHADRSLNTSLTHQLKQRCAAPSHSILLQPTGPPKNFNLTRKIEAKVQEGDLRNAARLLFSNDTLAPNNDRTLDTLRDKHPSANPVSKLPDPPHFNSHYMHIKEKDVLEAIMSFPNGSAGGIDGITPQHLKDLISVSAGDAGSALLSSLTKLCNFMLSGQVQHSFLPYLYGARLCAFNKKDGGIRPIAIGSTIRRLTSKIVCRHIASTLRSKFQPIQLGFGSKGGCEAAVHATRTFVLSSEMEVLLKVDVRNAFNSLDRAALLNEVASNLPEIYPYVWQCYSDSSKLLFGENSIDSAVGVQQGDPLGPALFSLGIHRHISSLNSKLNIWYLDDGTLGGKAVTVLNDLIKIKHEFKNLGLELNYSKCEVFFSDTLTQNQVHSISDNFNSITPGIKILCKDSLCLLGAPLLDEGAKPFLEDKIKNFQDNSFRLGGLNRHISYTILKHCLFVPKFMYTTRASPIWKFRTILEQMDTTLRHSLEKTLNLPLNEASWTQATLPIKHGGIGIRKMSCVALPAFLASVHSVQELCSKILSNTNLVAGASEALEAWKFICPNVDVPKEANVQKLWDMPLVQVTKKYLDEINISDRDRARLLALGQTESGHWLHAIPSVNLGTLLDDESFRVAVGIRLGAPICCEHICPCGVEVDRSGLHGLSCRKSAGRFSRHSSINDIIKRALATINVPAVLEPIGMFRDDGKRPDGMTLIPWNRGRALVWDATCVDTLAPSHLRESVSKAGAAAEKADLGKRHKYVSISRDYIFVPFAVETLGPWSNCAKSFLKSLTPRLIASTGDKRAGLFLAQKISLAVQRGNAASSLATIPRGQDLDL

SEQ ID NO: 2240 - protein, 980 aa, Phalera bucephala
MFLTVCIYISNFLVLALSLLLFLFLSHSVRMLTIASRPELLPCRQCSDGRLFKGTRGLKIHTARCHIRSITSSLPAGQGVPPIPTSSATSFTTATQPTFPFEILISRLYRSTPIVKRIPRGARVSLARSLSFTIEKCFDNSEKSWRDLFTFAFSHLHADKSINTTLTHQLKQHCFTHSDPVLPPLVNCPRIYNFKHKIESKVQEGDLRNAARLLFSNDTLAPNNDLTLDSLREKHPSANSVSQLPNPPQISIKKLQINEKDVLEAIMLFPSGSSGGIDGITPQHLKDLVSASAGDAGGALLSFLTKLCNFMPAGHVNRSFLPYLYGARLCAFNKKDGGIRPIAIGATIRRLTSKIVCRHIASTLKSKFQPIQLGFGSKGGCEAAVHATRTFVLSIEMEVLLKVDVRNAFNSLDRAALLNEVASQLPEIYPYIWQCYSDSSKLIFGENSIDSAVGVQQGDPLGPALFSLGIHRHISSLKSKLNVWYLDDGTLGGKANTVFSDFIKINSTFKNLGLELNLSKCEFFVSESLPLNEKQFITEKFQKFAPGVKILSRNSLCLLGAPLFDDGVKPFLESKIKQFQDNSFRLGVLNRHIAYTILKYCLFVPKLTYATRASPIWKFSALIDQMDTALKDNLEKNLNLSLNEASWTQATLPIRHGGIGVRKIASIALPAFLASVYSVQELCSKILSNTELVAGAAEALEAWKRICPNDNIPKEVNVQKLWDMPLVQIAKDYLAEIIVSDRDRARLLALGQKESGHWLHSIPASNLGTLLDSESFRIAIGIRLGAPICEEHRCPCGAEVDRSGLHGLSCRKSAGRFSRHGSLNDIIKRTLATINVPSVLEPAGIFRDDGKRPDGMSLIPWERGRALVWDATCVDTLAPSHLRESISRAGAAAEKADLGKRRKYAAISNNYIFVPFAVETLGPWSSASKQFINKITPTLITSSGDKRAGSFLAQKIGLSIQRGNAASILATIPRGCGLFD

SEQ ID NO: 2241 - protein, 980 aa, Phalera bucephala
MFLTVCIYISNFLVLALSLLLFLFLSHSVRMLTTASQPELLPCRQCSDGRLFKGTRGLKIHTARCHIRSITSSLPAGQGVPPIPTSSATSFTSATQPTFPFEILISRLYRSTPIVKRIPRGARVSLARSLSFTIEKCFDNSEKSWRDLFTFAFSHLHADKSINTTLTHQLKQHCFTHSDPVLPPLVNCPRIYNFKHKIESKVQEGDLRNAARLLFSNDTLAPNNDLTLDSLREKHPSANSVSQLPNPPQINIKKLQINEKDVLEAIMSFPSGSSGGIDGITPQHLKDLVSASAGDAGGALLSSLTKLCNFMLAGHVNRSFLPYLYGARLCAFNKKDGGIRPIAIGATIRRLTSKIVCRHIASTLKSKFQPIQLGFGSKGGCEAAVHATRTFVLSNEMEVLLKVDVRNAFNSLDRAALLNEVASQLPEIYPYIWQCYSDSSKLIFGENSIDSAVGVQQGDPLGPALFSLGIHRHISFLKSKLNVWYLDDGTLGGKANTVFSDFIKINSTFKNLGLELNLSKCEFFVSESLPLNEKQFITEKFQKFAPGVKILSRNSLCLLGAPLFDDGVKPFLESKIKQFQDNSFRLGVLNRHIAYTILKYCLFVPKLTYATRASPIWKFSALIDQMDTALKDNLEKILNLSLNEASWTQATLPIRHGGIGVRKIASIALPAFLASVYSVQELCSKILSNTELVAGAAEALEAWKRICPNDNIPKEVNVQKLWDMPLVQIAKDYLAEIIVSDRDRARLLALGQKESGHWLHSIPASNLGTLLDSESFRIAIGIRLGAPICEEHRCPCGAEVDRSGLHGLSCRKSAGRFSRHGSLNDIIKRTLATINVPSVLEPAGIFRDDGKRPDGMSLIPWERGRALVWDATCVDTLAPSHLRESISRAGAAAEKADLGKRRKYAAISNNYIFVPFAVETLGPWSSASKQFINKITPTLITSSGDKRAGSFLAQKIGLSIQRGNAASILATIPRGCGLFD

SEQ ID NO: 2242 - protein, 981 aa, Phalera bucephala
MPILPEVSPKSCQLLNLSRIFLIFCVFCMFLTVCIYISNFLVLALSLLLFLFLSHSVRMLTTASQPELLPCRQCSDGRLFKGTRGLKIHTARCHIRSITSSLPAGQGVPPIPTSSATSFTSATQPTFPFEILISRLYRSTPIVKRIPRGARVSLARSLSFTIEKCFDNSEKSWRDLFTFAFSHLHADKSMNTTLTHQLKQHCFTHSDPVLPPLVNCPRIYNFKHKIESKVQEGDLRNAARLLFSNDTLAPNNDLTLDSLREKHPSANSVSQLPNPPQINIKKLQINEKDVLEAIMSFPSGSSGGIDGITPQHLKDLVSASAGDAGGALLSSLTKLCNFMLAGHVNRSFLPYLYGARLCAFNKKDGGIRPIAIGATIRRLTSKIVCRHIASTLKSKFQPIQLGFGSKGGCEAAVHATRTFVLSNEMEVLLKVDVRNAFNSLDRAALLNEVASQLPEIYPYIWQCYSDSSKLIFGENSIDSAVGVQQGGPLGPALFSLGIHRHISSLKSKLNVWYLDDGTLGGKANTVFSDFIKINNTFKNLGLELNLSKCEFFVSESLPLNEKQFITEKFQKFAPGVKILSRNSLCLLGAPLFDDGVKPFLESKIKQFQDNSFRLGVLNRHIAYIILKYCLFVPKLTYATRASPIWKFSALIDQMDTALKDNLEKILNLSLNEASWTQATLPIRHGGIGVRKIASIALPAFLASVYSVQELCSKILSNTELVAGAAEALEAWKRICPNDNIPKEVNVQKLWDMPLVQIAKNYLAEIIVSDRDRARLLALGQKESGHWLHSIPASNLGTLLDSESFRIAIGIRLGAPICEEHRCPCGAEVDRSGLHGLSCRKSAGWFSRHGSLNDIIKRTLATINVPSVLEPAGIFRDDGKRPDGMSLIPWERGRALVWDATCVDTLAPSHLRESISRAGAAAEKADLGKRRKYAAISNNYIFVPFAVETLGPWSSASKQFINKITPTLITSSGDKRAGSFLA

SEQ ID NO: 2243 - protein, 1024 aa, Phalera bucephala
MRHGNGASRRRSVPRCMPILPEVSPKSCQLLNLSRIFLIFCVFCMFLTVCIYISNFLVLALSLLLFLFLSHSVRMLTTASQPELLPCRQCSDGRLFKGTRGLKIHTARCHIRSITSSLPAGQGVPPIPTSSATSFTSATQPTFPFEILISRLYRSTPIVKRIPRGARVSLARSLSFTIEKCFDNSEKSWRDLFTFAFSHLHADKSINTTLTHQLKQHCFTHSDPVLPPLVNCPRIYNFKHKIESKVQEGDLRNAARLLFSNDTLAPNNDLTLDSLREKHPSANSVSQLPNPPQINIKKLQINEKDVLEAIMSFPSGSSGGIDGITPQHLKDLVSASAGDAGGALLSSLTKLCNFMLAGHVNRSFLPYLYGARLCAFNKKDGGIRPIAIGATIRRLTSKIVCRHIASTLKSKFQPIQLGFGSKGGCEAAVHATRTFVLSNEMEVLLKVDVRNAFNSLDRAALLNEVASQLPEIYPYIWQCYSDSSKLIFGENSIDSAVGVQQGDPLGPALFSLGIHRHISSLKSKLNVWYLDDGTLGGKANSVFSDFIKINNTFKNLGLELNLSKCEFFVSESLPLNEKQFITEKFQKFAPGVKILSRNSLCLLGAPLFDDGVKPFLESKIKQFQDNSYRLGVLNRHIAYIILKYCLFVPKLTYATRASPIWKFSALIDQMDTALKDNLEKILNLSLNEASWTQATLPIRHGGIGVRKIASIALPAFLASVYSVQELCSKILSNTELVAGAAEALEAWKRICPNDNIPKEVNVQKLWDMPLVQIAKNYLAEIIVSDRDRARLLALGQKESGHWLHSIPASNLGTLLDSESFRIAIGIRLGAPICEEHRCPCGAEVDRSGLHGLSCRKSAGRFSRHGSLNDIIKRTLATINVPSVLEPAGIFRDDGKRPDGMSLIPWERGRALVWDATCVDTLAPSHLRESISRARAAAEKADLGKRRKYAAISNNYIFVPFAVETLGPWSSASKQFINKITPTLITSSGDKRAGSFLAQKIGLSIQRGNAASILATIPRGCGLFD

SEQ ID NO: 2244 - protein, 1024 aa, Phalera bucephala
MRHGNGASRRRSVPRCMPILPKVSPKSCQLLNLSRIFLIFCVFCMFLTVCIYISNFLVLALSLLLFLFLSHSVRMLTTASQPELLPCRQCSDGRLFKGTRGLKIHTARCHIRSITSSLPAGQGVPPIPTSSATSFTSATQPTFPFEILISRLYRSTPIVKRIPRGARVSLARSLSFTIEKCFDNSEKSWRDLFTFAFSHLHADKSINTTLTHQLKQHCFTHSDPVLPPLVNCPRIYNFKHKIESKVQEGDLRNAARLLFSNDTLAPNNDLTLDSLREKHPSANSVSQLPNPPQINIKKLQINEKDVLEAIMSFPSGSSGGIDGITPQHLKDLVSASAGDAGGALLSSLTKLCNFMLAGHVNRSFLPYLYGARLCAFNKKDGGIRPIAIGATIRRLTSKIVCRHIASTLKSKFQPIQLGFGSKGGCEAAVHATRTFVLSNEMEVLLKVDVRNAFNSLDRAALLNEVASQLPEIYPYIWQCYSDSSKLIFGENSIDSAVGVQQGDPLGPALFSLGIHRHISSLKSKLNVWYLDDGTLGGKANTVFSDFIKINNTFKNLGLELNLSKCEFFVSESLPLNEKQFITEKFQKFAPGVKILSRNSLCLLGAPLFDDGVKPFLESKIKQFQDNSFRLGVLNRHIAYTILKYCLFVPKLTYATRASPIWKFSALIDQMDTALKDNLEKILNLSLNEASWTQATLPIRHGGIGVRKIASIALPAFLASVYSVQELCSKILSNTELVAGAAEALEAWKRICPNDNIPKEVNVQNLWDMPMVQIAKNYLAEIIVSDRDRARLLALGQKESGHWLHSIPASNLGTLLDSESFRIAIGIRLGAPICEEHRCPCGAEVDRSGLHGLSCRKSAGRFSRHGSLNDIIKRTLATINVPSVLEPAGIFRDDGKRPDGMSLIPWERGRALVWDATCVDTLAPSHLRESISRAGAAAEKADLGKRRKYAAISNNYIFVPFAVETLGPWSSASKQFINKITPTLITSSGDKRAGSFLAQKIGLSIQRGNAASILATIPRGCGLFD

SEQ ID NO: 2245 - protein, 714 aa, Phalera bucephala
MSFPSGSSGGIDGITPQHLKDLVSASAGDAGGALLSSLTKLCNFMLAGHVNRSFLPYLYGARLCAFNKKDGGIRPIAIGATIRRLTSKIVCRHIASTLKSKFQPIQLGFGSKGGCEAAVHATRTFVLSNEMEVLLKVDVRNAFNSLDRAALLNEVASQLPEIYPYIWQCYSDSSKLIFGENSIDSAVGVQQGDPLGPALFSLGIHRHISSLKSKLNVWYLDDGTLGGKANTVFSDFIKINSTFKNLGLELNLSKCEFFVSESLPLNEKQFITEKFQKFAPGVKILSRNSLCLLGAPLFDDGVKPFLESKIKQFQDNSFRLGVLNRHIAYTILKYCLFVPKLTYATRASPIWKFSALIDQMDTALKDNLEKILNLSLNEASWTQATLPIRHGGIGVRKIASIALPAFLASVYSVQELCSKILSNTELVAGAAETLEAWKRICPNDNIPKEVNVQKLWDMPLVQIAKDYLAEIIVSDRDRARLLALGQKESGRWLHSIPASNLGTLLDSESFRIAIGIRLGAPICEEHRSPCGAEVDRSGLHGLSCRKSAGRFSRHGSLNDIIKRTLATINVPSVLEPAGIFRDDGKRPDGMSLIPWERGRALVWDATCVDTLAPSHLRESISRAGAAAEKADLGKRRKYAAISNNYIFVPFAVETLGPWSSASKQFINKITPTLITSSGDKRAGSFLAQKIGLSIQRGNAASILATIPRGCGLFD

SEQ ID NO: 2246 - protein, 950 aa, Phalera bucephala
MLTTASQPELLPCRQCSDGRLFKGTRGLKIHTARCHIRSITSSLPAGQGVPPIPTSSATSFTSATQPTFPFEILISRLYRSTPIVKRIPRGARVSLARSLSFTIEKCFDNSEKSWRDLFTFAFSHLHADKSINTTLTHQLKQHCFTHSDPVLPPLVNCPRIYNFKHKIESKVQEGDLRNAARLLFSNDTLAPNNDLTLDSLREKHPSANSVSQLPNPPQINIKKLQINEKDVLEAIMSFPSGSSGGIDGITPQHLKDLVSASAGDAGGALLSSLTKLCNFMLAGHVNRSFLPYLYGARLCAFNKKDGGIRPIAIGATIRRLTSKIVCRHIASTLKSKFQPIQLGFGSKGGCEAAVHATRTFVLSNEMEVLLKVDVRNAFNSLDRAALLNEVASQLPEIYPYIWQCYSDSSKLIFGENSIDSAVGVQQGDPLGPALFSLGIHRHISFLKSKLNVWYLDDGTLGGKANTVFSDFIKINSTFKNLGLELNLSKCEFFVSESLPLNEKQFITEKFQKFAPGVKILSRNSLCLLGAPLFDDGVKPFLESKIKQFQDNSFRLGVLNRHIAYTILKYCLFVPKLTYATRASPIWKFSALIDQMDTALKDNLEKILNLSLNEASWTQATLPIRHGGIGVRKIASIALPAFLASVYSVQELCSKILSNTELVAGAAEALEAWKRICPNDNIPKEVNVQKLWDMPLVQIAKDYLAEIIVSDRDRARLLALGQKESGHWLHSIPASNLGTLLDSESFRIAIGIRLGAPICEEHRCPCGAEVDRSGLHGLSCRKSAGRFSRHGSLNDIIKRTLATINVPSVLEPAGIFRDDGKRPDGMSLIPWERGRALVWDATCVDTLAPSHLRESISRAGAAAEKADLGKRRKYAAISNNYIFVPFAVETLGPWSSASKQFINKITPTLITSSGDKRAGSFLAQKIGLSIQRGNAASILATIPRGCGLFD

SEQ ID NO: 2247 - protein, 980 aa, Phalera bucephala
MFLTVCIYISNFLVLALSLLLFLFLSHSVRMLTTASQPELLPCRQCSDGRLFKGTRGLKIHTARCHIRSITSSLPAGQGVPPIPTSSATSFTSATQPTFPFEILISRLYRSTPIVKRIPRGARVSLARSLSFTIEKCFDNSEKSWRDLFTFAFSHLHADKSFNTTLTHQLKQHCFTHSDPVLPPLVNCPRIYNFKHKIESKVQEGDLRNAARLLFSNDTLAPNNDLTLDSLREKHPSANSVSQLPNPPQINIKKLQINEKDVLEAIMSFPSGSSGGIDGITPQHLKDLVSASAGDAGGALLSSLTKLCNFMLAGHVNRSFLPYLYGARLCAFNKKDGGIRPIAIGATIRRLTSKIVCRHIASTLKSKFQPIQLGFGSKGGCEAAVHATRTFVLSNEMEVLLKVDVRNAFNSLDRAALLNEVASQLPEIYPYIWQCYSDSSKLIFGENSIDSAVGVQQGDPLGPALFSLGIHRHISFLKSKLNVWYLDDGTLGGKANTVFSDFIKINSTFKNLGLELNLSKCEFFVSESLPLNEKQFITEKFQKFAPGVKILSRNSLCLLGAPLFDDGVKPFLESKIKQFQDNSFRLGVLNRHIAYTILKYCLFVPKLTYATRATPIWKFSALIDQMDTALKDNLEKILNLSLNEASWTQATLPIRHGGIGVRKIASIALPAFLASVYSVQELCSKILSNTELVAGAAEALEAWKRICPNDNIPKEVNVQKLWDMPLVQIAKDYLAEIIVSDRDRARLLALGQKESGHWLHSIPASNLGTLLDSESFRIAIGIRLGAPICEEHRCPCGAEVDRSGLHGLSCRKSAGRFSRHGSLNDIIKRTLATINVPSVLEPAGIFRDDGKRPDGMSLIPWERGRALVWDATCVDTLAPSHLRESISRAGAAAEKADLGKRRKYAAISNNYIFVPFAVETLGPWSSASKQFINKITPTLITSSGDKRAGSFLAQKIGLSIQRGNAASILATIPRGCGLFD

SEQ ID NO: 2248 - protein, 1024 aa, Phalera bucephala
MRHGNGASRRRSVPRCMPILPEVSPKSCQLLNLSRIFLIFCVFCMFLTVCIYISNFLVLALSLLLFLFLSHSVRMLTTASQPELLPCRQCSDGRLFKGTRGLKIHTARCHIRSITSSLPAGQGVPPIPTSSATSFTSATQPTFPFEILISRLYRSTPIVKRIPRGARVSLARSLSFTIEKCFDNSEKSWRDLFTFAFSHLHADKSINTTLTHQLKQHCFTHSDPVLPPLVNCPRIYNFKHKIESKVQEGDLRNAARLLFSNDTLAPNNDLTLDSLREKHPSANSDSQLPNPPQINIKKLQINEKDVLEAIMSFPSGSSGGIDGITPQHLKDLVSASAGDAGGALLSSLTKLCNFMLAGHVNRSFLPYLYGARLCAFNKKDGGIRPIAIGATIRRLTSKIVCRHIASTLKSKFQPIQLGFGSKGGCEAAVHATRTFVLSNEMEVLLKVDVRNAFNSLDRAALLNEVASQFPEIYPYIWQCYSDSSKLIFGENSIDSAVGVQQGDPLGPALFSLGIHRHISSLKSKLNVWYLDDGTLGGKANTVFSDFIKINNTFKNLGLELNLSKCEFFVSESLPLNEKQFITEKFQKFAPGVKILSRNSLCLLGAPLFDDGVKPFLESKIKQFQDNSFRLGVLNRHIAYTILKYCLFVPKLTYATRASPIWKFSALIDQMDTALKDNLEKILNLSLNEASWTQATLPIRHGGIGVRKIASIALPAFLASVYSVQELCSKILSNTELVAGAAEALEAWKRICPNNNIPKEVNVQKLWDMPLVQIAKDYLAEIIVSDRDRARLLALGQKESGHWLHSIPASNLGTLLDSESFRIAIGIRLGAPICEEHRCPCGAEVDRSGLHGLSCRKSAGRFSRHGSLNDIIKRTLATINVPSVLEPAGIFRDDGKRPDGMSLIPWERGRALVWDATCVDTLAPSHLRESISRAGAAAEKADLGKRRKYAAISNNYIFVPFAVETLGPWSSASKQFINKITPTLITSSGDKRAGSFLAQKIGLSIQRGNAASILATIPRGCGLFD

SEQ ID NO: 2249 - protein, 980 aa, Phalera bucephala
MFLTVCIYISNFLVLALSLLLFLFLSHSVRMLTTASQPELLPCRQCSDGRLFKGTRGLKIHTARCHIRSITSSLPAGQGVPPIPTSSATSFTSATQPTFPFEILISRLYRSTPIVKRIPRGARVSLARSLSFTIEKCFDNSEKSWRDLFTFAFSHLHADKSINTTLTHQLKQHCFTHSDPVLPPLVNCPRIYNFKHKIESKVQEGDLRNAARLLFSNDILAPNNDLTLDSLREKHPSANSVSQLPNPPQINIKKLQINEKDVLEAIMSFPSGSSGGIDGITPQHLKDLVSASAGDAGGALLSSLTKLCNFMLAGHVNRSFLPYLYGARLCAFNKKDGGIRPIAIGATIRRLTSKIVCRHIASTLKSKFQPIQLGFGSKGGCEAAVHATRTFVLSNEMEVLLKVDVRNAFNSLDRAALLNEVASQLPEIYPYIWQCYSDSSKLIFGENSIDSAVGVQQRDPLGPALFSLGIHRHISFLKSKLNVWYLDDGTLGGKANTVFSDFIKINSTFKNLGLELNLSKCEFFVSESLPLNEKQFITEKFQKFAPGVKILSRNSLCLLGAPLFDDGVKPFLESKIKQFQDNSFRLGVLNRHIAYTILKYCLFVPKLTYATRASPIWKFSALIDQMDTALKDNLEKILNLSLNEASWTQATLPIRHGGIGVRKIASIALPAFLASVYSVQELCSKILSNTELVAGAAEALEAWKRICPNDNIPKEVNVQKLWDMPLVQIAKDYLAEIIVSDRDRARLLALGQKESGHWLHSIPASNLGTLLDSESFRIAIGIRLGAPICEEHRCPCGAEVDRSGLHGLSCRKSAGRFSRHGSLNDIIKRTLATINVPSVLEPAGIFRDDGKRPDGMSLIPWERGRALVWDATCVDTLAPSHLRESISRAGAAAEKADLGKQRKYAAISNNYIFMPFAVETLGPWSSASKQFINKITPTLITSSGDKRAGSFLAQKIGLSIQRGNAASILATIPRGCGLFD

SEQ ID NO: 2250 - protein, 980 aa, Phalera bucephala
MFLTVCIYISNFLVLALSLLLFLFLSHSVRMLTTASQPELLPCRQCSDGRLFKGTRGLKIHTARCHIRSITSSLPAGQGVPPIPTSSATSFTSATQPTFPFEILISRLYRSTPIVKRIPRGARVSLARSLSSTIEKCFDNSEKSWRDLFTFAFSHLHADKSINTTITHQLKQHCFTHSDPVLPPLVNCPRIYNFKHKIVSKVQEGDLRNAARLLFSNDTLAPNNDLTLDSLREKHPSANSVSQLPNPPQISIKKLQINEKDVLEAIMSFPSGSSGGIDGITPQHLKDLVSASAGDAGGALLTSLTKLCNFMLAGHVNRSFLPYLYGARLCAFNKKDSGIRPIAIGATIRRLTSKIVCRHIASTLKSKFQPIQLGFGSKGGCEAAVHATRTFVLSNEMEVLLKVDVRNAFNSLDRAALLNEVASQLPEIYPYIWQCYSDSSKLIFGENSIDSAVGVQQGDPLGPALFSLGIHRHISSLKSKLNVWYLDDGTLGGKANTVFSDFIKINSTFKNLGLELNLSKCEFFVSESLPLNEKQFITEKFQKFAPGVKILSRNSLCLLGAPLFDDGVKPFLESKIKQFQDNSFRLGVLNRHIAYTILKYCLFVPKLTYATRASPIWKFSALIDQMDTALKDNLEKILNLSLNEASWTQATLPIGHGGIGVRKIASIALPAFLASVYSVQELCSKILSNTELVAGAAEALEAWKRICPNDNIPKEVNVQKLWDMPLVQIAKDYLAEIIVSDRDRARLLALGQKESGHWLHSIPASNLGTLLDSESFRIAIGIRLGAPICEKHRCPCGAEVDRSGLHGLSCRKSAGRFSRHGSLNDIIKRTLATINVPSVLEPAGIFRDDGKRPDGMSLIPWERGRALVWDATCVDTLAPSHLRESISRAGAAAEKADLGKRRKYAAICNNYIFVPFAVETLGPWSSASKQFINKITPTLITSSGDKRAGSFLAQKIGLSIQRGNAASILATIPRGCGLFD

SEQ ID NO: 2251 - protein, 1024 aa, Phalera bucephala
MRHGNGASRRRSVPRCMPILPEVSPKSCQLLNLSRIFLIFCVFCMFLTVCIYISNFLALALSLLLFLFLSHSVRMLTTASQPELLPCRQCSDGRLFKGTRGLKIHTARCHIRSITSSLPAGQGVPPIPTSSATSFTSATQPTFPFEILISRLYRSTPIVKRIPRGARVSLARSLSFTIEKCFDNSEKSWRDLFTFAFSHLHADKSINTTLTHQLKQHCFTHSDPVLPPSVNCPRIYNFKHKIESKVQEGDLRNAARLLFSNDTLAPNNDLTLDSLREKHPSANSVSQLPNPPQINIKKLQINEKDVLEAIMSFPSGSSGGIDGITPQHLKDLVSASAGDAGGALISSLTKLCNFMLAGHVNRSFLPYLYGARLCAFNKKDGGIRPIAIGATIRRLTSKIVCRHIASTLKSKFQPIQLGFGSKGGCEAAVHATRTFVLSNEMEVLLKVDVRNAFNSLDRAALLNEVASQLPEIYPYIWQCYSDSSKLIFGENSIDSAVGVQQGDPLGPALFSLGIHRHISSLKSKLNVWYLDDGTLGGKANTVFSDFIKINNTFKNLGLELNLSKCEFFVSESLPLNEKQFITEKFQKFAPGVKILSRNSLCLLGAPLFDDGVKPFLESKIKQFQDNSFRLGVLNRHIAYTILKYCLFVPKLTYATRASPIWKFSALIDQMDTALKDNLEKILNLSLNEASWTQATLPIRHGGIGVRKIASIALPAFLASVYSVQELCSKILSNTELVAGAAEALEAWKRICPNDNIPKEVNVQKLWDMPLVQIAKDYLAEIIVSDRDRARLLALGQKESGHWLHSIPASNLGTLLDSESFRIAIGIRLGAPICEEHRCPCGAEVDRSGLHGLSCRKSAGRFSRHGSLNDIIKRTLATINVPSVLEPAGIFRDDGKRPDGMSLIPWERGRALVWDATCVDTLAPSHLRESISRAGAAAEKADLGKRRKYAAISNNYIFVPFAVETLGPWSSASKQFINKITPTLITSSGDKRAGSFLAQKIGLSIQRGNAASILATIPRGCGLFD

SEQ ID NO: 2252 - protein, 1024 aa, Phalera bucephala
MRHGNGASRRRSVPRCMPILPEVSPKSCQLLNLSRFFLIFCVFCMFLTVCIYISNFLALALSLLLFLFLSHSVRMLTTASQPELLPCRQCSDGRLFKGTRGLKIHTARCHIRSITSSLPAGQGVPPIPTSSATSFTSATQPTFPFEILISRLYRSTPIVKRIPRGARVSLARSLSFTIEKCFDNSEKSWRDLFTFAFSHLHADKSINTTLTHQLKQHCFTHSDPVLPPSVNCPRIYNFKHKIESKVQEGDLRNAARLLFSNDTLAPNNDLTLDSLREKHPSANSVSQLPNPPQINIKKLQINEKDVLEAIMSFPSGSSGGIDGITPQHLKDLVSASAGDAGGALISSLTKLCNFMLAGHVNRSFLPYLYGARLCAFNKKDGGIRPIAIGATIRRLTFKIVCRHIASTLKSKFQPIQLGFGSKGGCEAAVHATRTFVLSNEMEVLLKVDVRNAFNSLDRAALLNEVASQLPEIYPYIWQCYSDSSKLIFGENSIDSAVGVQQGDPLGPALFSLGIHRHISSLKSKLNVWYLDDGTLGGKANTVFSDFIKINNTFKNLGLELNLSKCEFFVSESLPLNEKQFITEKFQKFAPGVKILSRNSLCLLGAPLFDDGVKPFLESKIKQFQDNSFRLGVLNRHIAYTILKYCLFVPKLTYATRASPIWKFSALIDQMDTALKDNLEKILNLSLNEASWTQATLPIRHGGIGVRKIASIALPAFLASVYSVQELCSKILSNTELVAGAAEALEAWKRICPNDNIPKEVNVQKLWDMPLVQIAKDYLAEIIVSDRDRARLLALGQKESGHWLHSIPASNLGTLLDSESFRIAIGIRLGAPICEEHRCPCGAEVDRSGLHGLSCRKSAGRFSRHGSLNDIIKRTLATINVPSVLEPAGIFRDDGKRPDGMSLIPWERGRALVWDATCVDTLAPSHLRESISRAGAAAEKADLGKRRKYAAISNNYIFVPFAVETLGPWSSASKQFINKITPTLITSSGDKRAGSFLAQKIGLSIQRGNAASILATIPRGCGLFD

SEQ ID NO: 2253 - protein, 997 aa, Phalera bucephala
MDGYMSLLDCATVAQVHIGFGWDLDRTICSVKNRGNASNSETSYYVRMLTTASQPELLPCRQCSDGRLFKGTRGLKIHTARCHIRSITSSLPAGQGVPPIPTSSATSFTSATQPTFPFEILISRLYRSTPIVKRIPRGARVSLARSLSFTIEKCFDNSEKSWRDLFTFAFSHLHADKSINTTLTHQLKQHCFTHSDPVLPPLVNCPRIYNFKHKIESKVQEGDLRNAARLLFSNDTLAPNNYLTLDSLREKHPSANSVSQLPNPPQINIKKLQINEKDVLEAIMSFPSGSSGGIDGITPQHLKDLVSASAGDAGGALLSSLTKLCNFMLAGHVNRSFLPYLYGARLCAFNKKDGGIRPIAIGATIRRLTSKIVCRHIASTLKSKFQPIQLGFGSKGGCEAAVHATRTFVLSNEMEVLLKVDVRNAFNSLDRAALLNEVASQLPEIYPYIWQCYSDSSKLIFGENSIDSAVGVQQGDPLGPALFSLGIHRHISSLKSKLNVWYLDDGTLGGKANTVFSDFIKINNTFKNLGLELNLSKCEFFVSESLPLNEKQFITEKFQKFAPGVKILSRNSLCLLGAPLFDDGVKPFLESKIKQFQDNSFRLGVLNRHIVYTILKYCLFVPKLTYATRASPIWKFSALIDQMDTALKDNLEKILNLSLNEASWTQATLPIRHGGIGVRKIASIALPAFLASVYSVQELCSKILSNTELVAGAAEALEAWKRICPNDNIPKEVNVQKLWDMPLVQIAKDYLAEIIVSDRDRARLLALGQKESGHWLHSIPASNLGTLLDSESFRIAIGIRLGAPICEEHRCPCGAEVDRSGLHGLSCRKSAGRFSRHGSLNDIIKRTLATINVPSVLEPAGIFRDDGKRPDGMSLIPWERGRALVWDATCVDTLAPSHLRESISRAGAAAEKADLGKRRKYAAISNNYIFVPFAVETLGPWSSASKQFINKITPTLITSSGDKRAGSFLAQKIGLSIQRGNAASILATIPRGCGLFD

SEQ ID NO: 2254 - protein, 950 aa, Phalera bucephala
MLTTASQPELLPCRQCSDGRLFKGTRGLKIHTARCHIRSITSSLPAGQGVPPIPTSSATSFTSATQPTFPFEILISRLYRSTPIVKRIPRGARVSLARSLSFTIEKCFDNSEKSWRDLFTFAFSHLHADKSINTTLTHQLKQHCFTHSDPVLPPLVNCPRIYNFKHKIESKVQEGDLRNAARLLFSNDTLAPNNDLTLDSLREKHPSANSVSQLPNPPQINIKKLQINEKDVLEAIMSFPSGSSGGIDGITPQHLKDLVSASAGDAGGALLSSLTKLCNFMLAGHVNRSFLPYLYGARLCAFNKKDGGIRPIAIGATIRRLTSKIVCRHIASTLKSKFQPIQLGFGSKGGCEAAVHATRTFVLSNEMEVLLKVDVRNAFNSLDRAALLNEVASQLPEIYPYIWQCYSDSSKLIFGENSIDSAVGVQQGDPLGPALFSLGIHRHISSLKSKLNVWYLDDGTLGGKANTVFSDFIKINNTFKNLGLELNLSKCDFFVSESLPLNEKQFITEKFQKFAAGVKILSRNSLCLLGAPLFDDGVKPFLESKIKQFQDNSFRLGVLNRHIAYTILKYCLFVPKLTYATRASPIWKFSALIDQMDTALKDNFEKILNLSLNEASWTQATLPIRHGGIGVRKIASIALPAFLASVYSVQELCSKILSNTELVAGAAEALEAWKRICPNDNIPKEVNVQKLWDMPLVQIAKDYLAEIIVSDRDRARLLALGQKESGHWLHSIPASILGTLLDSESFRIAIGIRLGAPICEEHRCPCGAEVDRSGLHGLSCRKSAGRFSRHGSLNDIIKRTLATINVPSVLEPAGIFRDDGKRPDGMSLIPWERGRALVWDATCVDTLAPSHLRESISRAGAAAEKADLGKRRKYAAISNNYIFVPFAVETLGPWSSASKQFINKITPTLITSSGDKRAGSFLAQKIGLSIQRGNAASILATIPRGCGLFD

SEQ ID NO: 2255 - protein, 1024 aa, Phalera bucephala
MRHGNGASRRRSVPGCMPILPEVSPKSCQLLNLSRIFLIFCVFCMFLTVCIYISNFLVLALSLLLFLFLSHSVRMLTIASQPELLPCRQCSDGRLFKGTRGLKIHTARCHIRSITSSLPAGQGVPPIPTSSATSFTSATQPTFPFEILISRLYRSTPIVKRIPRGARVSLARSLSFTIEKCFDNSEKSWRDLFTFAFSHLHADKSINTTLTHQLKQHCFTHSDPVLPPLVNCPRIYNFKHKIESKVQEGDLRNAARLLFSNDTLAPNNDLTLDSLREKHPSANSVSQLPNPPQISIKKLQINEKDVLEAIMSFPSGSSGGIDGITPQHLKDLVSASARDAGGALLSSLTKLCNFMLAGHVNRSFLPYLYGARLCAFNKKDGGIRPIAIGAPIRRLTSKIVCRHIASTLKSKFQPIQLGFGSKGGCEAAVHATRTFVLSNEMEVLLKVDVRNAFNSLDRAALLNEVASQLPEIYPYIWQCYSDSSKLIFGENSIDSAVGVQQGDPLGPALFSLGIHRHISSLKSKLNVWYLDDGTLGGKANTAFSDFIKINSTFKNLGLELNLSKCEFFVSESLPLNEKQFITEKFQKFAPGVKILSRNSLCLLGAPLFDDGVKPFLESKIKQFQDNSFRLGVLNRHIAYTILKYCLFVPKLTYATRASPIWKFSALIDQMDTALKDNLEKILNLSLNEASWTQATLPIRHGGIGVRKIASIALPAFLASVYSVQELCSKILSNTELVAGAAEALEAWKRICPNDNIPKEVNVQKLWDMPLVQIAKDYLAEIIVSDRDRARLLALGQKESGHWLHSIPASNLGTLLDSESFRIAIGIRLGAPICEEHRCPCGAEVDRSGLHGLSCRKSAGRFSRHGSLNDIIKRTLATINVPSVLEPAGIFRDDGKRPDGMSLIPWERGRALVWDATCVDTLAPSHLRESISRAGVAAEKADLGKRRKYAAISNNYIFVPFAVETLGPWSSASKQFINKITPTLITSSGDKRAGSFLAQKIGLSIQRGNAASILATIPRGCGLFD

SEQ ID NO: 2256 - protein, 980 aa, Phalera bucephala
MFLTVCIYISNFLVLALSLLLFLFLSHSVRMLTTASQPELLPCRQCSDGRLFKGTRGLKIHTARCHIRSITSSLPAGQGVPPIPTSSATSFTSATQPTFPFEILISRLYRSTPIVKRIPRGARVSLARSLSFTIEKCFDNSEKSWRDLFTFAFSHLHADKSINTTLTHQLKQHCFTHSDPVLPPLVNCPRIYNFKHKIESKVQEGDLRNAARLLFSNDTLAPNNDLTLDSLREKHPSANSVSQQPNPPQISIKKLQINEKDVLEAIMSFPSGSSGGIDGITPQHLKDLVSASAGDAGGALLSSLTKLCNFMLAGHVNRSFLPYLYGARLCAFNKKDGGIRPIAIGATIRRLTSKIVCRHIASTLKSKFQPIQLGFGSKGGCEAAVHATRTFVLSNEMEVLLKVDVRNAFNSLDRAALLNEVASQLPEIYPYIWQCYSDSSKLIFGENSIDSAVGVQQGDPLGPALFSLGIHRHISSLKSKLNVWYLDDGTLGGKANTVFSDFIQINSTFKNLGLELNLSKCEFFVSESLPLNEKQFITEKFQKFAPGVKILSRNSLCLLGAPLFDDGVKPFLESKIKQFQDNSFRLGVLNRHIAYTILKYCLFVPKLTYATRASPIWKFSALIDQMDTALKDNLEKILNLSLNEASWTQATLPIRHGGIGVRKIASIALPAFLASVYSVQELCSKILSNTELVAGAAEALEAWKRICPNDNIPKEVNVQKLWDMPLVQIAKDYLAEIIVSDRDRARLLALGQKESGHWLHSIPASNLGTLLDSESFRIAIGIRLGAPICEEHRCPCGAEVDRSGLHGLSCRKSAGRFSRHGSLNDIIKRTLATINVPSVLEPAGIFRDDGKRPDGMSLIPWERGRALVWDATCVDTLAPSHLRESISRAGAAAEKADLGKRRKYAAISNNYIFVPFAVETLGPWSSASKQFINKITPTLITSSGDKRAGSFLAQKIGLSIQRGNAASILATIPRGCGLFD

SEQ ID NO: 2257 - protein, 980 aa, Phalera bucephala
MFLTVCIYISNFLVLALSLLLFLFLSHSVRMLTTASQPELLPCRQCSDGRLFKGTRGLKIHTARCHIRSITSSLPAGQGVPPIPTSSATSFTSATQPTFPFEILISRLYRSTPIVKRIPRGARVSLARSLSFTIEKCFDNSKKSWRDLFTFAFSHLHADKSINTTLTHQLKQHCFTHSDPVLPPLVNCPRIYNFKHKIESKVQEGDLRNAARLLFSNDTLAPNNDLTLDSLREKHPSANSVSQLPNPPQINIKKLQINEKDVLEAIMSFPSGSSGGIDGITPQHLKDLVSASAGDAGGALISSLTKLCNFMLAGHVNRSFLPYLYGARLCAFNKKDGGIRPIAIGAPIRRLTSKIVCRHIASTLKSKFQPIQLGFGSKGGCEAAVHATRTFVLSNEMEVLLKVDVRNAFNSLDRAALLNEVASQLPEIYPYIWQCYSDSSKLIFGENSIDSAVGVQQGDPLGPALFSLGIHRHISFLKSKLNVWYLDDGTLGGKANTVFSDFIKINSTFKNLGLELNLSKCEFFVSESLPLNEKQFITEKFQKFAPGVKILSRNSLCLLGAPLFDDGVKPFLESKIKQFQDNSFRLGVLNRHIAYTILKYCLFVPKLTYATRASPIWKFSALIDQMDTALKDNLEKILNLSLNEASWTQATLPIRHGGIGVRKIASIALPAFLASVYSVQELCSKILSNTELVAGAAEALEAWKRICPNDNIPKEVNVQKLWDMPLVQIAKDYLAEIIVSDRDRARLLALGQKESGHWLHSIPASNLGTLLDSESFRIAIGIRLGAPICEEHRCPCGAEVDRSGLHGLSCGKSAGRFSRHGSLNDIIKRTLATINVPSVLEPAGIFRDDGKRPDGMSLIPWERGRALVWDATCVDTLAPSHLRESISRAGAAAEKADLGKRRKYAAISNNYIFVPFAVETLGPWSSASKQFINKITPTLITSSGDKRAGSFLAQKIGLSIQRGNAASILATIPRGCGLFD

SEQ ID NO: 2258 - protein, 1024 aa, Phalera bucephala
MRHGNGASRRRSVPRCMPILPEVSPKSCQLLNLSRIFLIFCVFCMFLTVCIYISNFLVLALSLLLFLFLSHSVRMLTTASQPELLPCRQCSDGRLFKGTRGLKIHTARCHIRSITSSLPAGQGVPPIPTSSATSFTSATQPTFPFEILISRLYRSTPIVKRIPRGARVSLARSLSFTIEKCFDNSEKSWRDLFTFAFSHLHADKSINTTLTHQLKQHCFTHSDPVLPPLVNCPRIYNFKHKIESKVQEGDLRNAARLLFSNDTLAPNNDLTLDSLREKHPSANSVSQLPNPPQINIKKLQINEKDVLEAIMSFPSGSSGGIDGITPQHLKDLVSASAGDAGGALLSSLTKLCNFMLAGHVNRSFLPYLYGARLCAFNKKDGGIRPIAIGATIRRLTSKIVCRHIASTLKSKFQPIQLGFGSKGGCEAAVHATRTFVLSNEMEVLLKVDVRNAFNSLDRAALLNEVASQLPEIYPYIWQCYSDSSKLIFGENSIDSAVGVQQGDPLGPALFSLGIHRHISSLKSKLNVWYLDDGTLGGKANTVFSDFIKINNTFKNLGLELNLSKCEFFVSESLPLNEKQFITEKFQKFAPGVKILSRNSLCLLGAPLFDDGVKPFLESKIKQFQDNSFRLGVLNRHIAYIILKYCLFVPKLTYATRASPIWKFSALIDQMDTALKDNLEKILNLSLNEASWTQATLPIRHGGIGVRKIASIALPAFLASVYSVQELCSKILSNTELVAGAAEALEAWKRICPNDNIPKEVNVQKLWDMPLVQIAKNYLAEIIVSDRDRARLLALGQKESGHWLHSIPASNLGTLLDSESFRIAIGIRLGAPICEEHRCPCGAEVDRSGLHGLSCRKSAGRFSRHGSLNDIIKRTLATINVPSVLEPAGIFRDDGKRPDGMSLIPWERGRALVWDATCVDTLAPSHLRESISRAGAAAKKADLGKRRKYAAISNNYIFVPFAVETLGPWSSASKQFINKITPTLITSSGDKRAGSFLAQKIGLSIQRGNAASILATIPRGCGLFD

SEQ ID NO: 2259 - protein, 950 aa, Phalera bucephala
MLTTASQPELLPCRQCSDGRLFKGTRGLKIHTARCHIRSITSSLPAGQGVPPIPTSSATSFTSATQPTFPFEILISRLYRSTPIVKRIPRGARVSLARSLSFTIEKCFDNSEKSWRDLFTFAFSHLHADKSINTTLTHQLKQHCFTHSDPVLPPLVNCPRIYNFKHKIESKVQEGDIRNAARLLFSNDTLAPNNDLTLDSLREKHPSANSVSQLPNPPQINIKKLQINEKDVLEAIMSFPSGSSGGIDGITPQHLKDLVSASAGDAGGALLSSLTKLCNFMLAGHVNRSFLPYLYAARLCAFNKKDGGIRPIAIGATIRRLTSKIVCRHIASTLKSKFQPIQLGFGSKGGCEAAVHATRTFVLSNEMEVLLKVDVRNAFNSLDRAALLNEVASQLPEIYPYIWQCYSDSSKLIFGENSIDSAVGVQQGDPLGPALFSLGIHRHISSLKSKLNVWYLDDGTLGGKANTVFSDFIKINNTFKNLGLELNLSKCEFFVSESLPLNEKQFITEKFQKFAPGVKILSRNSLCLLGAPLFDDGVKPFLESKIKQFQDNSFRLGVLNRHIAYTILKYCLFVPKLTYATRASPIWKFSALIDQMDTALKDNLEKILNLSLNEASWTQATLPIRHGGIGVRKIASIALPAFLASVYSVQELCSKILSNTELVAGAAEALEAWKRICPNDNIPKEVNVQKLWDMPLVQIAKDYLAEIIVSDRDRARLLALGQKESGHWLHSIPASNLGTLLDSESFRIAIGIRLGAPICEEHRCPCGVEVDRSGLHGLSCRKSAGRFSRHGSLNDIIKRTLATINVPSVLEPAGIFRDDGKRPDGMSLIPWERGRALVWDATCVDTLAPSHLRESISRAGAAAEKADLGKRRKYAAISNNYIFVPFAVETLGPWSSASKQFINKITPTLITSSGDKRAGSFLAQKIGLSIQRGNAASILATIPRGCGLFD

SEQ ID NO: 2260 - protein, 980 aa, Phalera bucephala
MFLTVCIYISNFLVLALSLLLFLFLSHSVRMLTTASQPELLPCRQCSDGRFFKGTRGLKIHTARCHIRSITSSLPAGQGVPPIPTSSATSFTSATQPTFPFEILISRLYRSTPIVKRIPRGARVSLARSLSFTIEKCFDNSEKSWRDLFTFAFSHLHADKSINTTLTHQLKQHCFTHSDPVLPPLVNCPRIYNFKHKIESKVQEGDLRNAARLLFSNDTLAPNNDLTLDSLREKHPSANSVSQLPNPPQINIKKLQINEKDVLEAIMSFPSGSSGGIDGITPQHLKDLVSASAGDAGGALLSSLTKLCNFMLAGHVNRSFLPYLYGARLCAFNKKDGGIRPIAIGATIRRLTSKIVCRHIASTLKSKFQPIQLGFGSKGGCEAAVHATRTFVLSNEMEVLLKVDVRNAFNSLDRAALLNEVASQLSEIYPYIWQCYSDSSKLIFGENSIDSAVGVQQGDPLGPALFSLGIHRHISFLKSKLNVWYLDDGTLGGKANTVFSDFIKINSTFKNLGLELNLSKCEFFVSESLPLNEKQFITEKFQKFAPGVKILSRNSLCLLGAPLFDDGVKPFLESKIKQFQDNSFRLGFLNRHIAYTILKYCLFVPKLTYATRATPIWKFSALIDQMDTALKDNLEKILNLSLNEASWTQATLPIRHGGIGVRKIASIALPAFLASVYSVQELCSKILSNTELVAGAAEALEAWKRICPNDNIPKEVNVQKLWDMPLVQIAKDYLAEIIVSDRDRARLLALGQKESGHWLHSIPASNLGTLLDSESFRIAIGIRLGAPICEEHRCPCGAEVDRSGLHGLSCRKSAGRFSRHGSLNDIIKRTLATINVPSVLEPAGIFRDDGKRPDGMSLIPWERGRALVWDATCVDTLAPSHLRESISRAGAAAEKADLGKRRKYAAISNNYIFVPFAVETLGPWSSASKQFINKITPTLITSSGDKRAGSFLAQKIGLSIQRGNAASILATIPRGCDLFD

SEQ ID NO: 2261 - protein, 1024 aa, Phalera bucephala
MRHGNGASRRRSVPRCMPILPEVSPKSCQLLNLSRIFLIFCVFCMFLTVCIYISNFLVLALSLLLFLFLSHSVRMLTTASQPELLPCRQCSDGRLFKGTRGLKIHTARCHIRSITSSLPAGQGVPPIPTSSATSFTSATQPTFPFEILISRLYRSTPIVKRIPRGARVSLARSLSFTIEKCFDNSVKSWRDLFTFAFSHLHADKSINTTLTHQLKQHCFTHSDPVLPPLVYCPRIYNFKHKIESKVQEGDLRNAARLLFSNDTLAPNNDLTLDSLREKHPSANSVSQLPNPPQINIKKLQINEKDVLEAIMSFPSGSSGGIDGITPQHLKDLVSASAGDAGGALLSSLTKLCNFMLAGHVNRSFLPYLYGARLCAFNKKDGGIRPIAIGATIRRLTSKIVCRHIASTLKSKFQPIQLGFGSKGGCEAAVHATRTFVLSNEMEVLLKVDVRNAFNSLDRAALLNEVASQLPEIYPYIWQCYSDSSKLIFGENSIDSAVGVQQGDPLGPALFSLGIHRHISSLKSKLNVWYLDDGTLGGKANTVFSDFIKINNTFKNLGLELNLSKCEFFVSESLPLNEKQFITEKFQKFAPGVKILSRNSLCLLGAPLFDDGVKPFLESKIKQFQDNSFRLGVLNRHIAYTILKYCLFVPKLTYATRASPIWKFSALIDQMDTALKDNLEKILNLSLNEASWTQATLPIRHGGIGVRKIASIALPAFLASVYSVQELCSKILSNTELVAGAAEALEAWKRICPNENIPKEVNVQKLWDMPLVQIAKDYLAEIIVSDRDRARLLALGQKESGHWLHSIPASNLGTLLDSESFRIAIGIRLGAPICEEHRCPCGAEVDRSGLHGLSCRKSAGRFSRHGSLNDIIKRTLATINVPSVLEPAGIFRDDGKRPDGMSLIPWERGRALVWDATCVDTLAPSHLRESISRAGAAAEKADLGKRRKYAAISNNYIFVPFAVETLGPWSSASKQFINKITPTLITSSGDKRAGSFLAQKIGLSIQRGNAASILATIPRGCGLFD

SEQ ID NO: 2262 - protein, 980 aa, Phalera bucephala
MYLTVCIYISNFLVLALSLLLFLFLSHSVRMLTTASQPELLPCRQCSDGRLFKGSRGLKIHTARCHIRSITSSLPAGQGVPPIPTSSATSFTSATQPTFPFEILISCLYRSTPIVKRIPRGARVSLARSLSFTIEKCFDNSEKSWRDLFTFAFSHLHADKSINTTLTHQLKQHCFTHSDPVLPPLVNCPRIYNFKHKIESKVQEGDLRNAARLLFSNDTLAPNNDLTLDSLREKHPSANSVSQLPNPPQINIKKLQINEKDVLEAIMSFPSGSSGGIDGITPQHLKDLVSASAGDAGGALLSSLTKLCNFMLAGHVNRSFLPYLYGARLCAFNKKDGGIRPIAIGATIRRLTSKIVCRHIASTLKSKFQPIQLGFGSKGGCEAAVHATRTFVLSNEMEVLLKVDVRNAFNSLDRAALLNEVASQLPEIYPYIWQCYSDSSKLIFGENSIDSAVGVQQGDPLGPALFSLGIHRHISSLKSKLNIWYLDDATLGGKANTVFSDFIKINNTFKNLGLELNLSKCEFFVSESLPLNEKQFITEKFQKFAPGVKILSRNSLCLLGAPLFDDGVKPFLESKIKQFQDNSFRLGVLNRHIAYTILKYCLFVPKLTYATRASPIWKFSALIDQMDTALKDNLEKILNLSLNEASWTQATLPIRHGGIGVRKIASIALPAFLASVYSVQELCSKILSNTELVAGAAEALEAWKRICPNDNIPKEVNVQKLWDMPLVQIAKDYLAEIIVSDRDRARLLALGQKESGHWLHSIPASNLGTLLDSESFRIAIGIRLGAPICEEHRCPCGAEVDRSGLHGLSCRKSAGRFSRHGSLNDIIKRTLATINVPSVLEPAGIFRDDGKRPDGMSLIPWERGRALVWDATCVDTLAPSHLRESISRAGAAAEKADLGKRRKYAAISNNYIFVPFAVETLGPWSSASKQFINKITPTLITSSGDKRAGSFLAQKIGLSIQRRNAASILATIPRGCGLFD

SEQ ID NO: 2263 - protein, 977 aa, Phalera bucephala
MFSSVCLYIICLFVLVLSLLVFVVRAQMLGSSSQPELLPCRQCGDGRRFKGARGLKIHIARSHNQSISSSLPTVHDVSPITSTSVFPINSTNSPTIPFEITISRLHRCIPIVKRIPRGARMSLAKSFSNIIEKCVHNSTESWQELFTFAFNHLHADRSLNTSLTHQLKQRCAAPSHSILLQPTGPPKNFNLTRKIEAKVQEGDLRNAARLLFSNDTLAPNNDRTLDTLRDKHPSANPVSKLPDPPHFNSHYMHIKEKDVLEAIMSFPNGSAGGIDGITPQHLKDLISVSAGDAGSALLSSLTKLCNFMLSGQVQHSFLPYLYGARLCAFNKKDGGIRPIAIGSTIRRLTSKIVCRHIASTLRSKFQPIQLGFGSKGGCEAAVHATRTFVLSSEMEVLLKVDVRNAFNSLDRAALLNEVASNLPEIYPYVWQCYSDSSKLLFGENSIDSAVGVQQGDPLGPALFSLGIHRHISSLNSKLNIWYLDDGTLGGKAVTVLNDLIKIKHEFKNLGLELNYSKCEVFFSDTLTQNQVHSISDNFNSITPGIKILCKDSLCLLGAPLLDEGAKPFLEDKIKNFQDNSFRLGGLNRHISYTILKHCLFVPKFMYTTRASPIWKFRTILEQMDTTLRHSLEKTLNLPLNEASWTQATLPIKHGGIGIRKMSCVALPAFLASVHSVQELCSKILSNTNLVAGASEALEDWKFICPNVDVPKEANVQKLWDMPLVQVTKKYLDEINISDRDRARLLALGQTESGHWLHAIPSVNLGTLLDDESFRVAVGIRLGAPICCEHICPCGVEVDRSGLHGLSCRKSAGRFSRHSSINDIIKRALATINVPAVLEPIGMFRDDGKRPDGMTLIPWNRGRALVWDATCVDTLAPSHLRESVSKAGAAAEKADLGKRHKYVSISRDYIFVPFAVETLGPWSNCAKSFLKSLTPRLIASTGDKRAGLFLAQKISLAVQRGNAASSLATIPRGQDLDL

SEQ ID NO: 2264 - protein, 950 aa, Phalera bucephala
MLTTASQPELLPCRQCSDGRLFKGTRGLKIHTARCHIRSITSSLPASQGVPPIPTSSATSFTSATHPTFPFEILISRLYRSTPIVKRIPRGARVSLARSLSFTIEMCFDNSEKSWRDLFTFAFSHLHADKSINTTLTHQLKQHCFTHSDPVLPPLVNCPRIYNFKHKIESKVQEGDLRNAARLLFSNDTLAPNNDLTLDSLREKHPSANSVSQLPNPPQISIKKLQINEKDVLEAIMSFPSGSSGGIDGITPQHLKDLVSASAGDAGGALLSSLTKLCNFMLAGHVNRSFLPYLYGARLCAFNKKDGGIRPIAIGATIRRLTSKIVCRHIASTLKSKFEPIQLGFGSKGGCEAAVHATRTFVLSNEMEVLLKVDVRNAFNSLDRAALLNEVASQLPEIYPYIWQCYSDSSKLIFGENSIDSAVGVQQGDPLGPALFSLGIHRHISSLKSKLNVWYLDDGTLGGKANTVFSDFIKINSTFKNLGLELNLSKCEFFVSESLPLNEKQFITEKFQKFAPGVKILSRNSLCLLGAPLFDDGVKPFLESKIKQFQDNSFRLGVLNRHIAYTILKYCLFVPKLTYATRASPIWKFSALIDQMDTALKDNLEKILNLSLNEASWTQATLPIRHGGIGVRKIASIALPAFLASVYSVQELCSKILSNTELVAGAAEALEAWKRICPNDNIPKEVNVQKLWDMPLVQIAKDYLAEIIVSDRDRARLLALGQKESGHWLHSIAASNLGTLLDSESFRIAIGIRLGAPICEEHRCPCGAEVDRSGLHGLSCRKSAGRFSRHGSLNDIIKRTLASINVPSVLEPAGIFRDDGKRPDGMSLIPWERGRALVWDATCVDTLAPSHLRESISRAGAAAEKADLGKRRKYAAISNNYIFVPFAVETLGPWSSASKQFINKITPTLITSSGDKRAGSFLAQKIGLSIQRGNAASILATIPRGCGLFD

SEQ ID NO: 2265 - protein, 1023 aa, Phalera bucephala
MRHGNGASRRRSVPRCMPILPEVSPKSCQLLNLSRIFLIFCVFCMFLTVCIYISNFLVLALSLLLFLFLSHSVRMLTTASQPELLPCRQCSDGRLFKGTRGLKIHTARCHIRSITSSLPAGQGVPPIPTSSATSFTSATQPTFPFEILISRLYRSTPIVKRIPRGARVSLARSLSFTIEKCFDNSEKSWRDLFTFAFSHLHADKSINTTLTHQLKQHCFTHSDPVLPPLVNCPRIYNFKHKIESKVQEGDLRNAARLLFSNDTLAPNNDLTLDSLREKHPSANSVSQLPNPPQINIKKLQINEKDVLEAIMSFPSGSSGGIDGITPQHLKDLVSASAGDAGGALLNSLTKLCNFMLAGHVNRSFLPYLYGARLCAFNKKDGGIRPIAIGATIRRLTSKIVCRHIASTLKSKFQPIQLGFGSKGGCEAAVHATRTFVLSNEMEVLLKVDVRNAFNSLDRAALLNEVASQLPEIYPYIWQCYSDSSKLIFGENSIDSAVGVQQGDPLGPALFSLGIHRHISSLKSKLNVWYLDDGTLGGKANSVFSDFIKINNTFKNLGLELNLSKCEFFVSESLPLNEKQFITEKFQKFAPGVKILSRNSLCLLGAPLFDDGVKPFLESKIKQFQDNSYRLGVLNRHIAYIILKYCLFVPKLTYATRASPIWKFSALIDQMDTALKDNLEKILNLSLNEASWTQATLPIRHGGIGVRKIASIALPAFLASVYSVQELCSKILSNTELVVGAAEALEAWKRICPNDNIPKEVNVQKLWDMPLVQIAKNYLAEIIVSDRDRARLLALGQKESGHWLHSIPASNLGTLLDSESFRIAIGIRLGAPICEEHRCPCGAEVDRSGLHGLSCRKSAGRFSRHGSHDIIKRTLATINVPSVLEPAGIFRDDGKRPDGMSLIPWERGRALVWDATCVDTLASSHLRESISRAGAAAEKADLGKRRKYAAISNNYIFVPFAVETLGPWSSASKQFINKITPTLITSSGDKRAGSFLAQKIGLSIQRGNAASILATIPRGCGLFD

SEQ ID NO: 2266 - protein, 980 aa, Phalera bucephala
MFLTVCIYISNFLVLALSLLLFLFLSHSVRMLTTASQPELLPCRQCSDGRLFKGTRGLKIHTARCHIRSITSSLPAGQGVPPIPTSSATSFTSATQPTFPFEILISRLYRSTPIVKRIPRGARVSLARSLSFTIEKCFDNSEKSWRDLFTFAFSHLHADKSINTTLTHQLKQHCFTHSDPVLPPLVNCPRIYNFKHKIESKVQEGDLRNAARLLFSNDTLAPNNDLTLDSLREKHPSANSVSQLPNPPQISIKKLQINEKDVLEAIMSFPSGSSGGIDGITPQHLKDLVSASAGDAGGALLSSLTKLCNFMLAGHVNRSFLPYLYGARLCAFNKKDGGIRPIAIGATIRRLTSKIVCRHIASTLKSKFQPIQLGFGSKGGCEAAVHATRTFVLSNEMEVLLKVDVRNAFNSLDRAALLNEVASQLPEFYPYIWQCYSDSSKLIFGENSIDSAVGVQQGDPLGPALFSLGIHRHISSLKSKLNVWYLDDGTLGGKANTVFSDFIKINSTFKNLGLELNLSKCEFFVSESLSLNEKQFITEKFQKFAPGVKILSRNSLCLLGAPLFDDGVKPFLESKIKQFQDNSFRLGVLNRHIAYTILKYCLFVPKLTYATRASPIWKFSALIDQMDTALKDNLEKILNLSLNEASWTQATLPIRHGGIGVRKIASIALPAFLASVYSVQELCSKILSNTELVAGAAEALEAWKRICPNDNIPKEVNVQKLWDMPLVQIAKDYLAEIIVSDRDRARLLALGQKESGHWLHSIPASNLGTLLDSESFRIAIGIRLGAPICEEHRCPCGAEVDRSGLHGLSCRKSAGRFSRHGSLNDIIKRTLATINVPSVLEPAGIFRDDGKRPDGMSLIPWERGRALVWDATCVDTLAPSHLRESISRAGAAAEKADLGKRRKYAAISNNYIFVPFAVETLGPWSSASKQFINKITPTLITSSGDKRAGSFLAQKIGLSIQRGNAASILATIPRGCGLFD

SEQ ID NO: 2267 - protein, 1024 aa, Phalera bucephala
MRHGNGASRRRSAPRCMPILPEVSPKSCQLLNLSRIFLIFCVFCMFLTVYIYISNFLVLALSLLLFLFLSLSVRMLTTASQPELLPCRQCSDGRLFKGTRGLKIHTARCHIRSITSSLPASQGVPPIPTSSATSFTSATHPTFPFEILISRLYRSTPIVKRIPRGARVSLARSLSFTIEMCFDNSEKSWRDLFTFAFSHLHADKSINTTLTHQLKQHCFTHSDPVLPPLVNCPRIYNFKHKIESKVQEGDLRNAARLLFSNDTLAPNNDLTLDSLREKHPSANSVSQLPNPPQISIKKLQINEKDVLEAIMSFPSGSSGGIDGITPQHLKDLVSASAGYAGGALLSSLTKLCNFMLAGHVNRSFLPYLYGARLCAFNKKDGGIRPIAIGATIRRLTSKIVCRHIASTLKSKFQPIQLGFGSKGGCEAAVHATRTFVLSNEMEVLLKVDVRNAFNSLDRAALLNEVASQLPEIYPYIWQCYSDSSKLIFCENSIDSAVGVQQGDPLGPALFSLGIHRHISTLKSKLNVWYLDDGTLGGKSNTVFSDFIKINSTFKNLGLDLNLSKCEFFVSESLPLNEKQFITEKFQKFAPGVKILSRNSLCLLGAPLFDDGVKPFLESKIKQFQDNSFRLGVLNRHIAYTILKYCLFVPKLTYATRASPIWKFSALIDQMDTALKDNLQKILNLSLNEASWTQATLPIRHGGIGVRKIASIALPAFLASVYSVQELCSKILSNTELVAGAAEALEAWKRICPNDNIPKEVNVQKLWDMPLVQIAKDYLAEIIVSDRDRARLLALGQKESGHWLHSIPASNLGTLLDSESFRIAIGIRLGAPNCEEHRCPCGAEVDRSGLHGLSCRKSAGRFSRHGSLNDIIKRTLASINVPSVLEPAGIFRDDGKRPDGMSLIPWERGRALVWDATCVDTLAPSHLRESISRAGAAAEKADLGKRRKYAAISNNYIFVPFAVETLGPWSSASKQFINKITPTLITSSGDKRAGSFLAQKIGLSIQRGNAASILATIPRGCGLFD

SEQ ID NO: 2268 - protein, 973 aa, Pheosia tremula
MCIYYSILSYLISLASFFVHIILCSSFYIVLYCVYMYAGTSQPELIKCPQCSDGRLFKGRRGLNIHISRCHTQQISLSLPETLVDASHPQFETLIYRLNHSIPLVKRIPRGARILLARSLANCINSCLNNSEKSWQDLFTFAYLHFHADKSSHSSLTQKLKQNCNSNFNSDIHLPTRISKNRIFNLARTIESKVQEGDIRNAARLLFSNDTLAPSNEITLEALRSKHPSPNPASQLPSPPNLNVQLQIKQEDVLAAILSFPSGSAGGIDGITPQHLKDLVSASAGDAGGALLSSLTKLCNFMLSGKVNDSFIPFLYGARLCAFNKKDGGIRPIAVGCTIRRLTSKLACKHIISTLSSKFQPLQLGFGCKGGCEAAVHATRTFISSGQMEVLLKVDVKNAFNSIDRGALLSEVASQIPEIYPYVRQCYSSSSKLLYGEYSIDSAVGVQQGDPLGPALFSLGIHRFISSLNSRLNVWYLDDGTLGGKADTVLNDLIQINRDFKTIGLELNPSKCEIFISDILSSDQVNSIVKNFNEITPNIRTLQKNSLYLLGAPLLDEGVKPFLDNKLKTFSDNSHRLGILNSHVAFTIIKYCLFVPKLTYSLRASPIWKFSTVLEQMDVTIKDTLEQILNLTLNDLSWMQATLPIRNGGIGVRKISSVALPAFLASVHSSRELCCKILNDDTLIVSNTAEAIETWKSICPNINVPKEVNLQILWDMPLVQMTQQFLFENLISDRDHARLLALCEKESGHWLHTIPSPNLGTFLDNESFRIAIGIRLGAPVCMAHKCPCGVEVDRFGLHGLSCPKSAGRFSRHGSLNDIIKRALASINVPSILEPLGVFRDDGKRPDGMTLIPWERGRPLVWDATCVDTLAPSHLRESVSAAGAAAERADLGKRRKYALLNNSYAFLPFAVETLGPWSHSAKQFINKISPKLIASTGDRRAGSFLAQKISLIIQRGNAASILATIPRGQGLFDT

SEQ ID NO: 2269 - protein, 960 aa, Notodonta dromedarius
MIFLICVLVVIAIIFCVYMHAGASQQELLECPHCRNGRLFKGRRGLNIHISRCHLKPLSLSHPQTPQISVPDDHTQLPFETLVSRLYHSTPLVKRIPRGARIQLARSLANYVDNCLTNSEKSWQDLFTFAYKHFHAPKTRNSSLTQSLKQNCFNTLNFTSQPPGPISNFKTFNLARAIEAKVQDGDIRNAARLLFSNYTIAPANDITLKALRSKHPSPISVSQLPNPPTPTQNFQFKEEDVRAAIFSFPSGSAGGIDGITPQHFKDLVGVSAGDAGGALLSSLTKLCNFMLTGKVNQSFLPFLYGARLCAFNKKDGGIRPIAIGCTLRRLTSKLACKYIISDLSSKFKPLQLGFGCKGGCEAAVHATRTFIESGDMEVLLKVDVKNAFNSLDRAALLIEVASQAPEIYPYVWQCYNSPSKLLYGEFSIDSAVGVQQGDPLGPALFSLGIHRFISSLNSKLNVWYLDDGTLGGTADTVLRDLVQINRDFQTIGLELNPSKCEIFVSDTLPPDRLNFIMDSFNKITPNIKTLHKDTLCLLGAPLLDDGVRPFLDNKIKDFSENSDRLGILNSHTAYTIMKYCLFVPKLTYSLRASPIWKFSAQLEQMDATLKDTLEKILNLSLNHFSWTQATLPIKNGGIGVRKISSVALPAFLASVHSVSDLCSRILKVNTVLVSGAAEAIETWKRICPNDDIPKELNLQILWDGPLVQITQKILFENLISDRDHARLLALCEKESGHWLHAIPSSNLGTFLDNESFRVAVGIRLGAPVCTGHKCPCGVEVDQSGLHGLSCQRSGGRFSRHGSLNDIIKRALTTISVPSILEPSGVFRDDGKRPDGMTLVPWERGRPLVWDATCVDTLAPSHLRESASAVGAAAEKADLGKRRKYALLNSNYVFVPFAVETLGPWSHSAKVLFNKITPRLVTATGDKRAGSFLAQKISLAIQRGNAASILATIPRGRDFFD

SEQ ID NO: 2270 - protein, 993 aa, Furcula furcula
MCISTCFYTITLVLVLFYYFNYSLFFFLISLVVYNRIRMPTVASQPDLLPCHQCNDGRLFKGRKGLRIHTSRCHSHALTSSLPPVAPSLLFNSSTFSSSATASSKLPFHILISRLHRCTPLVKRIPRGARISLAYSLSNNIKNCFRNCENSWEDLFTFAYTHFHANKSQSISLTQQLKQNCNSLPHAQILAPSANFNPKRPKPHNIAQVIESKVQDGDIKNAARILFSNDTLAPPNDLTLEALRLKHPTRTSTSSLPPILASQFQTIIAKEEDVLAAITSFPSGSAAGIDGITPQHLKDLVSMSAGDGGRALLTNITKLCNLMFAGKVPDSFLPYIYGARLCAFNKKDGGIRPIAIGCTIRRLASKIICKHISSTLKSKFQPIQLGFGSKGGCEAAVHATRTFISSSDMEVLLKVDVRNAFNSLDRSVFLNEVATQLPEIYPYVSQCYHTTSKLLYDDHTIDSAVGVQQGDPLGPALFSLGIHSIVSSLNSKLNVWYLDDGTLGGDADTVISDLIKINNEFKLMGLELNNSKCEIFVTDSLFPPEIDSIVKRFHHISPDIKILKRDSLCLLGAPLLPESMEPFLEDKIQHFSENSHRLGIINSHIAFTIMKHCLLVPKFMYVLRASPIWKCLGLIERMDATLKDSLEKILNICLQDNSWTQATLPIRHGGIGVRKISSVALPAFLASVHSVRGLCCQILKQDDLRILCAHEALESWEMNCPNGEIPKELNVQKLWDLPLVQSAAESLIQNCTSDRDRARLLALSRNESGHWLQALPSSTIGTLLDLESFRVAVAIRLGAPVCCEHTCPCGVEVDSFGLHGLSCRRSAGRFSRHGSLNDIVKRALASIDVPSVLEPAGVLRDDGKRPDGMTLIPWERGRALVWDATCVDTLAPSHLSESASAAGAAAERAASAKRRKYVAVTNSYIFEPLAFETFGPWSSSTRNFFQKISPKLASSSGDKRAGSFLAQRIGITIQRGNAASILATIPRGQFFLL

SEQ ID NO: 2271 - protein, 975 aa, Pheosia gnoma
MCIYYSILSYLISLASFFVHIILCSSFYIVLYCVYMFAGTSQQELLKCPQCSDGRLFKGRRGLNIHISRCHTQQISLSLPQTLVDASLPQHTFETLIYRLNHSIPLVKRIPRGARIVLARSLANCINSCVNNSEKSWQDLFTFAYIHFHADKTSHSSLTQKLKQNCNSNFNSDIHLPTPISKNRIFNLARTIESKVQEGDIRNAARLLFSNDTLAPSNEITLEALRSKHPSPNPASQLTSPPNLNVQLQIKQEDVLAAILSFPSGSAGGIDGITPQHLKDLVSASAGDAGGALLNNLTKLCNFMLSGKVNDSFIPFLYGARLCAFNKKDGGIRPIAVGCTIRRLTSKLACKHIISTLSSKFQPHQLGFGCKGGCEAAVHATRTFISSGEMEVLLKVDVKNAFNSIDRGALLSEVASQISEIFPYVWQCYSSSSKLIYGEYSIDSAVGVQQGDPLGPALFSLGIHRFISSLNSKLNVWYLDDGTLGGKADTVLNDLVQINRDFKTIGLELNPSKCEIFISDILSSDQVNSIVKNFNEITPNITTLQKNSLYLLGAPLLEEGVKPFLDNKLKTFADNSHRLGILNSHIAFTIIKYCLFVPNLTYSLRASPIWKLSTVLEQMDVTIKDTLEQILNLTLNDLSWMQATLPIRNGGIGVRKISSVALPAFLASVHSSRELCCKILNDDTLIVSNTAEAIETWKNICPNVNVPKEVNLQILWDMPLVQMTQQFLFENLISDRDHARLLALCEKESGHWLHTIPSPNLGTFLDNESFRIAIGIRLGAPVCMAHKCPCGVEVDRFGLHGLSCPKSAGRFSRHGSLNYIIKRALASINVPSILEPLGVFRDDGKRPDGMTLIPWERGRPLVWDATCVDTLAPSHLRESVSAAGAAAERADLGKRRKYALLNNSYAFLPFAVETIGPWSHSAKQFVNKISPKLIASTGDRRAGSFLAQKISLIIQRGNAASILATIPRGQGLFDT

SEQ ID NO: 2272 - protein, 973 aa, Pheosia tremula
MCIYYSILSYLISLASFFVHIILCSSFYIVLYCVYMYAGTSQPELLKCPQCSDGRLFKGRRGLNIHISRCHTQQISLSLPETLVDASHPQFETLIYRLNHSIPLVKRIPRGARILLARSLANCINSCLNNSEKSWQDLFTFAYLHFHADKSSHSSLTQKLKQNCNSNFNSDIHLPTRISKNRIFNLARTIESKVQEGDIRNAARLLFSNDTLAPSNEITLEALRSKHPSPNPASQLPSPPNLNVQLQIKQEDVLAAILSFPSGSAGGIDGITPQHLKDLVSASAGDAGGALLSSLTKLCNFMLSGMVNDSFIPFLYGARLCAFNKKDGGIRPIAVGCTIRRLTSKLACKLIISTLSSKFQPLQLGFGCKGGCEAAVHATRTFISSGQMEVLLKVDVKNAFNSIDRGALLSEVASQIPEIYPYVRQCYSSSSKLLYGEYSIDSAVGVQQGDPLGPALFSLGIHRFISSLNSRLNVWYLDDGTLGGKADTVLNDLIQINRDFKTIGLELNPSKCEIFISDILSSDQVNSIVKNFNEITPNIRTLQNNSLYLLGAPLLDEGVKPFLDNKLKTFSDNSHRLGILNSHVAFTIIKYCLFVPKLTYSLRASPIWKFSTVLEQMDVTIKDTLEQILNLTLNDLSWMQATLPIRNGGIGVRKISSVALPAFLASVHSSRELCCKILNDDTLIVSNTAEAIETWKSICPNVNVPKEVNLQILWDMPLVQMTQQFLFENLISDRDHARLLALCEKESGHWLHTIPSPNLGTFLDNESFRIAIGIRLGAPVCMAHKCPCGVEVDRFGLHGLSCPKSAGRFSRHGSLNDIIKRALASINVPSILEPLGVFRDDGKRPDGMTLIPWERGRPLVWDATCVDTLAPSHLRESVSAAGAAAERADLGKRRKYALLNNSYAFLPFAVETLGPWSHSAKQFINKISPKLIASTGDRRAGSFLAQKISLIIQRGNAASILATIPRGQGLFDT

SEQ ID NO: 2273 - protein, 973 aa, Pheosia tremula
MCIYYSILSYLISLASFFVHIILCSSFYIVLYCVYMYAGTSQPELLKCPQCSDGRLFKGRRGLNIHISRCHTQQISLSLPETLVDASHPQFETLIYRLNHSIPLVKRIPRGARILLARSLANCINSCLNNSEKSWQDLFTFAYLHFHADKSSHSSLTQKLKQNCNSNFNSDIHLPTRISKNRIFNLARTIESKVQEGDIRNAARLLFSNDTLAPSNEITLEALRSKHPSPNPASQLPSPPNLNVQLQIKQEDVLAAILSFPSGSAGGIDGITPQHLKDLVSASAGDAGGALLSSLTKLCNFMLSGKVNDSFIPFLYGARLCAFNKKDGGIRPIAVGCTIRRLTSKLACKHIISTLSSKFQPLQLGFGCKGGYEAAVHATRTFISSGQMEVLLKVDVKNAFNSIDRGALLSEVASQIPEIYPYVRQCYSSSSKLLYGEYSIDSAVGVQQGDPLGPALFSLGIHRFISSLNSRLNVWYLDDGTLGGKADTVLNDLIQINRDFKTIGLELNPSKCEIFISDILSSDQVNSIIKNFNEITPNIRTLQKNSLYLLGAPLLDEGVKPFLDNKLKTFSDNSHRLGILNSHVAFTIIKYCLFVPKLTYSLRASPIWKFSTVLEQMDVSIKDTLEQILNLTLNDLSWMQATLPIRNGGIGVRKISSVALPAFLASVHSSRELCCKILNDDTLIVSNTAEAIETWKSICPNVNVPKEVNLQILWDMPLVQMTQQFLFENLISDRDHARLLALCEKESGHWLHTIPSPNLGTFLDNESFRIAIGIRLGAPVCMAHKCPCGVDVDRFGLHGLSCPKSAGRFSRHGSLNDIIKRALASINVPSILEPLGVFRDDGKRPDGMTLIPWERGRPLVWDATCVDTLAPSHLRESVSAAGAAAERADLGKRRKYALLNNSYAFLPFAVETLGPWSHSAKQFINKISPKLIASTGDRRAGSFLAQKISLIIQRGNAASILATIPRGQGLFDT

SEQ ID NO: 2274 - protein, 984 aa, Notodonta dromedarius
MVIGCFFCMCIFYFSFSYLIPLIILVFIVFIYSTCVLSWARMSAGASQPLQELLECPQCHNGRLYKGRRGLNIHTSRCHSHPISLSLPSHPQAIVTDNQATIPFEKLISRLNHSIPLVKRIPRGARISLARSLANCIESCLQNSEKSWQDLFCFAYRHFHADKTSNISLTKKLKQNCTNNLNFNLQLPAPITFNRTFNLAHAIESKVQDGDIRNAARLLFSNDTLAPPNDATLEALRSKHPTPNTDSQLPDPPIHNQNLQIKDEDVLAAIFSFPSGSTGGIDGITPQHLKDLVGVSAGDAGGVLLSNLTKLCNLMLNGKVIQSFLPILYGARLCAFNKKDGGIRPIAIGSTLRRLVSKLACKHIISRLSSKFQPLQLGFGCKGGCEAAVHATRTFIASGDIEVLLKVDVRNAFNSLDRAPLLNEVASQLPEIYSYVWQCYSSPSKLLYNDFSIESAVGVQQGDPLGPALFSLGIHRYISSLNSKLNVWYLDDGTLGGKADTVLSDLTQITKDFKTIGLELNPSKCEIFVSDTVQPMRFNLIFESFNKIMPNIKSLNKETLCLLGAPLLDEGVKPFLDKKIKDFSDNSDRLGILNSHVAFTIIKFCLFVPKLTYALRASPIWKFSAQLEQMDAIIKDTLEKILNLSLNDFSWIQATLPIRNGGIGVRKISDVALPAFLASVHSAGGLCSKILKDSTFLISGTTEAIETWKSICPNVDIPKEVHQQILWDTPLVQITQNFLFENLTSDRDHARLLALREKESGYWLHAIPSPNLGTFLDNESFRVAVGIRLGAPVCIEHKCPCGVEVDRSGLHGLSCQISAGRFSRHGSINDCIKRALATINVPSILEPSGIFRDDGKRPDGMTLIPWERGRPLVWDATCVDTLAPSHLKESVAAAGAAAEKADLGKRRKYASLNNNYVFVPFAVETLGPWSHSAKNLINVLTPKIIASTGDKRAGSFLVQKISLSIQRGNAASILGTIPRGQGLF

SEQ ID NO: 2275 - protein, 938 aa, Furcula furcula
MMVDFSKVGKVSAFIHHGATAMPSHRLSHRSHLLFSSIPPPFHPVRLPAQLSFHILISRLHRCTPLVKRIPRGARISLAYSLSNNIKNCFLNCENSWEDLFTFAYTHFHANKSQSISLTQQLKQNCNSLPHAQILAPSANFNPKRLKPHNIAQVIESKVQDGDIKNAARILFSNDTLAPPNDLTLEALRLKHPTRTSTSSLPPILASQFQTIIAKEEDVLAAITSFPSGSAAGIDGITQQHLKDLVSMSAGDGGRALLTNITKLCNLMFAGKVPDSFLPYIYGARLCAFNKKDGGIRPIAIGCSIRRLASKIICKHISSTLKSKFQPIQLGFGSKGGCEAAVHATRTFISSSDMEVLLKVDVRNAFNSLDRSVFLNEVATQLPEIYPYVSQCYHTTSKLLYDDHTIDSAFGVQQGDPLGPALFSLGIHSIVSSLNSKLNVWYLDDGTLGGDADTVISDLIKINNEFKLMGLELNTSKCEIFVTDSLFPPEIDSIVKRFHHISPDIKILKRDSLCLLGAPLLPESMEPFLENKIQHFSENSHRLGIINSHIAFTIMKHCLLVPKFMYVLRASPIWKCLGLIERMDATLKDSLEKILNICLQDNSWTQATLPIRHGGIGVRKISSVALPAFLASVHSVRGLCCQILKQDDLRILSAHEALESWKMNCPNGEIPKELNVQKLWDLPLVQSAAESLIQNCTSDRDRARLLALSRNESGHWLQALPSSTIGTLLDSESFRVAVAIRLGAPVCCEHTCPCGVEVDSFGLHGLSCRRSAGRFSRHGSLNDIVKRALASIDVPSVLEPAGVLRDDGKRPDGMTLIPWERGRALVWDATCVDTLAPSHLSESASAAGAAAERAASAKRRKYVAVTNSYIFEPLAFETFGPWSSSTRNFFQKISPKLASSSGDKRAGSFLAQRIGITIQRGNAASSLATIPRGQFFLL

SEQ ID NO: 2276 - protein, 670 aa, Notodonta dromedarius
MLNGKVIQSFLPILYGARLCAFNKKDGGIRPIAIGSTLRRLVSKLACKHIISRLSSKFQPLQLGFGCKGGCEAAVHATRTFIASGDIEVLLKVDVRNAFNSLDRAPLLNEVASQLPEIYSYVWQCYSSPSKLLYNDFSIESAVGVQQGDPLGPALFSLGIHRYISSLNSKLNVWYLDDGTLGGKADTVLSDLTQITKDFKTIGLELNPSKCEIFVSDTVQPMRFNLIFESFNKIMPNIKSLNKETLCLLGAPLLDEGVKPFLDKKIKDFSDNSDRLGILNSHVAFTIIKFCLFVPKLTYALRASPIWKFSAQLEQMDAIIKDTLEKILNLSLNDFSWIQATLPIRNGGIGVRKISDVALPAFLASVHSAGGLCSKILKDSTFLISGTTEAIETWKSICPNVDIPKEVHQQILWDTPLVQITQNFLFENLTSDRDHARLLALREKESGYWLHAIPSPNLGTFLDNESFRVAVGIRLGAPVCIEHKCPCGVEVDRSGLHGLSCQISAGRFSRHGSINDCIKRALATINVPSILEPSGIFRDDGKRPDGMTLIPWERGRPLVWDATCVDTLAPSHLKESVAAAGAAAEKADLGKRRKYASLNNNYVFVPFAVETLGPWSHSAKNLINVLTPKIIASTGDKRAGSFLVQKISLSIQRGNAASILGTIPRGQGLF

SEQ ID NO: 2277 - protein, 926 aa, Furcula furcula
MKEHISSSCPRNLVSEQNLSSCNHVSQSTHDFIPLPFNILISRLQQSTPLVKRIPRGARISLARALSSTIHKCLNNSEKSWHELFTFSYTYLHAKRTDNVTLTQQLKLQCERDTNFLSTSHLSSTNSPPLKIPPKTFNLARSIEMKVQDGDIRNAARLLFSNDTLAPHNDLTLEVLRSKHPAPNVASEPPVPPFDSLPSLQISDDDVLAAIMSFPSGSAGGIDGITPQHLKDLVSVSAGDAGRALLDDLSKLSNFMLSGKVNNSFLPFLYGARLCAFNKKDGGIRPIAIGSTFRRLTSKLACKRIASCLTTKFQPVQLGFGSKGGCEAAVHATRTFISSDDMEVLLKVDVKNAFNSLDRSALLKTVASQLPELYPYIWQCYSSASKLIFGNHVIDSAVGVQQGDPLGPALFSLAIQHSISSLNSKLNVWYLDDGTLGGKAVTVLSDLNKVSHDFNSLGLELNSSKCEIYICDSLPPSQKNSIIDNFNKITPNIKILSKESLCLLGAPLLDEGVEPFLEDKFNNFLDNSSRLGILNSHIAYTILKYCLFVPKFTYILRASPVWKFSGQLNRMDAALKNTLEKILNLPLHDLSWLQATLPIRHGGIGVRKISSVALPAFLASVHSSYDLCSKIINNSTIAGVTEALETWKLICPNVDIPKEVNVQKLWDTPLVQISHTILAEKLTSDRDRARLLAVGEKESGHWLHSIPASRLGTLLDSESFQIAVGIRLGAPVCMEHRCPCGVEVDRSGLHGLSCQKSAGRFSRHSSLNDIIKRALATINVPSLLEPLGVFRDDGKRPDGMTLIPWERGRALVWDATCVDTLAPSHLRDAVSKAGAVAEKADLGKRRKYFSLANTHIFVPLAVETFGPWSSSTKNFFQQISPRLIASTGDKRAGSFLAQRISIAIQRGNAASVLATIPRGHDLFDYM

SEQ ID NO: 2278 - protein, 1000 aa, Furcula furcula
MFLCYFYYLCILSVCKFFSLFVLVSLFIFIFAILFHGVRMHAGASQPELVKCPQCNSGKLFKGSRGLNIHISRCHSHPISSSCPRNLVSEHNLNSCNHVTQSTHDFIPLPFNILISRLQQSTPLVKRIPRGARISLARALSSTIHKCLNNSEKSWQELFTFSYTFLHAKRTDNVTLTQQLKLQCERDTNFLSTSHLSSTSSPPLKIPPKIFNLARSIETKVQDGDIRNAARLLFSNDTLAPHNDLTLEVLRSKHPAPNLASEPPVPPFDSLPSFQISDDDVLAAIMSFPSGSAGGIDGITPQHLKDLVSVSAGDAGRALLGDLSKLSNFMLSGKVNNSFLPFLYGARLCAFNKKDGGIRPIAIGSTFRRLTSKLACKRIASCLTTKFQPVQLGFGSKGGCEAAVHATRTFISSDDMEVLLKVDVKNAFNSLDRSALLKTVASQLPELYPYIWQCYSSASKLIFGNHVIDSAVGVQQGDPLGPALFSLAIQHSISSLNSKLNVWYLDDGTLGGRAVTVLSDLNKVSHDFNSLGLELNSSKCEIYICDSLPPSQKNSIIDNFNKITPNIKILSKESLCLLGAPLLDEGVEPFLEDKFNNFLDNSSRLGILNSHIAYTILKYCLFVPKFTYILRASPVWKFSGQLNRMDAALKNTLEKILNLPCHDLSWLQATLPIRHGGIGVRKISSVALPAFLASVHGAHDLCSKIINYPTIAGVTEALETWKRICPNVDIPKEVNEQKLWDSPLVQISHAILAEKLTSDRDRARLLAVGVKESGHWLHTIPASRLGTLLDSESFRIAVGIRLGAPVCMEHRCPCGVEVDRSGLHGLSCQKSAGRFSRHSSLNDIIKRALATINVPSLLEPLGVFRDDGKRPDGMTLIPWERGRALVWDATCVDTLAPSHLRDAVSKAGAVAEKAGLGKRRKYVSLANTHIFVPLAVETFGPWSSSTRNFFQQISPRLIASTGDKRAGSFLAQRISIAIQRGNAASVLATIPRGHDLFDNL

SEQ ID NO: 2279 - protein, 1000 aa, Furcula furcula
MFLCYFYYLCILSVCKFYSLFVLVSLFIFIFAILVHGVRMHAGASQPELVKCPQCNSGKLFKGSRGLNIHISRCHSHPISSSCPRNLVTEQNLNSCNHVTQSTHDFIPLPFNILISRLQQSTPLVKRIPRGARISLARALSSTIHKCLNNSEKSWQELFTFSYTYLHAKRTDNVTLTQQLKLQCERDINFLSTSHLSSTSSPPLKIPPKIFNLARSIETKVQDGDIRNAARLLFSNDTLAPHNDLTLEVLRSKHPAPNLASEPSVPPFDSLPSFQISDDDVLATIMSFPSGSAGGIDGITPQHLKDLVSVSAGDAGRALLGDLSKLSNFMLSGKVNNSFLPFLYGARLCAFNKKDGGIRPIAIGSTFRRLTSKLACKRIASCLTTKFQPVQLGFGSKGGCEAAVHATRTFISSDDMEVLLKVDVKNAFNSLDRSALLKTVASQLPELYPYIWQCYSSASKLIFGNHVIDSAVGVQQGDPLGPALFSLAIQHSISSLNSKLNVWYLDDGTLGGKAVTVLSDLNKVSHDFNSLGLELNSSKCEIYICDSLPPSQKNSIIDNFNKITPNIKILSKESLCLLGAPLLDEGVEPFLEDKFNNFLDNSSRLGILNSHIAYTILKYCLFVPKFTYILRASPVWKFSGQLNRMDAALKNTLEKILNLPFHDLSWLQATLPIRHGGIGVRKISSVALPAFLASVHGAHDLCSKIINYPTIAGVTEALETWKRICPNVDIPKEVNEQKLWDSPLVQISHAILAEKLTSDRDRARLLAVGVKESGHWLHTIPASRLGTLLDSESFRIAVGIRLGAPVCMEHRCPCGVEVDRSGLHGLSCQKSAGRFSRHSSLNDIINRALATINVPSLLEPLGVFRDDGKRPDGMTLIPWERGRALVWDATCVDTLAPSHLRDAVSKAGAVAEKAGLGKRRKYVSLANTHIFVPLAVETFGPWSSSTRNYFQQISPRLIASTGDKRAGSFLAQRISIAIQRGNAASVLATIPRGHDLFDNL

SEQ ID NO: 2280 - protein, 961 aa, Furcula furcula
MHAGASQPELVKCPQCNSGKLFKGSRGLNIHISRCHSHPISSSCPRNLVSEQNLNSCNHVTQSTHDFIPLPFNILISRLQQSTPLVKRIPRGARISLARALSSTIHKCLNNSEKSWQELFTFSYTFLHAKRTDNVTLTQQLKLQCERDTNFLSTSHLSSTSSPPLKIPPKIFNLARSIETKVQDGDIRNAARLLFSNDTLAPHNDLTLEVLRSKHPAPNLASEPPVPPFDSLPSFQISDDDVLAAIMSFPSGSAGGIDGITPQHLKDLVSVSAGDAGRALLGDLSKLSNFMLSGKVNNSFLPFLYGARLCAFNKKDGGIRPIAIGSTFRRLTSKLACKRIASCLTTKFQPVQLGFGSKGGCEAAVHATRTFISSDDMEVLLKVDVKNAFNSLDRSALLKTVASQLPELYPYIWQCYSSASKLIFGNHVIDSAVGVQQGDPLGPALFSLAIQHSISSLNSKLNVWYLDDGTLGGRAVTVLSDLNKVSHDFNSLGLELNSSKCEIYICDSLPPSQKNSIIDNFNKITPNIKILSKESLCLLGAPLLDEGVEPFLEDKFNNFLDNSSRLGILNSHIAYTILKYCLFVPKFTYILRASPVWKFSGQLNRMDAALKNTLEKILNLPFHDLSWLQATLPIRHGGIGVRKISSVALPAFLASVHGAHDLCSKIINYPTIAGVTEALETWKRICPNVDIPKEVNEQKLWDSPLVQISHAILAEKLTSDRDRARLLAVGVKESGHWLHTIPASRLGTLLDSESFRIAVGIRLGAPVCMEHRCPCGVEVDRSGLHGLSCQKSAGRFSRHSSLNDIIKRALATINVPSLLEPLGVFRDDGKRPDGMTLIPWERGRALVWDATCVDTLAPSHLRDAVSKAGAVAEKAGLGKRRKYVSLANTHIFVPLAVETFGPWSSSTRNFFQQISPRLIASTGDKRAGSFLAQRISIAIQRGNAASVLATIPRGHDLFDNL

SEQ ID NO: 2281 - protein, 921 aa, Furcula furcula
MFLCYFYYLCILSVCKFYSLFVLVSLFIFIFAILFHGVRMHAGASQPELVKCPQCNSGKLFKGSRGLNIHISRCHSHPISSSCPRNLVSEQNLNSCNHVTQSTHDFIPLPFNILISRLQQSTPLVKRIPRGARISLARTLSSTIHKCLNNSEKSWQELFTFSYTYLHAKRTDNVTLTQQLKLQCERDINFLSTSHLSSTSSPPLKIPPKIFNLARSIETKVQDGDIRNAARLLFSNDTLAPHNDLTLEVLRSKHPAPNLASEPSVPPFDSLPSFQISDDDVLAAIMSFPSGSAGGIDGITPQHLKDLVSVSAGDAGRALLGDLSKLSNFMLSGKVNNSFLPFLYGARLCAFNKKDGGIRPIAIGSTFRRLTSKLACKRIASCLTTKFQPVQLGFGSKGGCEAAVHATRTFISSDDMEVLLKVDVKNAFNSLDRSALLKTVASQLPELYPYIWQCYSSASKLFFGNHVIDSAVGVQQGDPLGPALFSLAIQHSISSLNSKLNVWYLDDGTLGGKAVTVLSDLNKVSHDFNSLGLELNSSKCEIYICDSLPPSQKNSIIDNFNKITPNIKILSKESLCLLGAPLLDEGVEPFLEDKFNNFLDNSSRLDILNSHIAYTILKYCLFVPKFTYILRASPVWKFSGQLNRMDAALKNTLEKILNLPFHDLSWLQATLPIRHGGIGVRKISSVALPAFLASVHGAHDLCSKIINYPTIAGVTEALETWKRICPNVDIPKEVNEQKLWDSPLVQISHAILAEKLTSDRDRARLLAVGVKESGHWLHTIPASRLGTLLDSESFRIAVGIRLGAPVCMEHRCPCGVEVDRSGLHGLSCQKSAGRFSRHSSLNDIIKRALATINVPSLLEPLGVFRDDGKRPDGMTLIPWERGRALVWDATCVDTLAPSHLRDTVSKAGAVAEKAGLGKRRK

SEQ ID NO: 2282 - protein, 1000 aa, Furcula furcula
MFLCYFYYLCILSVCKFFSLFVLVSLFIFIFAILFHGVRMHAGASQPELVKCPQCNSGKLFKGSRGLNIHISRCHSHPISSSCPRNLVSEQNLNSCNHVTQSTHDFIPLPFNILISRLQQSTPLVKRIPRGARISLARALSSTIHKCLNNSEKSWQELFTFSYTFLHAKRTDNVTLTQQLKLQCERDTNFLSTSHLSSTSSPPLKIPPKIFNLARSIETKVQDGDIRNAARLLFSNDTLAPHNDLTLEVLRSKHPAPNLASEPPVPPFDSLPSFQISDDDVLAAIMSFPSGSAGGIDGITPQHLKDLVSVSAGDAGRALLGDLSKLSNFMLSGKVNNSFLPFLYGARLCAFNKKDGGIRPIAIGSTFRRLTSKLACKRIASCLTTKFQPVQLGFGSKGGCEAAVHATRTFISSDDMEVLLKVDVKNAFNSLDRSALLKTVASQLPELYPYIWQCYSSASKLIFGNHVIDSAVGVQQGDPLGPALFSLAIQHSISSLNSKLNVWYLDDGTLGGRAVTVLSDLNKVSHDFNSLGLELNSSKCEIYICDSLPPSQKNSIIDNFNKITPNIKILSKESLCLLGAPLLDEGVEPFLEDKFNNFLDNSSRLGILNSHIAYTILKYCLFVPKFTYILRASPVWKFSGQLNRMDAALKNTLEKILNLPFHDLSWLQATLPIRHGGIGVRKISSVALPAFLASVHGAHDLCSKIINYPTIAGVTEALETWKRICPNVDIPKEVNEQKLWDSPLVQISHAILAEKLTSDRDRARLLAVGVKESGHWLHTIPASRLGTLLDSESFRIAVGIRLGAPVCMEHRCPCGVEVDRSGLHGLSCQKSAGRFSRHSSLNDIIKRALATINVPSLLEPLGVFRDDGKRPDGMTLIPWERGRALVWDATCVDTLAPSHLRDAVSKAGAVAEKAGLGKRRKYVSLANTHIFVPLAVETFGPWSSSTRNFFQQISPRLIASTGDKRAGSFLAQRISIAIQRGNAASVLATIPRGHDLFDNL

SEQ ID NO: 2283 - protein, 1000 aa, Furcula furcula
MFLCYFYYLCILSVCKFFSLFVLVSLFIFIFAILFHGVRMHAGASQPELVKCPQCNSGKLFKGSRGLNIHISRCHSHPISSSCPRNLVSEQNLNSCNHVTQSTHDFIPLPFNILISRLQQSTPLVKRIPRGARISLARALSSTIHKCLNNSEKSWQELFTFSYTYLHAKRTDNVTLTQQLKLQCERDTNFLSTSHLSSTSSPPLKIPPKIFNLARSIETKVQDGDIRNAARLLFSNDTLAPHNDLTLEVLRSKHPAPNLASEPPVPPFDSLPSFQISDDDVLAAIMSFPSGSAGGIDGITPQHLKDLVSVSAGDAGRALLGDLSKLSNFMLSGKVNNSFLPFLYGARLCAFNKKDGGIRPIAIGSTFRRLTSKLACKRIASCLTTKFQPVQLGFGSKGGCEAAVHATRTFISSDDMEVLLKVDVKNAFNSLDRSALLKTVASQLPELYPYIWQCYSSASKLIIGNHVIDSAVGVQQGDPLGPALFSLAIQHSISSLNSKLNVWYLDDGTLGGKAVTVLSDLNKVSHDFNSLGLELNSSKCEIYICDSLPPSQKNSIIDNFNKITPNIKILSKESLCLLGAPLLDEGVEPFLEDKFNNFLDNSSRLGILNSHIAYTILKYCLFVPKFTYILRASPVWKFSGQLNRMDAALKNTLEKILNLPFHDLSWLQGTLPIRHGGIGVRKISSVALPAFLASVHGAHDLCSKIINYPTIAGVTEALETWKRICPNVDIPKEVNEQKLWDSPLVQISHAILAEKLTSDRDRARLLAVGVKESGHWLHTIPASRLGTLLDSESFRIAVGIRLGAPVCMEHRCPCGVEVDRSGLHGLSCQKSAGRFSRHSSLNDIIKRALATINFPSLLEPLGVFRDDGKRPDGMTLIPWERGRALVWDATCVDTLAPSHLRDAVSKAGAVAEKAGLGKRRKYVSLANTHIFVPLAVETFGPWSSSTRNFFQQISPRLIASTGDKRAGSFLAQRISIAIQRGNAASVLATIPRGHDLFDNL

SEQ ID NO: 2284 - protein, 1000 aa, Furcula furcula
MFLCYFYYLCILSVCKFFSLFVLVSLFIFIFAILFHGVRMHAGASQPELVKCPQCNSGKLFKGSRGLNIHISRCHSHPISSSCPRNLVSEQNLNSCNHVTQSTHDFIPLPFNILISRLQQSTPLVKRIPRGARISLARALSSTIHKCLNNSEKSWQELFTFSYTFLHAKRTDNVTLTQQLKLQCERDTNFLSTSHLSSTSSPPLKIPPKIFNLARSIETKVQDGDIRNAARLLFSNDTLAPHNDLTLEVLRSKHPAPNLASEPPVPPFDSLPSFQISDDDVLAAIMSFPSGSAGGIDGITPQHLKDLVSVSAGDAGRALLGDLSKLSNFMLSGKVNNSFLPFLYGARLCAFNKKDGGIRPIAIGSTFRRLTSKLACKRIASCLTTKFQPVQLGFGSKGGCEAAVHATRTFILSDDMEVLLKVDVKNAFNSLDRSALLKTVASQLPELYPYIWQCYSSASKLIFGNHVIDSAVGVQQGDPLGPALFSLAIQHSISSLNSKLNVWYLDDGTLGGKAVTVLSDLNKVSHDFNYLGLELNSSKCEIYICDSLPPSQKNSIIDNFNKITPNIKILSKESLCLLGAPLLDEGVEPFLEDKFNNFLDNSSRLGILNSHIAYTILKYCLFVPKFTYILRASPVWKFSGQLNRMDAALKNTLEKILNLPFHDLSWLQATLPIRHGGIGVRKISSVALPAFLASVHGAHDLCSKIINYPTIAGVTEALETWKRICPNVDIPKEVNEQKLWDSPLVQISHAILAEKLTSDRDRARLLAVGVKESGHWLHTIPASRLGTLLDSESFRIAVGIRLGAPVCMEHRCPCGVEVDRSGLHGLSCQKSAGRFSRHSSLNDIIKRALATINVPSLLEPLGVFRDDGKRPDGMTLIPWERGRALVWDATCVDTLAPSHLRDAVSKAGAVAEKAGLGKRRKYVSLANTHIFVPLAVETFGPWSSSTRNFFQQISPRLIASTGDKRAGSFLAQRISIAIQRGNAASVLATIPRGHDLFDNL

SEQ ID NO: 2285 - protein, 1000 aa, Furcula furcula
MFLCYLYYLCILSVCNFFSYFLLVSLFIFIFAIFFHGVRMHAGASQPELVKCPQCNSGKLFKGSRGLNIHISRCHSHPISSSCPRNLVSEQNLSSCNHVSQSTHDFIPLPFNILISRLQQSTPLVKRIPRGARISLARALSSTIHKCLNNSEKSWHELFTFSYTYLHAKRTDNVTLTQQLKLQCERDTNFLSTSHLSSTNSPPLKIPPKTFNLARSIETKVQDGDIRNAARLLFSNDTLAPHNDLTLEVLRSKHPAPNVASEPPVPPFDSLPSLQISDDDVLAAIMSFPSGSAGGIDGITPQHLKDLVSVSAGDAGRALLDDLSKLSNFMLSGKVNNSFLPFLYGARLCAFNKKDGGIRPIAIGSTFRRLTSKLACKRIASCLTTKFQPVQLGFGSKGGCEAAVHATRTFISSDDMEVLLKVDVKNAFNSLDRSALLKTVASQLPELYPYIWQCYSSASKLIFGNHVIDSAVGVQQGDPLGPALFSLAIQHSISSLNSKLNVWYLDDGTLGGKAVTVLSDLNKVSHDFNSLGLELNSSKCEIYICDSLPPSQKNSIIDNFNKITPNIKILSKESLCLLGAPLLDEGVEPFLEDKFNNFLDNSSRLGILNSHIAYTILKYCLFVPKFTYILRASPVWKFSGQLNRMDAALKNTLEKILNLPLHDLSWLQATLPIRHGGIGVRKISSVALPAFLASVHSSYDLCSKIINNSTIAGVTEALETWKLICPNVDIPKEVNVQKLWDTPLVQISHTILAEKLTSDRDRARLLAVGEKESGHWLHSIPASRLGTLLDSESFQIAVGIRLGAPVCMEHRCPCGVEVDRSGLHGLSCQKSAGRFSRHSSLNDIIKRALATINVPSLLEPLGVFRDDGKRPDGMTLIPWERGRALVWDATCVDTLAPSHLRDAVSKAGAVAEKADLGKRRKYFSLANTHIFVPLAVETFGPWSSSTKNFFQQISPRLIASTGDKRAGSFLAQRISIAIQRGNAASVLATIPRGHDLFDYM

SEQ ID NO: 2286 - protein, 1000 aa, Furcula furcula
MFLCYFYYLCILSVCKFFSLFVLVSLFIFIFAILFHGVRMHAGASQPELVKCPQCNSGKLFKGSRGLNIHISRCHSHPISSSCPRNLVSEQNLNSCNHVTQSTHDFIPLPFNILISRLQQSTPLVKRIPRGARISLARALSSTIHKCLNNSEKSWQELFTFSYTYLHAKRTDNVTLTQQLKLQCERDTNFLSTSHLSSTSSPPLKIPPKIFNLARSIETKVQDGDIRNAARLLFSNDTLAPRNDLTLEVLRSKHPAPNLASEPPVPPFDSLPSFQISDDDVLAAIMSFPSGSAGGIDGITPQHLKDLVSVSAGDAGRALLGDLSKLSNFMLSGKVNNSFLPFLYGARLCAFNKKDGGIRPIAIGSTFRRLTSKLACKRIASCLTTKFQPVQLGFGSKGGCEAAVHATRTFISSDDMEVLLKVDVKNAFNSLDRSALLKAVASQLPELYPYIWQCYSSASKLIFGNHVIDSAVGVQQGDPLGPALFSLAIQHSVSSLNSKLNVWYLDDGTLGGKAVTVLSDLNKVSHDFNSLGLELNSSKCEIYICDSLPPSQKNSIIDNFNKITPNIKILSKESLCLLGAPLLDEGVEPFLEDKFNNFLDNSSRLGILNSHIAYTILKYCLFVPKFTYILRASPVWKFSGQLNRMDAALKNTLEKILNLPFHDLSWLQATLPIRHGGIGVRKISSVALPAFLASVHGAHDLCSKIINYPTIAGVTEALETWKRICPNVDIPKEVNEQKLWDSPLVQISHAILAEKLTSDRDRARLLAVGVKESGHWLHTIPASRLGTLLDSESFRIAVGIRLGAPVCMEHRCPCGVEVDRSGLHGLSCQKSAGRFSRHSSLNDIIKRALATINVPSLLEPLGVFRDDGKRPDGMTLIPWERGRALVWDATCVDTLAPSHLRDAVSKAGAVAEKAGLGKRRKYVSLANTHIFVPLAVETFGPWSSSTRNFFQQISPRLIASTGDKRAGSFLAQRISIAIQRGNAASVLATIPRGHDLFDNL

SEQ ID NO: 2287 - protein, 1000 aa, Furcula furcula
MFLCYLYYLCILSVCNFFSYFLLVSLFIFIFAIFFHGVRMHAGASQPELVKCPQCNSGKLFKGSRGLNIHISRCHSHPISSSCPRNLVSEQNLSSCNHVSQSTHDFIPLPFNILISRLQQSTPLVKRIPRGARISLARALSSTIHKCLNNSEKSWHELFTFSYTYLHAKRTDNVTLTQQLKLQCERDTNFLSTSHLSSTNSPPLKIPPKTFNLARSIETKVQDGDIRNAARLLFSNDTLAPHNDLTLEVLRSKHPAPNVASEPPVPPFDSLPSLQISDDDVLAAIMSFPSGSAGGIDGITPQHLKDLVSVSAGDAGRALLDDLSKLSNFMLSGKVNNSFLPFLYGARLCAFNKKDGGIRPIAIGSTFRRLTSKLACKRIASCLTTKFQPVQLGFGSKGGCEAAVHATRTFISSDDMEVLLKVDVKNAFNSLDRSALLKTVASQLPELYPYIWQCYSSASKLIFGNHVIDSAVGVQQGDPLGPALFSLAIQHSISSLNSKLNVWYLDDGTLGGKAVTVLSDLNKVSHDFNSLGLELNSSKCEIYICDSLPPSQKNSIIDNFNKITPNIKILSKESLCLLGAPLLDEGVEPFLEDKFNNFLDNSSRLGILNSHIAYTILKYCLFVPKFTYILRASPVWKFSGQLNRMDAALKNTLEKILNLPLHDLSWLQATLPIRHGGIGVRKISSVALPAFLASVHSSYDLCSKIINNSTIAGVTEALETWKLICPNVDIPKEVNVQKLWDTPLVQISHTILAEKLTSDRDRARLLAVGEKESGHWLHSIPASRLGTLLDSESFQIAVGIRLGAPVCMEHRCPCGVEVDRSGLHGLSCQKSAGRFSRHSSLNDIIKRALATINVPSLLEPLGVFRDDGKRPDGMTLIPWERGRALVWDATCVDTLAPSHLRDAVSKAGAVAEKADLGKRRKYFSLANTHIFVPLAVETFGPWSSSTKNFFHQISPRLIASTGDKRAGSFLAQRISIAIQRGNAASVLATIPRGHDLFDYM

SEQ ID NO: 2288 - protein, 1000 aa, Furcula furcula
MFLCYFYYLCILSVCKFFSLFVLVSLFIFIFAILFHGVRMHAGASQPELVKCPQCNSGKLFKGSRGLNIHISRCHSHPISSSCPRNLVSEQNLNSCNHVTQSTHDFIPLPFNILISRLQQSTPLVKRIPRGARISLARALSSTIHKCLNNSEKSWQELFTFSYTFLHAKRTDNVTLTQQLKLQCERDTNFLSTSHLSSTSSPPLKIPPKIFNLARSIETKVQDGDIRNAARLLFSNDTLAPHNDLTLEVLRSKHPAPNLASEPPVPPFVSLPSFQISDDDVLAAIMSFPSGSAGGIDGITPQHLKDLVSVSAGDAGRALLGDLSKLSNFMLSGKVNNSFLPFLYGARLCAFNKKDGGIRPIAIGSTFRRLTSKLACKRIASCLTTKFQPVQLGFGSKGGCEAAVHATRTFILSDDMEVLLKVDVKNAFNSLDRSALLKTVASQLPELYPYIWQCYSSASKLIFGNHVIDSAVGVQQGDPLGPALFSLAIQHSISSLNSKLNVWYLDDGTLGGKAVTVLSDLNKVSHDFNYLGLELNSSKCEIYICDSLPPSQKNSIIDNFNKITPNIKILSKESLCLLGAPLLDEGVEPFLEDKFNNFLDNSSRLGILNSHIAYTILKYCLFVPKFTYILRASPVWKFSGQLNRMDAALKNTLEKILNLPFHDLSWLQATLPIRHGGIGVRKISSVALPAFLASVHGAHDLCSKIINYPTIAGVTEALETWKRICPNVDIPKEVNEQKLWDSPLVQISHAILAEKLTSDRDRARLLAVGVKESGHWLHTIPASRLGTLLDSESFRIAVGIRLGAPVCMEHRCPCGVEVDRSGLHGLSCQKSAGRFSRHSSLNDIIKRALATINVPSLLEPLGVFRDDGKRPDGMTLIPWERGRALVWDATCVDTLAPSHLRDAVSKAGAVAEKAGLGKRRKYVSLANTHIFVPLAVETFGPWSSSTRNFFQQISPRLIASTGDKRAGSFLAQRISIAIQRGNAASVLATIPRGHDLFDNL

SEQ ID NO: 2289 - protein, 1000 aa, Furcula furcula
MFLCYFYYLCILSVCKFFSLFVLVSLFIFIFAILFHGVRMHAGASQPELVKCPQCNSGKLFKGSRGLNIHISRCHSHPISSSCPRNLVSEQNLNSCNHVTQSTHDFIPLPFNILISRLQQSTPLVKRIPRGARISLARALSSTIHKCLNNSEKSWQELFTFSYTYLHAKRTDNVTLTQQLKLQCERDTNFLSTSHLSSTSSPPLKIPPKIFNLARSIETKVQDGDIRNAARLLFSNDTLAPHNDLTLEVLRSKHPAPNLASEPPVPPFDSLPSFQISDDDVLAAIMSFPSGSAGGIDGITPQHLKDLVSVSAGDAGRALLGDLSKLSNFMLSGKVNNSFLPFLYGARLCAFNKKDGGIRPIAIGSTFRRLTSKLACKRIASCLTTKFQPVQLGFGSKGGCEAAVHATRTFISSDDMEVLLKVDAKNAFNSLDRSALLKTVASQLPELYPYIWQCYSSASKLIIGNHVIDSAVGVQQGDPLGPALFSLAIQHSISSLNSKLNVWYLDDGTLGGKAVTVLSDLNKVSHDFNSLGLELNSSKCEIYICDSLPPSQKNSIIDNFNKITPNIKILSKESLCLLGAPLLDEGVEPFLEDKFNNFLDNSSRLGILNSHIAYTILKYCLFVPKFTYILRASPVWKFSGQLNRMDAALKNTLEKILNLPFHDLSWLQATLPIRHGGIGVRKISSVALPAFLASVHGAHDLCSKIINYPTIAGVTEALETWKRICPNVDIPKEVNEQKLWDSPLVQISHAILAEKLTSDRDRARLLAVGVKESGHWLHTIPASRLGTLLDSESFRIAVGIRLGAPVCMEHRCPCGVEVDRSGLHGLSCQKSAGRFSRHSSLNDIIKRALATINFPSLLEPLGVFRDDGKRPDGMTLIPWERGRALVWDATCVDTLAPSHLRDAVSKAGAVAEKAGLGKRRKYVSLANTHIFVPLAVETFGPWSSSTRNFFQQISPRLIASTGDKRAGSFLAQRISIAIQRGNAASVLATIPRGHDLFDNL

SEQ ID NO: 2290 - protein, 961 aa, Furcula furcula
MHAGASQPELVKCPQCNSGKLFKGSRGLNIHISRCHSHPISSSCPRNLVSEQNLNSCNHVTQSTHDFIPLPFNILISRLQQFTPLVKRIPRGARISLARALSSTIHKCLNNSEKSWQELFTFSYTYLHAKRTDNVTLTQQLKLQCERDTNFLSTSHLSSTSSPPLKIPPKIFNLARSIETKVQDGDIRNAARLLFSNDTLAPRNDLTLEVLRSKHPAPNLASELPVPPFDSLPSFQISDDDVLAAIMSFPSGSAGGIDGITPQHLKDLVSVSAGDAGRALLGDLSKLSNFMLSGKVNNSFLPFLYGARLCAFNKKDGGIRPIAIGSTFRRLTSKLACKRIASCLTTKFQPVQLGFGSKGGCEAAVHATRTFISSDDMEVLLKVDVKNAFNSLDRSALLKAVASQLPELYPYIWQCYSSASKLIFGNHVIDSAVGVQQGDPLGPALFSLAIQHSISSLNSKLNVWYLDDGTLGGKAVTVLSDLNKVSHDFNSLGLELNSSKCEIYICDSLPPSQKNSIIDNFNKITPNIKILSKESLCLLGAPLLDEGVEPFLEDKFNNFLDNSSRLGILNSHIAYTILKYCLFVPKFTYILRASPVWKFSGQLNRMDAALKNTLEKILNLPFHDLSWLQATLPIRHGGIGVRKISSVALPAFLASVHGAHDLCSKIINYPTIAGVTEALETWKRICPNVDIPKEVNEQKLWDSPLVQISHAILAEKLTSDRDRARLLAVGVKESGHWLHTIPASRLGTLLDSESFRIAVGIRLGAPVCMEHRCPCGVEVDRSGLHGLSCQKSAGRFSRHSSLNDIIKRALATINVPSLLEPLGVFRDDGKRPDGMTLIPWERGRALVWDATCVDTLAPSHLRDAVSKAGAVAEKAGLGKRRKYVSLANTHIFVPLAVETFGPWSSSTRNFFQQISPRLIASTGDKRAGSFLAQRISIAIQRGNAASVLATIPRGHDLFDNL

SEQ ID NO: 2291 - protein, 1000 aa, Furcula furcula
MFLCYFYYLCILSACKFFSLFVLVSLFIFIFAILFHGVRMHAGASQPELVKCPQCNSGKLFKGSRGLNIHISRCHSHPISSSCPRNLVSEQNLNSCNHVTQSTHDFIPLPFNILISRLQQSTPLVKRIPRGARISLARALSSTIHKCLNNSEKSWQELFTFSYTYLHAKRTDNVTLTQQLKLQCERDTNFLSTSHLSSTSSPPLKIPPKIFNLARSIETKVQDGDIRNAARLLFSNDTLAPRNDLTLEVLRSKHPAPNLASEPPVPPFDSLPSFQISDDDVLAAIMSFPSGSAGGIDGITPQHLKDLVSVSAGDAGRALLGDLSKLSNFMLSGKVNNSFLPFLYGARLCAFNKKDGGIRPIAIGSTFRRLTSKLACKRIASCLTTKFQPVQLGFGSKGDCEAAVHATRTFISSDDMEVLLKVDVKNAFNSLDRSALLKAVASQLPELYPYIWKCYSSASKLIFGNHVIDSAVGVQQGDPLGPALFSLAIQHSVSSLNSKLNVWYLDDGTLGGKAVTVLSDLNKVSHDFNSLGLELNSSKCEIYICDSLPPSQKNSIIDNFNKITPNIKILSKESLCLLGAPLLDEGVEPFLEDKFNNFLDNSSRLGILNSHIAYTILKYCLFVPKFTYILRASPVWKFSGQLNRMDAALKNTLEKILNLPFHDLSWLQATLPIRHGGIGVRKISSVALPAFLASVHGAHDLCSKIINYPTIAGVTEALETWKRICPNVDIPKEVNEQKLWDSPLVQISHAILAEKLTSDRDRARLLAVGVKESGHWLHTIPASRLGTLLDSESFRIAVGIRLGAPVCMEHRCPCGVEVDRSGLHGLSCQKSAGRFSRHSSLNDIIKRALATINVPSLLEPLGVFRDDGKRPDGMTLIPWERGRALVWDATCVDTLAPSHLRDAVSKAGAVAEKAGLGKRRKYVSLANTHIFVPLAVETFGPWSSSTRNFFQQISPRLIASTGDKRAGSFLAQRISIAIQRGNAASVLATIPRGHDLFDNL

SEQ ID NO: 2292 - protein, 715 aa, Furcula furcula
MSFPSGSAGGIDGITPQHLKDLVSVSAGDAGRALLGDLSKLSNFMLSGKVNNSFLPFLYGARLCAFNKKDGGIRPIAIGSTFRRLTSKLACKRIASCLTTKFQPVQLGFGSKGGCEAAVHATRTFISSDDMEVLLKVDVKNAFNSLDRSALLKTVASQLPELYPYIWQCYSSASKLIFGNHVIDSAVGVQQGDPLGPALFSLAIQHSISSLNSKLNVWYLDDGTLGGKAVTVLSDLNKVSHDFNSLGLELNSSKCEIYICDSLPPSQKNSIIDNFNKITPNIKILSKESLCLLGAPLLDEGVEPFLEDKFNNFLDNSSRLGILNSHIAYTILKYCLFVPKFTYILRASPVWKFSGQLNRMDAALKNTLEKILNLPFHDLSWLQATLPIRHGGIGVRKISSVALPAFLASVHGAHDLCSKIINYPTIAGVTEALETWKRICPNVDIPKEVNEQKLWDSPLVQISHAILAEKLTSDRDRARLLAVGVKESGHWLHTIPASRLGTLLDCESFRIAVGIRLGAPVCMEHRCPCGVEVDRSGLHGLSCQKSAGRFSRHSSLNDIIKRALATINVPSLLEPLGVFRDDGKRPDGMTLIPWERGRALVWDATCVDTLAPSHLRDAVSKAGAVAEKAGLGKRRKYVSLANTHIFVPLAVETFGPWSSSTRNFFQQISPRLIASTGDKRAGSFLAQRISIAIQRGNAASVLATIPRGHDLFDNL

SEQ ID NO: 2293 - protein, 847 aa, Notocelia uddmanniana
MDNCVRTNEVEDWFALLSFSYTALRVPESDTKKSLTSKVKENVNSTTLYFPDDISRKPRPLYKHIESKVNDGDLRGAVRLLLSDSSLAPRNDETIGSLREKHPPPSRPLMFPPEPDGSSPSICITPVEVSEALGSFYNGSASGLDGLRPQHLKELTSSSAGNNGSRLMDCLTKLCNFLLNGSLNPLVCPYLYGASLCALSKKDGGIRPIAIGCTLRRLTAKIGCRMVREAMADYLQPVQIGFGTVQGCEAAIHATRAFALGNEGTGSVILKIDIRNAFNSVERDTILEEVLDQVPSLYPFLRQCYHTSSNLFYCDIPITSQVGAQQGDPLGPLIFCLAIQKVISSLNSPLNVWYLDDGTLGGEPHVVLEDLRRILPGLKAIGLEVNPSKCELFCCNTMDDDVMSAFRLLLPDVRLLDKSSLCLLGAPIFPEGVSSALEEKRLALVGAQVHLRNLSAHVSLTLLRSCLAMPRLLYILRTSPTWLFRDDVTRLDDTLKLSLETILNVHLNESQWCQASLPVRHGGLGIRRCREVGVVAFLAHGTLGLVARILSCNGGDPQIPFVAGAFSEWSTICQSNERPDNLVSQRLWDDILCRNICATLLGGAAGSNLARLKAATRPESGAWLQALPSPQLGTLLDDDSLRIAVALRLGCKVCERHRCICGVMVEEDGHHGLSCQRCAGRFSRHHSINDAVRRALVSANIPCVLEPPGLCRTDGKRPDGLTLVPWQKGRCLLWDATCVSTFAPSHLNNTVRAAGSAAEHAARLKHSKYSALEPLYDFVPIAVETAGPWGMEAKTFIKDLGRRLRERGCDPRSGSYLVQQISLAIQRGNAASIMGTFEPATVRSGPI

SEQ ID NO: 2294 - protein, 623 aa, Apotomis turbidana
MVREPMADYLQPVQIGFGTTQGCEAAIHATRAFALANEGTDSIILKIDVKNAFNSVERDTILGEVLDQVPSAYPFLHQCYSKASNLFFGDVSVPSQVGAQQGDPLGPLIFCLAIQKVISSLESPLNAWYLDDGTIGGDPRVVLEDLKRLVPGFKAVGLEINPSKCELFYCSDGDLSLLPDFELLLPGVRRLYKPSLRLLGAPIFPDGVSSALEEKRLALVSAQEHLGYLSAHVSLVLLRSCIAMPRMTYILRTSPTWLFDSDVAKLDDTLKLALESILNVHLNESQWCQAALPVRHGGLGIRRCRELSVVAFLASAYGTSGLVTRIWSNNGESTEVLYLKEAQAKWAAVCQSDERPDNLTTQKGWDDLLCKDIYASLLGAAQGSNQARIRAAAKVEAGAWLQALPSPQLGTLLDNDSLRIAVALRLGSKVCEPHRCICGVMVEENGHHGLSCQRCAGRFSRHYAINDVIRRALVSANVPCVLEPPGLCRTDGKRPDGLTLVPWQKGRCLLWDATCVSTFAPSHLSHTTRSAGAAAECAAKLKHTKYSALEPMYDFVPVAVETAGPWSTEARHFIRELGRRLRDRGSDPRSGSYPVQQISLAIRGNAASVMGTFGPGATRGEPF

SEQ ID NO: 2295 - protein, 952 aa, Hyposmocoma kahamanoa
MGSPSKTTCPYCPGSLKLYIVPRGLNVHIARIHRDVDLLDSGGLAFSGQGAVAPGPSGDGESSRTATHHEVCLDKLSDLKARVHILKHIPKGARSLAAEKLCSIIDNCLRTNSVEDWFSLLSFSFSALRVPESSAKKSLTSKVKDNVVSTALYFPESTTRKPRSLYKSIENKVHDGDLRGAVRLLLSDSSLAPSNEGTLGSLRDKHPIPSRPLVFPPGPVIASHPVSMTPVEVRDAISSFYNGSASGLDGLRPQHLKELTSSSAGSNGSRLLDSITNLCNFLLKGSLNPVICPYLYGASLCALSKKDGGIRPIAIGCTIRRLTAKLCCRMVKDSMASYLQPTQIGFGTAQGCEAAIHATRALALANEDKHAIILKIDIRNAFNSVERDTILGEVLEQVPSIYPFLHQCYSTASKLFFDNECVSSQVGAQQGDPLGPLIFCLAIQKVISSLDSPLNVWYLDDGTIGGNPQVVLNDLKNLVPVLRAIGLEINPSKCELYCCGPVESGFLSDMELLVPGVRRLHKSSLSLLGAPIFPEGVSAALEDKRLALVGAQEHLDNLSAHVSLVLLRSCFAMPRVLYILRTSPSWLFEDDVARLDDTLKSSLESILNVHLTESQWCQAALPIRHGGLGVRRCREIGLVAFLASGHRSLGLVTRILPFNGDDTRIPFLAEALTRWSTVCPGDERPDNVVVQRGWDDVLCREITTSLLGEASGDNVARLKAAIKPESGAWLQALPSPHLGTLLDNDSLRIAVALRLGCKVCELHHCICGVMVEENGHHGLSCQRCAGRFSRHHAINDLVRRALVLANVPCVLEPPGLCRTDGKRPDGLTLVPWRRGRCLLWDATCVSTFAPSHLSHTTRFAGSAAEYAKLKHTKYSALEPMYDFVPIAVETAGTWAAEAKEFVRELGRRLRERGYDPRSGSYLVQQISLAIQRGNAASVMGTFEPGTVQSGPF

SEQ ID NO: 2296 - protein, 955 aa, Apotomis turbidana
MSSPLKVSCPYCPGSPKLYSASRGLNIHIARVHKDIISSGSDGLTVPGPSAVTSGLRGPGSQVTAQAAVNPDRCLEQLSVLKAKVKVLKHIPKGARSLAAEKLCSVVDNCVQSNSVEDWFALLSFSFSALRVPDSSKQKSLTSKVKENLESSTLYFPEDSSRKSGPLYKTIEGKVHEGDLRGAVRLLLSNSSLAPKNDETIRSLQEKHPSPSRTLVFPPEPDSSCPYLTVSPIEVREAIGSFYNGSASGLDGLRPQHLKELTSPSAGSNGPKLLESITKLCNFLLRGLLNPDVCPYLYGASLCALLKKDGGIRPIAIGNTVRRLVAKLCCRMVREPMADYLQPVQIGFGTTQGCEAAIHATRAFALASEGTDSIILKIDVKNAFNSVERDTILGEVLDQVPSAYPFLHQCYSKASNLFFGDVSVPSQVGAQQGDPLGPLIFCLAIQKVISSLESPLNVWYLDDGTIGGDPRLVLEDLKRLVPGFKAVGLEINPSKCELFYCSDGDLSLLPDFELLLPGVRRLYKPSLGLLGAPIFPNGVSSALEEKRLALVSAQEHLGYLSAHVSLTLLRSCFAMPRMTYILRTSPTWLFESDVAKLDDALKLALESILNVHLNESQWCQAALPVRHGGLGIRRCRELSVVAFLASAYGTSGLVTRIWSNNGGSTEVPYLTEAQAKWAALCQSDERPDNLTAQRGWDDLLCKDIYASLLGAAQGSNQARIRAAAKVEAGAWLQALPSPQLGTLLDNDSLRIAVALWLGSKVCEPHRCICGVMVEENGHHGLSCQRCAGRFSRHYAINVVIRRALVSANVPCVLEPPGLCRTDGKRPDGLTLVPWQKGRCLLWDATCVSTFAPSHLSHTTRSAGAAAECAAKLKHTKYFALEPMYDFVPVAVETAGPWGTEARDFIREVGRRLRDRGCDPRSGSYLVQQISLAIQRGNAASVMGTFGPGATRGEPF

SEQ ID NO: 2297 - protein, 955 aa, Pammene fasciana
MSSPSKSACPYCPGSPRLYVIPKGLNVHIARVHKDIVSSGQRTLEVPGPSIVPAAPQSSTAFVSPQVTTPHQSLDDLGELKSKVHVLKHIPKGARCMAAGKLCGIIDKCVQSNTVEDWFSLLSFSFSALRVPEKGTKKSLTSKVKENVDSGMLYFPDTLSGRSSSLYKSIEGKVHDGDMRGAVRLLLSDSSLAPANEETVASLREKHPPPSRPLVFPPESDASNPAFSVTPDEVREALGSFYNGSASGMDGLRPQHLKELTSSVAGSNGAKLLDSLTNLCNFLLKGSVNPIVCPYLYGASLCALTKRDGGIRPIAIGCTIRRLVAKLCCRAVKEPMADYLQPVQVGFGTAQGCEAAIHATRAFALAGRDSGAVILKIDIKNAFNSVERDTLLGEVLDKVPSIYPFLHQCYSADSHLLYNNTRITSRVGAQQGDPLGPLIFCLAVQKVISSLDSPLNVWYLDDGTIGGDPQTVLGDINKLVPGLKEIGLEINPSKCELFCCDAGDVDTRSAIEAVLPGVRFLQKSAFSLLGAPIFPDGVSSALEEKRLVLVRAQQHLSNLSAHVSLVLLRNCLAMPRMMYILRTSPTWMFEEDIAKLDGTLKLALESVLNVQLNETQWTQAALPVRHGGLGIRRCREVGVVAFLASAHGTLGLVTRILSDDGGNFQIPFAAEAWVKWSNFCEGAEPPTNPSTQRGWDDVLCKKVFADLLSGAVGSDIARYKAASKSESGAWLHALPSPQLGTLLDNDSLRIAAALRLGSKVCEVHRCICGAMVQEDGHHGLSCQRCAGRFSRHHAINEVIRRALVSANVPCVLEPPGLCRSDGKRPDGLTLVPWQKGRCLLWDATCVSTFAPSHLGHTLRAAGSAAEYAAKQKHAKYSALEPMYDFVPVAVEVAGPWGTEAKEFVWELGRRLRDRGCDPRSGSFLVQQISLAVQRGNAASVMGTFEPASVRGGPCN

SEQ ID NO: 2298 - protein, 955 aa, Apotomis turbidana
MSSPLKVSCPYCPGSPKLYSASRGLNIHIARVHKDIISSGSDGLTVPGPSAVTSGLRGPGSQVTAQAAVNPDRCLEQLSVLKAKVKVLKHIPKGARSLAAEKLCSVVDNCVQSNSVEDWFALLSFSFSALRVPDSSKQKSLTSKVKENLESSTLYFPEDSSRKSGPLYKTIEGKVHEGDLRGAVRLLLSNSSLAPKNDETIRSLQEKHPSPSRTLVFPPEPDSSCPYLTVSPIEVREAIGSFYNGSASGLDGLRPQHLKELTSPSAGSNGPKLLESITKLCNFLLRGLLNPDVCPYLYGASLCALLKKDGGIRPIAIGNTVRRLVAKLCCRMVREPMADYLQPVQIGFGTTQGCEAAIHATRAFALASEGTDSIILKIDVKNAFNSVERDTILGEVLDQVPSAYPFLHQCYSKASNLFFGDVSVPSQVGAQQGDPLGPLIFCLAIQKVISSLESPLNVWYLDDGTIGGDPRLVLEDLKRLVPGFKAVGLEINPSKCELFYCSDGDLSLLPDFELLLPGVRRLYKPSLGLLGAPIFPDGVSSALEEKRLALVSAQEHLGYLSAHVSLTLLRSCFAMPRMTYILRTSPTWLFESDVAKLDDTLKLALESILNVHLNESQWCQAALPVRHGGLGIRRCRELSVVAFLASAYGTSGLVTRIWSNNGGSTEVPYLTEAQAKWAALCQSDERPDNLTAQRGWDDLLCKDIYASLLGAAQGSNQARIRAAAKVEAGAWLQALPSPQLGTLLDNDSLRIAVALRLGSKVCEPHRCICGVMVEENGHHGLSCQRCAGRFSRHYAINVVIRRALVSANVPCVLEPPGLCRTDGKRPDGLTLVPWQKGRCLLWDATCVSTFAPSHLSHTTRSAGAAAECAAKLKHTKYFALEPMYDFVPVAVETAGPWGTEARDFIREVGRRLRDRGCDPRSGSYLVQQISLAIQRGNAASVMGTFGPGATRGEPF

SEQ ID NO: 2299 - protein, 955 aa, Apotomis turbidana
MSSPLKVSCPYCPGSPKLYSASRGLNIHIARVHKDIISSGSDGLTVPGPSAVTSGLRGPGSQVTAQAAVNPDRCLEQLSVLKAKVKVLKHIPKGARSLAAEKLCSVVDNCVQSNSVEDWFALLSFSFSALRVPDSSKQKSLTSKVKENLESSTLYFPEDSSRKSGPLYKTIEGKVHEGDLRGAVRLLLSNSSLAPKNDETIRSLQEKHPSPSRTLVFPPEPDSSCPYLTVWPIEVREAIGSFYNGSASGLDGLRPQHLKELTSPSAGSNGPKLLESITKLCNFLLRGLLNPDVCPYLYGASLCALLKKDGGIRPIAIGNTVRRLVAKLCCRMVREPMADYLQPVQIGFGTTQGCEAAIHATRAFALASEGTDSIILKIDVKNAFNSVERDTILGEVLDQVPSAYPFLHQCYSKASNLFFGDVSVPSQVGAQQGDPLGPLIFCLAIQKVISSLESPLNVWYLDDGTIGGDPRLVLEDLKRLVPGFKAVGLEINPSKCELFYCSDGDLSLLPDFELLLPGVRRLYKPSLGLLGAPIFPDGVSSALEEKRLALVSAQEHLGYLSAHVSLTLLRSCFAMPRMTYILRTSPTWLFESDVAKLDDTLKLALESILNVHLNESQWCQAALPVRHGGLGIRRCRELSVVAFLASAYGTSGLVTRIWSNNGGSTEVPYLTEAQAKWAALCQSDERPDNLTAQRGWDDLLCKDIYASLLGAAQGSNQARIRAAAKVEAGAWLQALPSPQLGTLLDNDSLRIAVALRLGSKVCEPHRCICGVMVEENGHHGLSCQRCAGRFSRHYAINVVIRRALVSANVPCVLEPPGLCRTDGKRPDGLTLVPWQKGRCLLWDATCVSTFAPSHLSHTTRSAGAAAECAAKLKHTKYFALEPMYDFVPVAVETAGPWGTEARDFIREVGRRLRDRGCDPRSGSYLVQQISLAIQRGNAASVMGTFGPGATRGEPF

SEQ ID NO: 2300 - protein, 955 aa, Apotomis turbidana
MSSPLKVSCPYCPGSPKLYSASRGLNIHIARVHKDIISSGSDGLTVPGPSAVTSGLRGPGSQVTAQAAVNPDRCLEQLSVLKAKVKVLKHIPKGARSLAAEKLCSVVDNCVQSNSVEDWFALLSFSFSALRVLDSSKHKSLTSKVKENLESSTLYFPEDSSRKSGPLYKTIEGKVHEGDLRGAVRLLLSNSSLAPKNDETIRSLQEKHPSPSRTLVFPPEPDSSCPYLTVSPIEVREAIGSFYNGSASGLDGLRPQHLKELTSPSAGSNGPKLLESITKLCNFLLRGLLNPDVCPYLYGASLCALLKKDGGIRPIAIGNTVRRLVAKLCCRMVREPMADYLQPVQIGFGTTQGCEAAIHATRAFALASEGTDSIILKIDVKNAFNSVERDTILGEVLDQVPSAYPFLHQCYSKASNLFFGDVSVPSQVGAQQGDPLGPLIFCLAIQKVISSLESPLNVWYLDDGTIGGDPRLVLEDLKRLVPGFKAVGLEINPSKCELFYCSDGDLSLLPDFELLLPGVRRLYKPSLGLLGAPIFPDGVSSALEEKRLALVSAQEHLGYLSAHVSLTLLRSCFAMPRMTYILRTSPTWLFESDVAKLDDTLKLALESILNVHLNESQWCQAALPVRHGGLGIRRCRELSVVAFLASAYGTSGLVTRIWSNNGGSTEVPYLTEAQAKWAALCQSDERPDNLTAQRGWDDLLCKDIYASLLGAAQGSNQARIRAAAKVEAGAWLQALPSPQLGTLLDNDSLRIAVALRLGFKVCEPHRCICGVMFEENGHHGLSCQRCAGRFSRHYAINVVIRRALVSANVPCVLEPPGLCRTDGKRPDGLTLVPWQKGRCLLWDATCVSTFAPSHLSHTTRSAGAAAECAAKLKHTKYFALEPMYDFVPVAVETAGPWGTEARDFIREVGRRLRDRGCDPRSGSYLVQQISLAIQRGNAASVMGTFGPGATRGEPF

SEQ ID NO: 2301 - protein, 624 aa, Apotomis turbidana
MVREPMADYLQPVQIGFGTTQGCEAAIHATRAFALASEGTDSIILKIDVKNAFNSVERDTILGEVLDQVPSAYPFLHQCYSKASNLFFGDVSVPSQVGAQQGDPLGPLIFCLAIQKVISSLESPLNVWYLDDGTIGGDPRLVLEDLKRLVPGFKAVGLEINPSKCELFYCSDGDLSLLPDFELLLPGVRRLYKPSLGLLGAPIFPDGVSSALEEKRLALVSAQEHLGYLSAHVSLTLLRSCFAMPRMTYILRTSPTWLFESDVAKLDDTLKLALESILNVHLNESQWCQAALPVRHGGLGIRRCRELSVVAFLASAYGTSGLVTRIWSNNGGSTEVPYLTEAQAKWAALCQSDERPDNLTAQRGWDDLLCKDIYASLLGAAQGSNQARIRAAAKVEAGAWLQALPSPQLGTLLDNDSLRIAVALRLGSKVCEPHRCICGVMVEENGHHGLSCQRCAGRFSRHYAINVVIRRALVSANVPCVLEPPGLCRTDGKRPDGLTLVPWQKGRCLLWDATCVSTFAPSHLSHTTRSAGAAAECAAKLKHTKYFALEPMYDFVPVAVETAGPWGTEARDFIREVGRRLRDRGCDPRSGSYLVQQISLAIQRGNAASVMGTFGPGATRGEPF

SEQ ID NO: 2302 - protein, 955 aa, Apotomis turbidana
MSSPLKVSCPYCPGSPKLYSASRGLNIHIARVHKDIISSGSDGLTVPGPSAVTSGLRGPGSQVTAQAAVNPDRCLEQLSVLKAKVKVLKHIPKGARSLAAEKLCSVVDNCVQSNSVEDWFALLSFSFSALRVPDSSKQKSLTSKVKENLESSTLYFPEDSSRKSGPLYKTIEGKVHEGDLRGAVRLLLSNSSLAPKNDETIRSLQEKHPSSSRTLVFPPEPDSSCPYLTVSPIEVREAIGSFYNGSASGLDGLRPQHLKELTSPSAGSNGPKLLESITKLCNFLLRGLLNPDVCPYLYGASLCALLKKDGGIRPIAIGNTVRRLVAKLCCRMVREPMADYLQPVQIGFGTTQGCEAAIHATRAFALASEGTDSIILKIDVKNAFNSVERDTILGEVLDQVPSAYPFLHQCYSKASNLFFGDISVPSQVGAQQGDPLGPLIFCLAIQKVISSLESPLNVWYLDDGTIGGDPRLVLEDLKRLVPGFKAVGLEINPSKCELFYCSDGDLSLLPDFELLLPGVRRLYKPSLGLLGAPIFPDGVSSALEEKRLALVSAQEHLGYLSAHVSLTLLRSCFAMPRMTYILRTSPTWLFESDVAKLDDTLKLALESILNVHLNESQWCQAALPVRHGGLGIRRCRELSVVAFLASAYGTSGLVTRIWSNNGGSTEVPYLTEAQAKWAALCQSDERPDNLTAQRGWDDLLCKDIYASLLGAAQGSNQARIRAAAKVEAGAWLQALPSPQLGTLLDNDSLRIAVALRLGSKVCEPHRCICGVMVEENGHHGLSCQRCAGRFSRHYAINVVIRRALVSANVPCVLEPPGLCRTDGKRPDGLTLVPWQKGRCLLWDATCVSTFAPSHLSHTTRSAGAAAECAAKLKHTKYFALEPMYDFVPVAVETAGPWGTEARDFIREVGRRLRDRGCDPRSGSYLVQQISLAIQRGNAASVMGTFGPGATRGEPF

SEQ ID NO: 2303 - protein, 952 aa, Hedya salicella
MSSPSRAPCPYCPGSPRLDVVPRGLSVHVARAHKDVARSQNALVVPGPSAVASDPSSPGDLSQPTTNGEFCLDRLPELKARVKVLKHIPKGARSLAAEKLCTIIDNCVRSNSVQDWFSLLSFSFTALRVPESGSKKSLTSKVKENVESTTLYFPENTARNSRSLYKTIETKVHDGDLRGAVRLLLSNSSLAPSNDETVRSLREKHPSPSRPLVFPPEPDGSSPPISVTPTDVRGAIGSFYNGSASGLDGLRPQHLKELTSSSAGSNGPRVLNSLAKLCNFLLKGSLNPAVCPYLYGASLCALSKKDGGIRPIAIGCTIRRPTANLCCCMVKDTMSSYLQPVQVGFGTRQGCEAAIHATRAFALANDDTLGIILKIDIKNAFNSLERDAILGEVLERVPLLYPFLHQCYSTASNLFYNDQPLSSQVGAQQGDQLGPLIFCLAIQKVISSLESPLNVWYLDDGTIGGNPQVVLEDLNKLIPALKGIGLEINPSKCELFCCNARDAGVSADLERLLPGVRRLDKSTITLLGAPIFPEGVSSALEEKRLALVRAQEHLTHLSAYVSLVLLRNCFAMPRMTYILRTSPTWLFEGDVDRLDNAIRMTLESILNVHLNESQWCQASLPVRHGGLGIRRCREVGLVAFKASAHGTLGLVTRIQHFNGDNTQIPFVAEAFAKWSTICQGERPENVVSQRGWDDILCKKVCGDLLSNALGSNVARLKAAASPESGAWLHALPSPQLGTLLDNDSLRIAVTLRVGCKVCEPQRCICGAMVEEDGHHGLSCQKCAGRFARHHAINDLVRRALVSANVPSVLEPPGLCRTDGNRPDGLTLVPWQRGRCLLWDATCVSTFAPSHLSHTIRSAGSAAEFATRRLKHSKYSAMEPTYDFVPIAVETAGPWGLEAKDFVKELGRRLRDRGCDPRSGSYLVQQIFLAIQRGNAASVMGTFGPVTIRGGPL

SEQ ID NO: 2304 - protein, 959 aa, Notocelia uddmanniana
MSSPSKSVCPYCPGSPKLYVVPRGLNVHIARVHRGIVSRSPNALGVPGSSAATLGPLSLPTNGDLSQAGTNHQVSLDKLGELKTKVKVLKHIPKGARCLAAGKLCSLIDACLQTNGVDDWFSFLSFSFSALRVPERGERKSLTSKVKANLDSTAFTFPDTASRTGPRSLYKSIEGKVHDGDLRGAVRLLLSDSSLAPTNDDTIASLQEKHPSPSRPLLMPPEPDALSPFLSVTPAEVGEALGTFYNGSASGLDGLRPQHLKELTSSTAGSNGPRLLESLTRLCNFLLRGSLNPLICPYLYGASLCALTKKDGGIRPIAVGCTLRRLTAKLCCRAVREPMADYLQPVQIGFGTPQGCEAAIHATRAFALTNEWSSAVILKIDIKNAFNSVERDTILGEVLDKVPSIYPFIHQCYSTASHLLFNNTPISSRVGAQQGDPLGPLIFCLAIQSAISSLESPLNVWYLDDGTIGGDPRTVLEDLEKLVPALKGMGLEINPTKCELFGCGTVDAGLMVSFEEVLPGVRHLQKSSFSLLGAPIFPEGVSSALEEKRLALVRASEHLNNLSAHVSLALLRNCFALPRMMYILRTSPMFEVFEDDVARVDASLKLALESILNVHLNETQWCQAALPIRHGGLGIRRCQEVGVVAFLASAHGTLSLVTRILSVDGGNIRIPFVEEALGRWLAICQGDEQPKSLAVQRGWDELLCKRICADLLEEAVGSDIARFKAAFSPESGAWLHALPSPHLGTLLDNDSLRIAVALRLGCKVCEAHRCICGVMVEEDGHHGLSCQRCAGRFPRHHAINEVVRRALVSANVPCVLEPPGLCRTDGKRPDGLTLVPWRKGRCLLWDATCVSRFAPSHLSHTIRSAGSAAESAARAKHLKYSALEPVYDFVPVAVETAGPWGAEARDFLKDVGRRLRERGCDPRSGSFLAQQISLAIQRGNAASIMGTFEPSTIRGGPLD

SEQ ID NO: 2305 - protein, 763 aa, Lycaena phlaeas
MTFTSIVRTDIQTITKGMKKWKAAGVDHVHNFWIKKLFSLHDVLAKAITDIIIGNTEIPNFITTGITYMIPKSTKTNDPSEYRPITCLPTIYKLITSCISYKIKTHLESNTIIAEEQKGCRKNHRGCKEQLIIDSTILKHATTKHRNLNVTYIDYKKAFDSVPHSWLIYVLNLYKINPILINFLQNAMTRWKTKLHLTNGTETITTDEIKIENGIFQGDSLSPLWFCLALNPLSKLLNNSNCGYKLTPHCTISHLMYMDDIKLFAKSGKEIKKLIELTAKFSKDINMTFGLDKCKTLNLKKGKFKNSNNDETNYFQNMEENETYKYLGMQEGRTINHIQIKKDLTKEYLYRLNKICKRMLSSKNLIKAINTFAIPILTYSFGTVKWSRTDINQIEIKTRTTLTKHNYLHPKSAIERLTLKRHKGGRGLIDLRMLWEGQILNLREFFYKKALTSKIHLATIESDQNFTPLNLTDRTRKFITLQENNDTKVSNWRQKELHGRHLKDLEKTNIDDTASNQWLKLGSLFPETEGFIIAIQDQVIHTKNYKKIILKDPNVLNDKCRKCHRHSETIQHITGACPTLTQSDYTHRHNQITHYVHQKLALKHGLLTGKLAPYYQYTPKPVLESSSCKMYFDRAILTDKTIHNNRPDITLLDKNNKKAYIIDIAVPNTHNIQKTITEKIHKYTDLKEEIARIWKLNKVYIVPLVLSSTGVIPKYLLQALKTIDLHENTYMTMQKAAILNTCRTVRKFLQEDSPNTINDSHLA

SEQ ID NO: 2306 - protein, 1329 aa, Lycaena phlaeas
MRLRSGYKLPQAGTGANSDGESDPKSTDRGSPTYSGGDTVSQSAQLKTDADHQLTPGHEKLNRRTSTRLPKIATADINNVYRPTDKIIDKPTASVSENYKQTDNADSNSVLVLSNTQIQHDFLNSQNRFNSPATDVSQEAIATQPATTKAGKTRVRMKWDDEINKFIMRTYLYITKLETDKTMYCSRLFDQFKIKYPNFKVSSQRIADQRRVIVRNKLISDEQLKEIREEVILQLQGDGYLEHENIDTESSPLNIPLDILTRETDDGDGGYNAQTQIVLTHTLQYTQSSHISTQSLEPSIIPLDHLNNYYTEDTNKESLTKKIEEELDAVLIQYTGTDPLSRPKLPRLKENKKLYELVDIFNHLLNKYCRTNNDLSQIHTLIYCSALVISRRLGYKISNESNTNNRPKPYTKKPAWLIRIDNDITKLRADIGVLTQFIQNNRTKKVIKKVDAIFKKRKIHSTYDKNNIRPEEYLDTLKQKLTVKSQRLKRFKKSLQRKSDNKVFTTNEKSFYRSLNNNNATITNSQLPTENELKNYWTNIWQKQRDHNNEAEWILDEEENTKTIEPMTFTSIARTDIQTITKGMKNWKAAGVDHVHNFWIKKLFSLHDVLAKAITDIIIGNTEIPNFITTGITYMIPKSTKTNDPSEYRPITCLPTIYKLITSCISYKIKSHLESNTIIAEEQKGCRRNHRGCKEQLIIDSTILKHATTKHRNLNVTYIDYKKAFDSVPHSWLIYVLNLYKINPILINFLKNAMTRWKTKLHLTNGTETITTDEIKIENGIFQGDSLSPLWFCLALNPLSKLLNNSNCGYKLTPHCTINHLMYMDDIKLFAKSGKEIKKLIELTAKFSKDINMTFGLDKCKTLNLKKGKFKSSNNDETNYFQNMEENETYKYLGMQEGRTINHIQIKKDLTKEYLYRLNKICKRMLSSKNLIKAINTFAIPILTYSFGTVKWSRTDINQIEIKTRTTLTKHNYLHPKSAIERLTLKRHKGGRGLIDLRMLWEGQILNLRDFFYKKALTSKIHLATTESDQNFTPLNLTDRTRKFITLQENNDTKVSNWRQKELHGRHLKDLEKTNIDDTASNQWLKLGSLFPETEGFIIAIQDQVIHTKNYKKIILKDPNVLNDKCRKCHRHSETIQHITGACPTLTQSDYTHRHNQIAHYVHQKLALKHGLLTGKLAPYYQYTPKPVLESSSCKMYFDRAILTDKTIHNNRPDITLLDKNNKEAYIIDIAVPNTHNIQKTITEKIHKYTDLKEEIARIWKLNKVYIVPLVLSSTGVIPKYLLQALKTIDLHENTYMTMQKAAILNTCRTVRKFLQEDSPNTINDSHLA

SEQ ID NO: 2307 - protein, 1259 aa, Manduca sexta
METRLKSKLRGPLPGGDRRGTLGADAGCHSMRSVSGVELSRRTPTESNIGLDATADPDRQIESRANRVPAADVSQEAQATQPATTKAGKIRVRMQWNNEINKFIMRTYLYITKLETDKTMYCNRLFEQFKIKYPHINVTSQRIADQRRVILRNKLLSDDEINTIREEVTLQLQNEEDLGFQINNINSTQNTLPNTPLFEEDSSVVTYLLSPNREIHSQTSHVATQTSDPSLISLAHLNEYDTRDSDINSELRCKEIEEQLQTYLTLYTGTDPTSRPKLPRLKETKKLCVLLDMFNNDILKKFYSIDSDLVHLHTLIYCSSLVICKTLGFKIQNNNRNIAHKSKSEKPAWQIRIERDINKLRGDIGVLTQYINNNRSKKVIKKVEVIFNKTKIHSTHERNNIRPQEFLDTLKQRLTVKSQKLSRYKKSLQRKLDNKMFISNEKTFYRSLSEKCTTDLPNKEIPTVDELKTYWADIWKKKTEHNHDASWIKSEEEHVKDIEQMEFTCITRGDIEIVTKGMKNWKATGVDGVYNFWIKKFYTLHEILAKIITDIIKGTAVLPEFITKGITYMLPKSDKTSDPSQYRPITCLPTLYKLITSCITNKINRHLETNTIITEEQKGCRRNHMGCKEQLIIDSTILKHATTNNRNLNITYIDYKKAFDSVPHSWLICVLQIYKIHPQLIAFLERAMIKWRTTLHLTNGINSITTCEIPIENGIFQGDSLSPMWFCLALNPLSHQLNKHNHGYKLTPSCTISHLMYMDDIKLFAKTEKGINKLIEITAQFSRDINMTFGLDKCKTLKLHKGKILNTSITHDHCFSLMEENETYKYLGMHEGRTINHTQIKAALTKQYLNRLNKICKRSLTSKNLVKAINTFAIPVLTYSFGIVKWSRTNINNLEIKTRTTLTKHNYLHPKSAIERMTIKRTQGGRGLIDLKILWEEQERKLRNFFYNKALSSKIHLATVESDQNFTPLNLIDRNKQFKTVAEKLHTKLDSWHRKELHGRHKHDLEQSHVDPTASNRWLKVGTLFPETEGFMLAIQDQVINTKNYKKYILKDPNATDDKCRKCQRQPETIQHITSACPTLTQTDYTHRHNQIAHYIHQKLALKHGLISGKPEPYYQYNPKPVLESNKYKMYFDRAILTDKTIHNNRPDITLMDKNNKVAYIIDVAVPNTHNLQKTITEKINRYTELREEITRIWKLNKVHIVPLVLSSTGVIPTLLLNSIKVLDLPTNSYITMQKAAILNTCRIVRKFLQEETPIAHLP

SEQ ID NO: 2308 - protein, 1259 aa, Manduca sexta
METRLKSKLRGPLPGGDRRGTLGADAGCHSMRSVSGVELSRRTPTESNIGLDATADPDRQIESRANRVPAADVSQEAQATQPATTKAGKIRVRMQWNNEINKFIMRTYLYITKLETDKTMYCNRLFEQFKIKYPHINVTSQRIADQRRVILRNKLLSDDEINTIREEVTLQLQNEEDLGFQINNINSTQNTLPNTPLFEEDSSVVTYLLSPNREIHSQTSHVATQTSDPSLISLAHLNEYDTRDSDINSELRCKEIEEQLQTYLTLYTGTDPTSRPKLPRLKETKKLCVLLDMFNNDILKKFYSIDSDLVHLHTLIYCSSLVICKTLGFKIQNNNRNIAHKSKSEKPAWQIRIERDINKLRGDIGVLTQYINNNRSKKVIKKVEVIFNKTKIHSTHERNNIRPQEFLDTLKQRLTVKSQKLSRYKKSLQRKLDNKMFISNEKTFYRSLSEKCTTDLPNKEIPTVDELKTYWADIWKKKTEHNHDASWIKSKEEHVKDIEQMEFTCITRGDIEIVTKGMKNWKATGVDGVYNFWIKKFYTLHEILAKIITDIIKGTAVLPEFITKGITYMLPKSDKTSDPSQYRPITCLPTLYKLITSCITNKINRHLETNTIITEEQKGCRRNHMGCKEQLIIDSTILKHATTNNRNLNITYIDYKKAFDSVPHSWLICVLQIYKIHPQLIAFLERAMIKWRTTLHLTNGINSITTCEIPIENGIFQGDSLSPMWFCLALIPLSHQLNKHNHGYKLTPSCTISHLMYMDDIKLFAKTEKGINKLIEITAQFSRDINMTFGLDKCKTLKLHKGKKLNTSITHDHCFSLMEENETYKYLGMHEGRTINHTQIKAALTKQYLNRLNKICKRSLTSKNLVKAINTFAIPLLTYSFGIVKWSRTNINNLEIKTRTTLTKHNYLHPKSAIERMTIKRTQGGRGLIDLKILWEEQERKLRNFFYNKALSSKIHLATVESDQNFTPLNLIDRNKQFKTVAEKLHTKLDSWHRKELHGRHKHDLEQSHVDPTASNRWLKVGTLFPETEGFMLAIQDQVINTKNYKKYILKDPNATDDKCRKCQRQPETIQHITSACPTLTQTDYTHRHNQIAHYIHQKLALKHGLISGKPEPYYQYNPKPVLESNKYKMYFDRAILTDKTIHNNRPDITLMDKNNKVAYIIDVAVPNTHNLQKTITEKINRYTELREEITRIWKLNKVHIVPLVLSSTGVIPTLLLNSIKVLDLPTNSYITMQKAAILNTCRIVRKFLQEETPIAHLP

SEQ ID NO: 2309 - protein, 1329 aa, Lycaena phlaeas
MRLRSGYKLPQAGTGANSDGESDPKSTDRGSPTYSGGDTVSQSAQLNTDADHQLTPGHEKLNRRTSTRLPKIATADINNVYRPTDKIIDKPTASVSENYKQTDNADSNSVLVLSNTQIQHDFLNSQNRFNSPAKDVSQGAIATQPATTKAGKTRVRMKWDDEINKFIMRTYLYITKLETDKTMYCSRLFDQFKIKYPNFKVSSQRIADQRRVIVRNKLISDEQLKEIREEVTLQLQGDGYLEHENIDTESSPLNIPLDILTRETDDGDGGYNAQTQIVLTHTLQYIQSSHISTQSLEPSIIPRDHLNNYNTEDTNKESLTKKIEEELDAVLIQYTGTDPLSRPKLPRLKENKKLYELVDIFNHLLNKYCRTNNDLSQIHTLIYCSALVISRRLGYKISNESNTNNRPKPYTKKPAWLIRIDNDITKLRADIGVLTQFIQNNRTKKVIKKVDAIFKKSKIHSTYDKNNIRPEEYLDTLKQKLTVKSQRLKRFKKSLQRKSDNKVFTTNEKSFYRSLNNNNATITNSQLPTENELKNYWTNIWKKQRDHNNEAEWILDEEENTKTIEPMTFTSIVRTDIQTITKGMKNWKAAGVDHVHIFWIKKLFSLHDVLAKAITDIIIGNTEIPNFITTGITYMIPKSTKTNDPSEYRPITCLPTIYKLITSCISYKIKSHLESNTIIAEEQKGCRKNHRGCKEQLIIDSTILKHATTKHRNLNVTYIDYKKAFDSVPHSWLIYVLNLYKINPILINFLKNAMTRWKTKLNLTNGTETITTDEIKIENGIFQGDSLSPLWFCLALNPLSKLLNNSNCGYKLTPHCTINHLMYMDDIKLFAKSGKEIKKLIELTAKFSKDINMTFGLDKCKTLNLKKGKLKNSNNDETNYFQNMEENETYKYLGMQEGRTINHIQIKKDLTKEYLYRLNKICKRMLSSKNLIKAINTFAIPILTYSFGTVKWSRTDINQIEIKTRTTLTKHNYLHPKSAIERLTLKRHKGGRGLIDLRMLWEGQILNLREFFYEKALTSKIHLATIESDQNFTPLNLTDRTRKFITLQENNDTKVSNWRQKELHGRHLKDLEKTNIDDTASNQWLKLGSLFPETEGFIIAIQDQVIHTKNYKKIILKDPHVLNDKCRKCHRHSETIQHITGACPTLTQSDYTHRHNQIAHYVHQKLALKHGLLTGKLAPYYQYTPKPVLESSSCKMYFDRAILTDKTIHNNRPDITLLDKNNKVAYIIDIAVPNTHNIQKTITEKIHKYTDLKEEIARIWKLNKAYIVPLVLSSTGVIPKYLLQALKIIDLHENTYMTMQKAAILNTCRTVRKFLQEDSPNTINDSHLA

SEQ ID NO: 2310 - protein, 1329 aa, Lycaena phlaeas
MRLRSGYKLPQAGTGANSDGESDPKSTDRGSPTYSGGDTVSQSAQLKTDADHQLTPGHEKLNRRTSTRLPKIATADINNVYRPTDKIIDKPTASVSENYKQTDNADSNSVLVLSNTQIQHDFLNSQNRFNSPATDVSQEAIATQPATTKAGKTRVRMKWDDEINKFIMRTYLYITKLETDKTMYCSRLFDQFKIKYPNFKVSSQRIADQRRVIVRNKLISDEQLKEIREEVTLQLQGDGYLEHENIDTESSPLNIPLDILTRETDDGDGGYNAQTQIVLTHTLQYIQSSHISTQSLEPSIIPLDHLNNYNTEDTNKESLTKKIEEELDAVLIQYTGTDPLSRPKLPRLKENKKLYELVDIFNHLLNKYCRTNNDLSQIHTLIYCSALVISRRLGYKISNESNTNNRPKPYTKKPAWLIRIDNDITKLRADIGVLTQFIQNNRTKKVIKKVDAIFKKSKIHSTYDKNNIRPEEYLDTLKQKLTVKSQRLKRFKKSLQRKSDNKVFTTNEKSFYRSLNNNNATITNSQLPTENELKNYWTNIWKKQRDHNNEAEWILDEEENTKTIEPMTFTSIVRTDIQTITKGMKNWKAAGVDHVHNFWIKKLFSLHDVLAKAITDIIIGNTEIPNFITTGITYMIPKSTKTNDPSEYRPITCLPTIYKLITSCISYKIKSHLESNTIIAEEQKGCRKNHRGCKEQLIIDSTILKHATTKHRNLNVTYIDYKKAFDSVPHSWLIYVLNLYKINPILINFLKNAMTRWKTKLHLTNGTETITTDEIKIENGIFQGDSLSPLWFCLALNPLSKLLNNSNCGYKLTPHCTINHLMYMDDIKLFAKSGKEIKKLIELTAKFSKDINMTFGLDKCKTLNLKKGKLKNSNNDETNYFQNMEENETYKYLGMQEGRTINHIQIKKDLTKEYLYRLNKICKRMLSSKNLIKAINTFAIPILTYSFGTVKWSRTDINQIEIKTRTTLTKHNYLHPKSAIERLTLKRHKGGRGLIDLRMLWEGQILNLREFFYKKALTSKIHLATIESDQNFTPLNLTDRTRKFITLQENNDTKVSNWRQKELHGRHLKDLEKTNIDDTASNQWLKLGSLFPETEGFIIAIQDQVIHTKNYKKIILKDPNVLNEKCRKCHRHSETIQHITGACPTLTQSDYTHRHNQIAHYVHQKLALKHGLLTGKLAPYYQYTPKPVLESSSCKMYFDRAILTDKTIHNNRPDITLLDKNNKEAYIIDIAVPNTHNIQKTITEKIHKYTDLKEEIARIWKLNKVYIVPLVLSSTGVIPKYLLQALKTIDLHENTYMTMQKAAILNTCRTVRKFLQEDSPNTINDSHLA

SEQ ID NO: 2311 - protein, 1329 aa, Lycaena phlaeas
MRLRSGYKLPQAGTGANSDGESDPKSTDRGSPTYSGGDTVSQSAQLKTDADHQLTPGHEKLNRRTSTRLPKIATADINNVYRPTDKIIDKPTASVSENYKQTDNADSNSVLVLSNTQIQHDFLNSQNRFNSPATDVSQEAIATQPATTKAGKTRVRMKWDDEINKFIMRTYLYITKLETDKTMYCSRLFDQFKIKYPNFKVSSQRIADQRRVIVRNKLISDEQLKEIREEVTLQLQGDGYLEHENIDTESSPLNIPLDILTRETDDGDGGYNAQTQIVLTHTLQYIQSSHISTQSLEPSIIPLDHLNNYNTEDTNKESLTKKIEEELDAVLIQYTGTDPLSRPKLPRLKENKKLYELVDIFNHLLNKYCRTNNDLSQIHTLIYCSALVISRRLGYKISNVSNTNNRPKPYKKKPAWLIRIDNGITKLRADIGVLTQFIQNNRTKKVIKKVDAIFKKRKIHSTYDKNNIRPEEYLDTLKQKLTVKSQRLKRFKKSLQRKSDNKVFTTNEKSFYRSLNNNNATITNSQLPTENELKNYWTNIWKKQRDHNNEAEWILDEEENTKTIEPMTFTSIVRTDIQTITKGMKNWKAAGVDHVHNFWIKKLFSLHDVLAKAITDIIIGNTEIPNFITTGITYMIPKSTKTNDPSEYRPITCLPTIYKLITSCISYKIKSHLESNTIIAEEQKGCRKNHRGCKEQLIIDSTILKHATTKHRNLNVTYIDYKKAFDSVPHSWLIYVLNLYKINPILINFLQNAMTRWKTKLHLTNGTETITTDEIKIENGIFQGDSLSPLWFCLALNPLSKLLNNSNCGYKLTPHCTINHLMYMDDIKLFAKSGKEIKKLIELTAKFSKDINMTFGLDKCKTLNLKKGKFKNSNNDETNYFQNMEENETYKYLGMQEGRTINHIQIKKNLTKEYLYRLNKICKRMLSSKNLIKAINTFAIPILTYSFGTVKWSRTDINQIEIKTRTTLTKHNYLHPKSAIERLTLKRHKGGRGLIDLRMLWEGQILNLREFFYKKALTSKIHLATIESDQNFTPLNLTDRTRKFITLQENNDTKVSNWRQKELHGRHLKDLEKTNIDDTASNQWLKLGSLFPETEGFIIAIQDQVIHTKNYKKIILKDPNVLNDKCRKCHRHSETIQHITGACPTLTQSDYTHRHNQIAHYVHQKLALKHGLLTGKLAPYYQYTPKPVLESSGCKMYFDRAILTDKTIHNNRPDITLLDKNNKEAYIIDIAVPNTHNIQKTITEKIHKYTDLKEEIARIWKLNKVYIVPLVLSSTGVIPKYLLQALKTIDLHENTYMTMQKAAILNTCRTVRKFLQEDSPNTINDSHLA

SEQ ID NO: 2312 - protein, 967 aa, Plutella xylostella
MPTDGVSSSLPDSGAPASQGGSTRCPHCSQPRYFRGERGLKIHIGRCHKPGSHAPPSTNPASSSPSPNFWEDLCGKKTSVPVVKRIPRGARNTVASALSSHIREVVNKNDRSSWERLLTFPYYALHVERGKEVGGSLTQKIKNNCVSGSFSPQNFNNRKFTVNKNKKPENKTKIIETKLNDGDTKGAADLLFSSDALAPDTADTYSALLSKHPPPAATSQLPDAPDGSECTPVVTSDEVLAAVLSFKNGSAGGLDSLSPQHLKDLLCGSTGAAGEALLADLTRLVGLMLSGSVCEEITDILYGANLIALIKKDGSIRPIAVGNTIRRTASKICCRKMLPELSKKFEPIQLGFGTKGGCEAAVHAARTFITEGNFQVLLKVDVKNAFNSIDRSALLTEIRTHANPIYNYLWQCYSKPSKLSYKNHHILSATGCQQGDPLGPAIFSLGIHPHISNLNSKFNVWYLDDGTLGGDATTVLQDLNSVIQNFSTIGLELNFGKCELYLNNSLSDTEKNDITNKFNVLAPNIKIVNGDDLRLLGAPILDESIPGYVQDQIKKFEESYTRMCDINPHMAMHILKFCLFVPKLTYVLRCSNLWKFPIQLSYLDEIIRRSLTEILNCRIDDRGWTQATLPVRYGGIGIRKASDVALPAFLSSVSSTRDLFGRIITPSLGDLEVPCLTEAKNAWLNAAGPGQDIPTDTTSQRLWDGPLCAKKEKDLLETATDPADRARLLASSSPQSGYWLSAYPSANLGTLLDRTTLAVAISLRLGLQTNEPHRCRCGEHADRRGHHGLSCGRSAGRIARHAALNDTIRRALASANVPATLEPSGIMRDDGKRPDGMSLVPWKRGRLLVWDATCVDTLAPSHLPSTSTEAGAAAGRAETMKGRKYASLGEGYMFVPFGVETLGPWGPEARRLLKEIGNRLKEVTRDPRAGSYLAQRISIAIQRGNAASVLGTLPDSGSDLASIFFLV

SEQ ID NO: 2313 - protein, 967 aa, Plutella xylostella
MPTDGLSSSLPDSGAPASQGGSTRCPHCSQPRYFRGERGLKIHIGRCHKPGSHAPPTTNPASSSPSPNFWEDLCRKKTYVPVVKRIPRGARNTVASALSSHIREVVNKNDRSSWERLLTFPYYALHVERGNEVGGSLTQKIKNNCVSGSCSLQNLNNRTFTVNKNKKPESNTKKIESKLNDGDTKGAADLLFSSDALAPDTEDTYSALLSKHPPPAATSRLPDAPDGSECTPVVTSDEVLAAVFSFKNGSAGGLDSLSPQHLKDLLCGSTGAAGEALLADLTRLIGLMLSGSVCEDITEILYGANLVALIKKDGGIRPIAVGNTIRRTASKICCRKMLPELSKKFEPIQLGFGTKGGCEAAVHAARTFITKGDFQVLLKVDVKNAFNSINRSALLTEIRSHANPIYKYIWQCYSKPSKLSYKNHHILSATGCQQGDPLGPAIFSLGIHPHISNLNSKFNVWYLDDGTLGGDASTVLQDLNSIIQNFSTIGLELNFGKCELHLNESLSDTEKYDIINKFNVLAPNIKIVKRDGLRLLGAPILDESIPGYVQDQINKFEESYTRMCDINPHMAMHIMKYCLFVPKLTYVLRCSNLWKFPLYLSHIDEVIKCSITEILNCRMDDRGWTQATLPVRYGGIGIRKASDVALPAFLSSVYSTRDLFGRIITPSLGDLEVPCLTEAKIAWLNAAGPGQDIPTDTTSQRLWDAPLCAKKENQLLETATDAADRARLLASSTPQSGYWLNAYPSANLGTLLDRTTLTVAISLRLGLQTNEPHRCRCGEHADRRGHHGLSCGRSAGRIARHAALNDTIRRALASANVPATLEPSGIMRDDGKRPDGMSLVPWKRGRLLVWDATCVDTLAPSHLPSTSREAGAAAGRAEMMKGRKYASLGEGYMFVPFGVETLGPWGPEARQLFKDISSRLIEVSRDPRAGSYLAQRLSIAIQRGNAASVLGTLPDSGSDLASIFFLV

SEQ ID NO: 2314 - protein, 965 aa, Plutella xylostella
MPTDGVSSSLPDSGAPASQGGSTRCPHCSQPRYFRGERGLKIHIGRCHKPGSHAPPTTNPASSSPSPNFWEDLCGKKTSVPVVKRIPRGARNTVASALSSHIREVVNKNDRSSWERLLTFPYYALHVERGKEVGGSLTQKIKNNCVSGSFSPQNFNNRIFTVNKNKKPENKTKKIETKLNDGDTKGAADLLFSSDALAPDTADTYSALLSKHPPPAATSQLPDAPDGSECTPVVTSDEVLAAVLSFKNGSAGGLDSLSPQHLKDLLCGSTGAAGEALLADLTRLVGLMLSGSVCEEITDILYGANLIALIKKDGGIRPIAVGNTIRRTASKICCRKMLPELSKKFEPIQLGFGTKGGCEAAVHAARTFITEGNFQVLLKVDVKNAFNSIDRNALLTEIRTHANPIYNYLWQCYSKPSKLSYKNHHILSATGCQQGDPLGPAIFSLGIHPHISNLNSKFNVWYLDDGTLGGDATTVLQDLNSVIPNFSTIGLELNFGKCELYLNNSLSDTEKNYITNKFNVLAPNIKIVNGDDLRLLGAPILDESIPGYVQDQIKKFEESYTRMCDINPHMAMHILKFCLFVPKLTYVLRCSNLWKFPLQLTYLDEIIRRSLTEILNCRIDDRGWTQATLPVRYGGIGIRKASDVALPAFLSSVSSTRDLFGRIITPSLGDLEVPCLTEAKNAWLNAAGPGQDIPTDTTSQRLWDGPLCAKKEKDLLETATDPADRARLLASSSPQSGYWLSAYPSANLGTLLDRTTLAISLRLGLQTNEPHRCRCGEHADRRGHHGLSCGRSAGRIARHAALNDTIRRALASANVPATLEPSGIMRDDGKRPDGMSLVPWKRGRLLVWDATCVDTLAPSHLPSTSTEAGAAAGRAETMKGRKYASLGEGYMFVPFGVETLGPWGPEARRLVKEIGSRLKEVTRDPRAGSYLAQRISIAIQRGNAASVLGTLPDSGRDLASIFFLV

SEQ ID NO: 2315 - protein, 967 aa, Plutella xylostella
MPTDGVSSSLPDSGAPASQGGSTRCPHCSQPRYFRGERGLKIHIGRCHKPGSHAPPSTNPASSSPSPNFWEDLCGKKTSVPVVKRIPRGARNTVASALSSHIREVVNKNDRSSWERLLTFPYYALHVERGKEDGGSLTQKIKNNCVSGSFSPQNFNNRKFTVNKNKKPENKTKIIETKLNDGDTKGAADLLFSSDALAPDTADTYSALLSKHPPPAATSQLPDAPDGSECTPVVTSDEVLAAVLSFKNGSAGGLDSLSPQHLKDLLCGSTGAAGEALLADLTRLVGLMLSGSVCEEITDILYGANLIALIKKDGGIRPIAVGNTIRRTASKICCRKMLPELSKKFEPIQLGFGTKGGCEAAVHAARTFITEGNFQVLLKVDVKNAFNSIDRSALLTEIRTHANPIYNYLWQCYSKPSKLSYKNHHILSATGCQQGDPLGPAIFSLGIHPHISNLNSKFNVWYLDDGTLGGDATTVLQDLNSVIQNFSTIGLELNFGKCELYLNNSLSDTEKNDITNKFNVLAPNIKIVNGDDLRLLGAPILDESIPGYVQDQIKKFEESYTRMCDINPHMAMHILKFCLFVPKLTYVLRCSNLWKFPIQLTYLDEIIRRSLTEILNCRIDDRGWTQATLPVRYGGIGIRKASDVALPAFLSSVSSTRDLFGRIITPSLGDLEVPCLTEAKNAWLNAAGPGQDIPTDTTSQRLWDGPLCAKKEKDLLETATDPADRARLLASSSPQSGYWLSAYPSANLGTLLDRTTLAVAISLRLGLQTNEPHRCRCGEHADRRGHHGLSCGRSAGRIARHAALNDTIRRALASANVPATLEPSGIMRDDGKRPDGMSLVPWKRGRLLVWDATCVDTLAPSHLPSTSTEAGAAAGRAETMKGRKYASLGEGYMFVPFGVETLGPWGPEARRLLKEIGNRLKEVTRDPRAGSYLAQRISIAIQRGNAASVLGTLPDSGSDLASIFFLV

SEQ ID NO: 2316 - protein, 967 aa, Plutella xylostella
MPTDGVSSSLPDSGAPASQGGSTRCPHCSQPRYFRGERGLKIHIGRCHKPGSHAPPTTNPASSSPSPNFWEDLCGKKTSVPVVKRIPRGARNTVASALSSHIREVVNKNDRSSWERLLTFPYYALHVERGKEVGGSLTQKIKNNCVSGSFSPQNFNNRIFTVNKNKKPENKTKKIETKLNDGDTKGAADLLFSSDALAPDTADTYSALLSKHPPPAATSQLPDAPDGSECTPVVTSDEVLAAVLSFKNGSAGGLDSLSPQHLKDLLCGSTGAAGEALLADLTRLVGLMLSGSVCEEITDILYGANLIALIKKDGGIRPIAVGNTIRRTASKICCRKMLPELSKKFEPIQLGFGTKGGCEAAVHAARTFITEGNFQVLLKVDVKNAFNSIDRNALLTEIRTHANPIYNYLWQCYSKPSKLSYKNHHILSATGCQQGDPLGPAIFSLGIHPHISNLNSKFNVWYLDDGTLGGDATTVLQDLNSVIQNFSTIGLELNFGKCELYLNNSLSDTEKNDITNKFNILAPNIKIVNGDDLRLLGAPILDESIPGYVQDQIKKFEESYTRMCDINPHMAMHILKFCLFVPKLTYVLRCSNLWKFPLQLTYLDEIIRRSLTEILNCRIDDRGWTQATLPVRYGGIGIRKASDVALPAFLSSVSSTRDLFGRIITPSLGDLEVPCLTEAKNAWLNAAGPGQDIPTDTTSQRLWDGPLCAKKEKDLLETATDPADRARLLASSSPQSGYWLSAYPSANLGTLLDRTTLAVAISLRLGLQTNEPHRCRCGEHADRRGHHGLSCGRSAGRIARHAALNDTIRRALASANVPATLEPSGIMRDDGKRPDGMSLVPWKRGRLLVWDATCVDTLAPSHLPSTSTEAGAAAGRAETMKGRKYASLGEGYMFVPFGVETLGPWGPEARRLVKEIGSRLKEVTRDPRAGSYLAQRISIAIQRGNAASVLGTLPDSGSDLASIFFLV

SEQ ID NO: 2317 - protein, 970 aa, Plutella xylostella
MPTDGVSSSLPDSGAPASQGGSTRCPHCSQPRYFRGERGLKIHIGRCHKPGSYALPTTNPASSSPSPNFWEDLCGNKTSVPVVKRIPRGARNTVASALSSHIREVVNKNDRSSWERLLTFPYYALHVERGKEVGGSLTQKIKNNCVSGSFSPQNFYNRKSTVNKNKKPENKTKKIETKLNDGDTKGAADLLFSSDALAPDTADTYSALLSKHPPPAATSQLPDARPVPDGSECTPVVTSDEVLAAVLSFKNGSAGGLDSLSPQHLKDLLCGSTGAAGEALLADLTRLVGLMLSGSVCEEITDILYGANLIALTKKDGGIRPIAVGNTIRRTASKICCRKMLPELSKKFEPIQLGFGTKGGCEAAVHAARTFITEGNFQVLLKVDVKNAFNSIDRSALLTEIRTHANPIYNYLWQCYSKPSKLSYKNHHILSATGCQQGDPLGPAIFSLGIHPHITNLNLKFNVWYLDDGTLGGDATIVLQDLNSVIQNFSTIGLELNFGKCELYLNNSLSDTEKNDITNKFNVLAPNIKIVNGDDLRLLGAPTLDESIPGYVQDQIKKFEESYTRMCDINPHMAMHILKFCLFVPKLTYVLRCSNLWKFPLQLTYLDEIIRRSLTEILNCRIDDRGWTQATLPVRYGGIGIRKASDVALPAFLSSVSSTRDLFGRIITPSLGDLEVPCLTEAKNAWLNAAGPGQDIPTDTTSQRLWDGPLCAKKEKDLLETATDPADRARLLASSSPQSGYWLSAYPSANLGTLLDRTTLAVAISLRLGLQTNEPHRCRCGEHADRRGHHGLSCGRRAGRIARHAALNDTIRRALASANVPATLEPSGIMRDDGKRPDGMSLVPWKRGRLLVWDATCVDTLAPSHLPSTSTEAGAAAGRAETMKGRKYASLGEGYMFVPFGVETLGPWGPEARRLLKEIGSRLKEVTRDPRAGSYLAQRISIAIQRGNAASVLGTLPDSGSDLASIFFLV

SEQ ID NO: 2318 - protein, 680 aa, Plutella xylostella
MLSGSVCEEITDILYGANLIALIKKDGGIRPIAVGNTIRRTASKICCRKMLPELSKKFEPIQLGFGTKGGCEAAVHAARTFITEGNFQVLLKVDVKNAFNSIDRSALLTEIRTHANPIYNYLWQCYSKPSKLSYKNHHILSATGCQQGDPLGPAIFSLGIHPHISNLNSKFNVWYLDDGTLGGDATTVLQDLNSVIQNFSTIGLELNFGKCELYLNNSLSDTEKNDITNKFNVLAPNIKIVNGDDLRLLGAPILDESIPSYVQDQIKKFEESYTRMCDINPHMAMHILKFCLFVPKLTYVLRCSNLWKFPLQLTYLDEIIRRSLTEILNCRIDDRGWTQATLPVRYGGIGIRKASDVALPAFLSSVSSTRDLFGRIITPSLGDLEVPCLTEAKNAWLNAAGPGQDIPTDTTSQRLWDGPLCAKKEKDLLETATDPADRARLLASSSPQSGYWLSAYPSANLGTLLDRTTLAVAISLRLGLQTNEPHRCRCGEHADRRGHHGLSCGRSAGRIARHAALNDTIRRALASANVPATLEPSGIMRDDGKRPDGMSLVPWKRGRLLVWDATCVDTLAPSHLPSTSTEAGAAAGRAETMKGRKYASLGEGYMFVPFGVETLGPWGPEARRLLKEIGSRLKEVTRDPRAGSYLAQRISIAIQRGNAASVLGTLPDSGSDLASIFFLV

SEQ ID NO: 2319 - protein, 959 aa, Plutella xylostella
MSQSVAGPSHGGYRSSSHDYMRCPLCPQDCNARYKGQRGVNIHIGKTHPKNPPSQPLTPPSTNTTTPSDEPLHEQLINLKKRHPVVKRIPRGARLSVANKLSSVLRLVIDENTIDSWKSLFFFTYQTLHIDETTRRHTSLTQAIKDNCSNPPSETNQTLFSYHPKEKYKIIETKISDGDIKGATQLMFSNDSVAPDTPETLQGLQSKHPPQPPSAQLPDAPASDSAPLQVLGTDVYGAIMSFRCGSTGGLDGLSPQHLKDLLASTGQAGETLLSNLTALINLMLAGKVNTLIAPLMYGARLCALNKKDGGIRPIAVGSTLRRIASKVCCRQILPKLSTYLQPLQLGFGSKGGCEAAVHALRTYIEHDGGEVVLKVDIKNAFNSIDRGTFLTEIKELTPEIYPYLWQCYSSPSNLIYNSNLIHSEVGCQQGDPLGPAIFSLAIHKTISSLKSKLNMWYLDDGTLGGESDTVLDDLRTLTDNMREIGLELNSSKCEIFIPSHISEARKSIIIQRFNSLAPNIKILDETSLRLLGAPIHEQSINNFISEKMNSFTNKIPHLLKISKHMAFQIIRYSLFVPNFTYILRCSPIFKNKTILSDIDNLIQNSLSKILNLPFRDRDWLQASLPIRFGGIGVRKVSDVALPAFLSSTHSTLALYNKIIHPSLGVSEVSCCGEAKEAWQSICPGEALPENPHSQRLWDEPKCLSTGRHLLETSPNNTERARLLATAERESGLWLHALPSPNVGTFLDDRSFQTAIGLRLGMKIVQPHHCPCGAEVSQLGHHGLSCRRSAGRLSRHAALNDILRRALVSVNTPAVLEPAGVIRDDGKRPDGMSLIPWAHGRPLVWDATCVDTLAASHVPHTSRAAGAAAGTAENLKREKYRSLDSTYLFLPFGVETMGPWGPDAKSLVREISSRLADVSGDKRAGAYLRQRLSLAIQRGNVASVLGTLPQGPGLEGLFYI

SEQ ID NO: 2320 - protein, 960 aa, Plutella xylostella
MSQSVAGPSHGGYRSSSHDYMRCPLCPQDCNARYKGQRGVNIHIGKTHPKNPPSQPVTPPSNANTTTPSDEPLHEQLINLKKRHPVVKRIPRGARLSVANKLSSVLRLVIDENSIDSWKSLFFFTYQTLHIDETTRRHTSLTQAIKDNCSNPPSETNQTKFSYHPKEKYKIIETKISDGDIKGATQLMFSNDSVAPDTPETLQGLQSKHPPQPPSAQLPDAPASDSAPLQVLGTDVYGAIMSFRCGSAGGLDGLSPQHLKDLLASTGQAGETLLSNLTALINLMLAGKVNTLIAPLMYGARLCALNKKDGGIRPIAVGSTLRRIASKVCCRQILPKLSTYLQPLQLGFGSKGGCEAAVHALRTYIEHDGGEVVLKVDIKNAFNSIDRGTFLTEIKELTPEIYPYLWQCYSSPSNLIYNSNLIHSEVGCQQGDPLGPAIFSLAIHKTISSLKSKLNMWYLDDGTLGGESDTVLDDLRTLTDNMREIGLELNSSKCEIFIPSHISEARKSIIIQRFNSLAPNIKILDETSLRLLGAPIHEQSINNFISEKINSFTNKIPHLLKISKHMAFQIIRYSLFVPNFTYILRCSPIFKNKTILSDIDNLIQNSLSKILNLPFRDRDWLQASLPIRFGGIGVRKVSDVALPAFLSSTHITLALYNKIIHPSLGVSEVSCCGEAKEAWQSICPGEALPENPHSQRLWDEPKCLSTGRHLLETSPNNTERARLLATAERESGLWLHALPSPKVGTFLDDRSFQTAIGLRLGMKIVQPHHCPCGAEVNQLGHHGLSCRRSAGRLSRHAALNDILRRALVSVNTPAVLEPAGVIRDDGKRPDGMSLIPWANGRSLVWDATCVDTLAASHVPHTSRAAGAAAGTAENLKREKYRSLDSTYLFLPFGVETMGPWGPDAKSLVKEISSRLADVSGDKRAGAYLRQRLSLAIQRGNVASVLGTLPQGPGLEGLFYI

SEQ ID NO: 2321 - protein, 960 aa, Plutella xylostella
MSQSVAGPSHGGYRSSSHDYMRCPLCPQDCNARYKGQRGVNIHIGKTHPKNPPSQPLTPPSNANTTTPSDEPLHEQLINFKKRHPVVKRIPRGARLSVANKLSSVLRLVIDENTIDSWKSLFFFTYQTLHIDETTRRHTSLTQAIKDNCSNPPSETNQTLFSYHPKEKYKIIETKISDGDIKGATQLMFSNDSVAPDTPETLQGLQSKHPPQPPSAQLPDAPASDSAPLQVLGTDVYGAIMSFRCGSTGGLDGLSPQHLKDLLASTGQAGETLLSNLTALINLMLAGKVNRLIAPLMYGARLCALNKKDGGIRPIAVGSTLRRIASKVCCRQILPKLSTYLQPLQLGFGSKGGCEAAVHALRTYIEHDGGEVVLKVDIKNAFNSIDRGTFLTEIKELKPEIYPYLWQCYSSRSNLIYNSNLIHSEVGCQQGDPLGPAIFSLAIHKTISSLKSKLNMWYLDDGTLGGESDTVLDDLRTLTDNMREIGLELNSSKCEIFIPSHISEARKSIIIQRFNSLAPNIKILDETSLRLLGAPIHEQSINNFISEKINSFTNKIPHLLKISKHMAFQIIRYSLFVPNFTYILRCSPIFKNKTILSDIDNLIQNSLSKILNLPFRDRDWLQASLPIRFGGIGVRKVSDVALPAFLSSTHSTLALYNKIIHPSLAVSEVSCCGEAKEAWQSICPGEALPENPHSQRLWDEPKCLSTGRHLLETSPNNTERARLLATAELESGLWLHALPSPNVGTFLDDRSFQTAIGLRLGMKIVQPHHCPCGAEVSQLGHHGLSCRRSAGRLSRHAALNDILRRALVSVNTPAVLEPAGVIRDDGKRPDGMSLIPWAHGRPLVWDATCVDTLAASHVPHTSRAAGAVAGTAENLKREKYRSLDSTYLFLPFGVETMGPWGPDAKSLVKEISSRLADVSGDKRSGAYLRQRLSLAIQRGNVASVLGTLPQGPGLEGLFYI

SEQ ID NO: 2322 - protein, 940 aa, Plutella xylostella
MRCPLCPQDCNARYKGQRGVNIHIGKTHPRNPPSQPLTPPSNANTTTPSDEPLHEQLINLKKRHPVVKRIPRGARLSVANKLSSVLRLVIDENTIDSWKSLFFFTYQTLHIDETTRRHTSLTQAIKDNCSNPPSETNQTLFSYHPKEKYKIIETKISDGDIKGATQLMFSNDSVAPDTPETLQGLQSKHPPQPPSAQLPDAPASDSAPLQVLGTDVYGAIMSFRCGSTGGLDGLSPQHLKDLLASTGQAGETLLSNLTALINLMLAGKVNTLIAPLMYGARLCALNKKDGGIRPIAVGSTLRRIASKVCCRQILPKLSTYLQPLQLGFGSKGGCEAAVHALRTYIEHDGGEVVLKVDIKNAFNSIDRGTFLTEIKELTPEIYPYLWQCYSSPSNLIYNSNLIHSEVGCQQGDPLGPAIFSLAIHKTISSLKSKLNMWYLDDGTLGGESDTVLDDLRTLTDNMREIGLELNSSKCEIFIPSHISEARKSIIIQRFNSLAPNIKILDETSLRLLGAPIHEQSINNFISEKMNSFTNKIPHLLKISKHMAFQIIRYSLFVPNFTYILRCSPIFKNKTILSDIDNLIQNSLSKILNLPFRDRDWLQASLPIRFGGIGVRKVSDVALPAFLSSTHSTLTLYNKIIHPSLGVSEVSCCGEAKEAWQSICPGEALPENPHSQRLWDEPKCLSTGRHLLETSPNNTERARLLATAERESGLWLHALPSPNVGTFLDDRSFQTAIGLRLGMKIVQPHHCPCGAEVSQLGHHGLSCRRSAGRLSRHAALNDILRRALVSVNTPAVLEPAGVIRDDGKRPDGMSLIPWAHGRPLVWDATCVDTLAASHVPHTSRAAGAAAGTAENLKREKYRSLDSTYLFLPFGVETMGPWGPDAKSLVKEISSRLADVSGDKRAGAYLRQRLSLAIQRGNVASVLGTLPQGPGLEGLFYI

SEQ ID NO: 2323 - protein, 960 aa, Plutella xylostella
MSQSVAGPSHGGYRSSSHDYMRCPLCPQDCNTRYKGQRGVNIHIGKTHPKNPPSQPPTPPSNANTTTPSDEPLHEQLINLKKRHPVVKRIPRGARLSVANKLSSVLRLVIDENSIDSWKSLFFFTYQTLHIDETTRRHTSLTQAIKDNCSNPPSETNQTIFSYHPKEKYKIIETKISDGDIKGATQLMFSNDSVAPDTPETLQGLQSKHPPQLPSAQLPGAPASDSAPLQVLGTDVYGAIMSFRCGCAGGLDGLSPQHLKDLLASTGQAGETLLSNLTALINLMLAGKVNTLIAPLMYGARLCALNKKDGGIRPIAVGSTLRRIASKVCCRQILPKLSTYLQPLQLGFGSKGGCEAAVHALWTYIEHDGGEVVLKVDIKNAFNSIDRGTFLTEIKELTPEIYPYLWQCYSSPSNLIYNSNLIHSEVGCQQGDPLGPAIFSLAIHKTISSLKSKLNMWYLDDGTLGGESDTVLDDLRTLTDNMREIGLELNSSKCEIFIPSHISEARKPIIIQRFNSLAPNIKILDETSLRLLGAPIHEQSINNFISEKMNSFTNKIPHLLKISKHMAFQIIRYSLFVPNFTYILRCSPIFKNKTILSDIDNLIQNSLSKILNLPFRDRDWLQASLPIRFGGIGVRKVSDVALPAFLSSTHSTLALYNKIIHPSLGVSEVSCCGEAKEAWQSICPGEALPENPHSQRLWDEPKCLSTGRHLLETSPNNTERARLLATAERESGLWLHALPSPKVGTFLDDRSFQTAIGLRLGMKIVQPHHCPCGAEVNQLGHHGLSCRRSAGRLSRHAALNDILRRALVSVNTPAVLEPAGVIRDDGKRPDGMSLIPWAHGRSLVWDATCVDTLAASHVPHTSRAAGAAAGTAENLKREKYRSLDSTYLFLPFGVETMGPWGPDAKSLVKEISSRLADVSGDKRAGAYLRQRLSLAIQRGNVASVLGTLPQGPGLEGLFYI

SEQ ID NO: 2324 - protein, 960 aa, Plutella xylostella
MSQSVAGPSHGGYRSSSHDYMRCPLCPQDCNARYKGQRGVNIHIGKTHPKNPPSQPLTPPSNANTTTPSDEPLHEQLINFKKRHPVVKRIPRGARLSVANKLSSVLRLVIDENTIDSWKSLFFFTYQTLHIDENTRRHTSLTQAIKDNCSNPPSETNQTLFSYHPKEKYKIIETKISDGDIKGATQLMFSNDSVAPDTPETLQGLQSKHPPQPPSAQLPDAPASDTAPLQVLGTDVYGAIMSFRCGSTGGLDGLSPQHLKDLLASTGQAGETLLSNLTALINLMLAGKVNTLIAPLMYGARLCALNKKDGGIRPIAVGSTLRRIASKVCCRQILPKLSTYLQPLQLGFGSKGGCEAAVHALRTYIEHDGGEVVLKVDIKNAFNSIDRGTFLTEIKELTPEIYPYLWQCYSSPSNLIYNSNLIHSEVGCQQGDPLGPAIFSLAIHKTISSLKSKLNMWYLDDGTLGGESDTVLDDLRTLTDNMREIGLELNSSKCEIFIPSHISEARKSIIIQRFNSLAPNIKILDETSLRLLGAPIHEQSINNFISEKMNSFTNKIPHLLKISKHMAFQIIRYSLFVPNFTYILRCSPIFKNKTILSDIDNLIQNSLSKILNLPFRDRDWLQASLPIRFGGIGVRKVSDVALPAFLSSTHSTLALYNKIIHPSLGVSEVSCCGEAKEAWQSICPGEALPENPHSQRLWDEPKCLSTGRHLLETSPNNTERARLLATAERESGLWLHALPSPNVGTFLDDRSFQTAIGLRLGMKIVEPHHCPCGAEVSQLGHHGLSCRRSAGRLSRHAALNDILRRALVSVNTPAVLEPAGVIRDDGKRPDGMSLIPWAHGRPLVWDATCVDTLAASHVPHTSRAAGAAAGTAENLKREKYRSLDSTYLFLPFGVETMGPWGPDAKSLVKEISSRLADVSGDKRAGAYLRQRLSLAIQRGNVASVLGTLPQGPGLEGLFYI

SEQ ID NO: 2325 - protein, 960 aa, Plutella xylostella
MSQSVAGPSRGGYRSSSHDYMRCPLCPQDCNARYKGQRGVNIHIGKTHPKNPPSQPLTPPSNANTTTPSDEPLHEQLINFKKRHPVVKRIPRGARLSVANKLSSVLRLVIDENTIDSWKSLFFFTYQTLHIDETTRRHTSLTQAIKDNCSNPPSETNQTLFSYHPKEKYKIIETKISDGDIKGATQLMFSNDSVAPDTPETLQGLQSKHPPQPPSAQLPDAPASDSAPLQVLGTDVYGAIMSFRCGSTGGLDGLSPQHLKDLLASTGQAGETLLSNLTALINLMLAGKVNTLIAPLMYGARLCALNKKDGGIRPIAVGSTLRRIASKVCCRQILPKLSTYLQPLQLGFGSKGGCEAAVHALRTYIEHDGGEVVLKVDIKNAFNSIDRGTFLTEIKELTPEIYPYLWQCYSSPSNLIYNSNLIHSEVGCQQGDPLGPAIFSLAIHKTISSLKSKLNMWYLDDGTLGGESDTVLDDLRTLTDNMREIGLELNSSKCEIFIPSHISEARKSIIIQRFNSLAPNIKILDETSLRLLGAPIHEQSINNFISEKMNSFTNKIPHLLKISKHMAFQIIRYSLFVPNFTYILRCSPIFKNKTILSDIDNLIQNSLSKILNLPFRDRDWLQASLPIRFGGIGVRKVSDVALPAFLSSTHSTLALYNKIIHPSLGVSEVSCCGEAKEAWQSICPGEALPENPHLQRLWDEPKCLSTGRHLLETSPNNTERARLLATAERESGLWLHALPSPNVGTFLDDRSFQTAIGLRLGMKIVQPHHCPCGAEVSQLGHHGLSCRRSAGRLSRHAALNDILRRALVSVNTPAVLEPAGVIRDDGKRPDGMSLIPWAHGRPLVWDATCVDTLAASHVPHTSRAAGAAAGTAENLKREKYRSLDSTYLFLPFGVETMGPWGPDAKSLVKEISSRLADVSGDKRAGAYLRQRLSLAIQRGNVASVLGTLPQGPGLEGLFYI

SEQ ID NO: 2326 - protein, 960 aa, Plutella xylostella
MSQSVAGPSYGGYRSSSHDYMRCPLCPQDCNARYKGQRGVNIHIGKTHPKNPPSQPLTPPSNANTTTPSDEPLHEQLINLKKRHPVVKRIPRGARLSVANKLSSVLRLVIDENTIDSWKSLFFFTYQTLHIDETTRRHTSLTQAIKDNCSNPPSETNQTLFSYHPKEKYKIIETKISDGDIKGATQLMFSNDSVAPDTPETLQGLQSKHPPQPPSAQLPDAPASDSAPLQVLGTDVYGAIMSFRCGSTGGLDGLSPQHLKDLLASTGQAGETLLSNLTALINLMLAGKVNTLIAPLMYGARLCALNKKDGGIRPIAVGSTLRRIASKVCCRQILPKLSTYLQPLQLGFGSKGGCEAAVHALRTYIEHDGGEVVLKVDIKNAFNSIDRGTFLTEIKELTPEIYPYLWQCYSSPSNLIYNSNLIHSEVGCQQGDPLGPAIFSLAIHKTISSLKSKLNMWYLDDGTLGGESDTVLDDLRTLTDNMRKIGLELNSSKCEIFIPSHISEARKSIIIQRFNSLAPNIKILDETSLRLLGAPIHEQSINNFISEKMNSFTNKIPHLLKISKHMAFQIIRYSLFVPNFTYILRCSPIFKNKTILSDIDNLIQNSLSKILNLPFRDRDWLQASLPIRFGGIGVRKVSDVALPAFLSSTHSTLALYNKIIHPSLGVSEVSCCGEAKEAWQSICPGEALPENPHSQRLWDEPKCLSTGRHLLETSPNNTERARLLATAERESGLWLHALPSPNVGTFLDDRSFQTAIGLRLGMKIVQPHHCPCGAEVSQLGHHGLSCRRSAGRLSRHAALNDILRRALVSVNTPAVLEPAGVIRDDGKRPDGMSLIPWAHGRPLVWDATCVDTLAASHVPHTSRAAGAAAGTAENLKREKYRSLDSTYLFLPFGVETMGPWGPDAKSLVKEISSRLADVSGDKRAGAYLRQRLSLAIQRGNVASVLGTLPQGPGLEGLFYI

SEQ ID NO: 2327 - protein, 1282 aa, Synergus gifuensis
MSEEAEAVVLTWTWPEPEQFRCAYCDPAEVGRQLKTGRRTGIFKKFEDYSKHLKLYHTGYRFENKFVCSLCDFVGTGTYKRKSVSMHFKKMHQNANAPPASGRPAPARPSQARPRGTPPNIAPPENTVATPPSDLSMNDRVVMRPRRRRIFHFSPEENSDVHLSTTPRASRAHSTPPEESSTCSRRTMRARRRTLLSDNVSEDASEAEAAPPPHPTADASPANSPPASLPMPPSPGQTTMNGEQPPSNVEGVVVVEPEGVVPVDTPEGIFGESPSSAAWPRLDDAFHPAMDDDSIVESTPPVATLSAVPGTRLGASPRNRDVDSVNILSNVSITVENNNIIIAPPRETIGPDGSDIERERARVTAESAAIETLERLNEAADSFVSFVARFFLRAAERDSDTRRKARRHDNRVLTETEAATRIQRLYRQNKRRAMQEVLAGPSETCKISLDRVENYFKEVYAVNNSVNLHDLPADYDLDPPDELSNEALLEVISPQDVTRKISSMKNTAPGPDEIVYGTLLGADPAGTILANLYSACLRLHTIPQCWRESLTILVHKKGDPAQIRNWRPLTMTNTAYKIFAAIISDRVTNWALLNGRLSWEQKGFLPHEGCYEHNFVLQEAIQLARGKRRNLVVAWLDLANAFPSVPHASIRHALSVLGMPPSVVDLVLNMLSGCSTRVRTDGGCTGNLSMGAGVKQGCPLSPITFNLVFELVLRGIGKRGAGFNVRGKLVDLLAYADDLTALTSNQKDMQDMLDAASELCGKIGLKFNPAKCAALSLERGKVVESRFAINGEIIKSLKEEEIYEHLGVPTGAKFIQNPIDSLERAIIDVEAIHASLLAPWQKLEATSVFVLSRLDFILRGGRVNKTSLAQLDRTVKKYAKLWMSLPQRASAEIIHIPPSKGGAGLLPIGDLLDIYSIAHIFRMLTTQDQVVRDIAHASLGEAVRGRLKREPTKAEVAQYLSGDYTGVFFGPSSTGASLWSYARNAARRQRGRLGVRWRWCEERGELAVECRGRGADPVIVPPKARSQIIYRLRVSIQEHYLASLLGKKDQGKVYKLASADRASNHFLRNGGFTRFADWRFVHRARLDVLPLNGAIRWDNQRDKRCRRCGYDGETLPHVLNNCKPHMVAVTRRHDAIVARIAKACKLPGEVSLNKSVPGADAGPSPLRPDIVIRDERTMNATIIDVAVPFENGPDAFRVAREHKLQKYRPIVDSLQELGYRVHLKAFILGALGTWDRENQTVIKHLRIGHRYAGLMKKLMVSDTIRWSRDIYVEHVSGQRQYA

SEQ ID NO: 2328 - protein, 1345 aa, Leptinotarsa juncta
MKKTAGLNQVTPLSSRETTMRASTLARTTPDQLPAVRANSGGKLPRSSGSRTTPGSGPDLLRSEQNTRKAVTVTQTGGQGSLRAPLEPHQCDKCGQISGSQRALLRHKQTCGIRDRQHCIYCGKYYETFGGVRLHERRAHPEEYHQELQVRIPEEESAIMRRLAAIEANTPPGRPFITYMETATKLTKDQIRHKRCKPLYATLLAEARDSARRNSLTGLLAGNRNSCNNDEKAKSPTAQVNAVLTPTTSEEARTPTAEQGAVEQDTEGELLHHVSQTDITTGPDRVDENDTSGAEGIGLETTTYATPTASTLLDDTTASDGLLFQTPVAASPVQAPSPFLITSKRPVIHTSQVAGPSNMELVGTLPPTTSMGSAVDPPPCGSETESRKRSRSVITPSPPEIQEARRPRIERPTMVIASGKPTDNTRPTESRPRLAESIPNSMQLSPRVYTNAAPSPVVIPPELKTFLLRLQNELEEELDGQVDEYNYLQLTEAGLTMSDAKLTRFLTEWIGVTFNSTAGRAKKTRGAPSQSTQAGAGSQGQTHPASRKGRPAKTYSQKYTGSGPRAANFKKAQDLYSKNKKALVDRILSGKAFDQAEVYPNVRDVETLFGGILESESPIDDEVITDRKPPIRSTFSPITAEDVDKAKANWPTSAPGLDGISVDRVRRLPSRLLSIFFTIIFMRNIQLPAFSKMRTTLVFKEGSPADPSNWRPITVGSALQRLMHRALSNRLKTATSLNTNQRGFTDVDGTLANSMILDTYIRERRGARKGYCVVSLDIRKAFDTVSHNSVVRALERLGIDPRTVQYISNLLATSTTTIKSGGDHTRELHVRRGVKQGDPLSPFLFNVVLDELIEKLNSRDHGGALIAEGVRVSAMAFADDLVLLEDEAPNIHPTLAMVTDFFTRRGMEVNARKSSIVTGQVVGGAVTCRTKSDLRIGGQVIPSVSEMSSFKYLGHQVSGSGLLKPSLVNLPVWLGNLKAAPLKPDQKLTVLKDFVVPRLLYGLQNPRVTARILRAADRLIKNCTKTCLHLNEHTPDPALYAKIRDGGLGLLELRHAIPNMFAKRLRSLLERPDDPALSATLQKEAVTSLISRLVSLGGDIPLDQLWRDKLKAAPTIAGLEQSADDPASRSWLQNKPQGWSGRDFVRAVQLRTNNLPTKGMPHIPLGERKCRAGCEKVESLSHVLQQCPAVHWERIRRHNEVAKKIADYCRRKNWGVEEEPHIRHDDGTLYKPDVVVHRETCVVVADVGINWEGNLSLDATYAAKKAVYDHPKFLEAAKKRWPGKEIAILPVILGARGVWPRSNNTVGEMLQFSRGLKSSCVHSVLKWGSTIHAEFGKKVWRDRRR

SEQ ID NO: 2329 - protein, 968 aa, Tuta absoluta
MSLPNPSDPILSAGLGTLSYDNGYVRCNKCDCPRLFRGRRGLRIHEGIMHRSDNPSNSTSGRNTVRAAVMSPSASLEPIPFTKRLGSCKQGLPIVKRIPRGARITVANALSKCIDRVVSENTLSSWEHLLLFAYRTLHVDARVDEGVSLTEKIKINCNAVADVTVPASRFFQQYSVVKRVESKVNDGDLKGAAKLIFSNDSLAPNDVVTLDALKLKHPVPSFTPILPDPPSLIDLTPQVSTEDVQDVLMTFKPGSASGLDGLSPQHLKDLVCGVTGNAGRALLVSLTSLTNLMLAGKVPEDIAPVLYGANLCALKKKDGGVRPIAVGCVFRRLVSKVCCRIISPGLQSIFQPRQLGFGTKGGCEAAVHATRTFLNQPGSDVLLKVDVMNAFNTVDRGVLLTEVKENIPAVYPYMRQCYSRPSKLIYKDHELSSSTGCQQGDPLGPAIFSLAIHPIISKLRSTLNVWYLDDGTLGGDPATVLDDLRSLNAAFTCIGLKLNLSKCELFVNPTMSPGSKESIIREFINLAPDLKIVEADTLSILGAPIFDSAIPLYVAEQIQKFQESSERLFKINAHMALFIVRYCLFVPKFTYVLRSSCFWRHRDSLVRLDNIVKNALVEILNCSLDGFAWDQATLPVRFGGLGVRRPSDVALPAFLSSAHASSFISGILIGPTVGAGEVSGLTDAKDMWTLRSQKSLPSALYSQRKWDEPLCECIQKDILSSCSDASNRARFLAVSEWESGLWLQAYPSSNIGTLLDKTTLSLAVSLRLGVKTNEPHRCRCGEWVNELGHHGLSCQLSAGRISRHGSINDVIRRAIVSAGVPAVLEPSGICRSDGRRPDGMSLIPWKQGRVLVWDATCVDSLAPSHLPGTTARAGAAARSAETLKMRKYADLGGTYIFLPFAVETLGPWGPEAKLFLSDITSRLIEATSDPRAGSYFAQRVSLAIQRGNAASLLGTLPQCGALEEVFNL

SEQ ID NO: 2330 - protein, 968 aa, Tuta absoluta
MSLPNPSDPILSAGLGTLSCDNGYVRCNKCDCPRLFRGRRGLRIHEGIMHRSDNPSNSTSGRNTVRAAVMSPTASLEPIPFTKRLGSCKQGLPIVKRIPRGARITVANALSKCIDRVVSENTLSSWEHLLLFAYRTLHVDARVDEGVSLTEKIKINCNAVADVTVPASRFFQQYSVVKRVESKVNDGDLKGAAKLIFSNDSLAPNDVVTLDALKLKHPVPFFTPILPDPPSLIDLTPQVSTEDVQDVLMTFKPGSASGLDGLLPQHLKDLVCGVTGNAGRALLVSLTSLTNLMLAGKVPEDIAPVLYGANLCALKKKDGGVRPIAVGCVFRRLVSKVCCRIISPGLQSIFQPRQLGFGTKGGCEAAVHATRTFLNQPGSDVLLKVDVMNAFNTVDRGVLLTEVKENIPAVYPYMRQCYSRPSKLIYKDHELSSSTGCQQGDPLGPAIFSLAIHPIISKLRSTLNVWYLDDGTLGGDPATVLDDLRSLNAAFTCIGLKLNLSKCELFVNPTMSPGSKESIIREFINLAPDLKIVEADTLSILGAPIFDSAIPLYVAEQIQKFQESSERLFKINAHMALFIVRYCLFVPKFTYVLRSSCFWRHRDSLVRLDNIVKNALVEILNCSLDGFAWDQATLPVRFGGLGVRRPSDVALPAFLSSAHASSFISGILIGPTVGAGEVSGLTDAKDMWTLRSQKSLPSALYSQRKWDEPLCECIQKDILSSCSDASNRARFLAVSEWESGLWLQAYPSSNIGTLLDKTTLSLAVSLRLGVKTNEPHRCRCGEWVNELGHHGLSCQLSAGRISRHGSINDVIRRAIVSAGVPAVLEPSGICRSDGRRPDGMSLIPWKQGRVLVWDATCVDSLAPSHLPGTTARAGAAARSAETLKMRKYADLGGTYIFLPFAVETLGPWGPEAKLFLSDITTRLIETTSDPRAGSYFAQRVSLAIQRGNAASLLGTLPQCGALEEVFNL

SEQ ID NO: 2331 - protein, 968 aa, Tuta absoluta
MSLPNPSDPILSAGLGTLSYVNGYVRCNKCDCPRLFRGRRGLRIHEGIMHRSDNPSNSTSGRNTVRAAVMSPSASLEPIPFTKRLGSCKQGLPIVKRIPRGARITVANALSKCIDRVVSENTLSSWEHLLLFAYRTLHVDARVDEGVSLTEKIKINCNAVADVTVPASRFFQQYSVVKRVESKVNDGDLKGAAKLIFSNDSLAPNDVVTLDALKLKHPVPSFTPILPDPPSLIDLTPQVSTEDVQDVLMTFKPGSASGLDGLSPQHLKDLVCGVTGNAGRALLVSLTSLTNLMLAGKVPEDIAPVLYGANLCALKKKDGGVRPIAVGCVFRRLVSKVCCRIISPGLQSIFQPRQLGFGTKGGCEAVVHATRTFLNQPGSDVLLKVDVMNAFNTVDRGVLLTEVKENIPAVYPYMWQCYSRPSKLIYKDHELSSSTGCQQGDPLGPAIFSLAIHPIISKLRSTLNVWYLDDGTLGGDPATVLDDLRSLNAAFTCIGLKLNLSKCELFVNPTMSPGSKESIIREFINLAPDLKIVEADTLSILGAPIFDSAIPLYVAEQIQKFQESSERLFKINAHMALFIVRYCLFVPKFTYVLRSSCFWRHRDSLVRLDNIVKNALVEILNCSLDGFAWDQATLPVRFGGLGVRRPSDVALPAFLSSAHASSFISGILIGPTVGAGEVSGLTDAKDMWTLRSQKSLPSALYSQRKWDEPLCECIQKDILSSCSDASNRARFLAVSEWESGLWLQAYPSSNIGTLLDKTTLSLAVSLRLGVKTNEPHRCRCGEWVNELGHHGLSCQLSAGRISRHGSINDVIRRAIVSAGVPAVLEPSGICRSDGRRPDGMSLIPWKQGRVLVWDATCVDSLAPSHLPGTTARAGAAARSAETLKMRKYADLGGTYIFLPFAVETLGPWGPEAKLFLSDITSRLIEATSDPRAGSYFAQRVSLAIQRGNAASLLGTLPQCGALEEVFNL

SEQ ID NO: 2332 - protein, 968 aa, Tuta absoluta
MSLPNPSDPILSAGLGTLSYDNGYVRCNKCDCPRLFRGRRGLRIHEGIMHRSDNPSNSISGRNTVRAAVMSPSASLEPIPFTKRLGSCKQGLPIVKRIPRGARITVANALSKCIDRVVSENTLSSWEHLLLFAYRTLHVDARVDEGVSLTEKIKINCNAVADVTVPASRFFQQYSVVKRVESKVNDGDLKGAAKLIFSNDSLAPNDVVTLDALKLKHPVPSFTPILPDPPSLIDLTPQVSTEDVQDVLMTFKPGSASGLDGLSPQHLKDLVCGVTGNAGRALLVSLTSLTNLMLAGKVPEDIAPFLYGANLCALKKKDGGVRPIAVGCVFRRLVSKVCCRIISPGLQSIFQPRQLGFGTKGGCEAAVHATRTFLNQPGSDVLLKVDVMNAFNTVDRGVLLTEVKENIPAVYPYMRQCYSRPSKLIYKDHELSSSTGCQQGDPLGPAIFSLAIHPIISKLRSTLNVWYLDDGTLGGDPATVLDDLRSLNAAFTCIGLKLNLSKCELFVNPTMSPGSKESIIREFINLAPDLKIVEADTLSILGAPIFDSAIPLYVAEQIQKFQESSERLFKINAHMALFIVRYCLFVPKFTYVLRSSCFWRHRDSLVRLDNIVKNALVEILNCSLDGFAWDQATLPVRFGGLGVRRPSDVALPAFLSSAHASSFISGILIGPTVGAGEVSGLTDAKDMWTLRSQKSLPSALYSQRKWDEPLCECIQKDILSSCSDASNRARFLAVSEWESGLWLQAYPSSNIGTLLDKTTLSLAVSLRLGVKTNEPHRCRCGEWVNELGHHGLSCQLSAGRISRHGSINDVIRRAIVSAGVPAVLEPSGICRSDGRRPDGMSLIPWKQGRVLVWDATCVDSLAPSHLPGTTARAGAAARSAETLKMRKYADLGGTYIFLPFAVETLGPWGPEAKLFLSDITSRLIEATSDPRAGSYFAQRVSLAIQRGNAASLLGTLPQCGALEEVFNL

SEQ ID NO: 2333 - protein, 968 aa, Tuta absoluta
MSLPKPSDPILSAGLGTLSYDNGYVRCNKCDCPRLFRGRRGLRIHEGIMHRSDNPSNSTSGRNTVRAAVMSPSASLEPIPFTKRLGSCKQGLPIVKRIPRGARITVANALSKCIDRVVSENTLSSWEHLLLFAYRTLHVDARVDEGVSLTEKIKINCNAVADVTVPASRFFQQYSVVKRVESKVNDGDLKGAAKLIFSNDSLAPNDVVTLDALKLKHPVPSFTPILPDPPSLIDLTPQVSTEDVQDVLMTFKPGSASGLDGLSPQHLKDLVCGVTGNAGRALLVSLTSLTNLMLAGKVPEDIAPVLYGANLCALKKKDGGVRPIAVGCVFRRLVSKVCCRIISPGLQSIFQPRQLGFGTKGGCEAAVHATRTFLNQPGSDVLLKVDVMNAFNTVDRGVLLTEVKENIPAVYPYMRQCYSRPSKLIYKDHELSSSTGCQQGDPLGPAIFSLAIHPIISKLRSTLNVWYLDDGTLGGDPATVLDDLRSLNAAFTCIGLKLNLSKCELFVNPTMSPGSKESIIREFINLAPDLKIVEADTLSILGAPIFDSAIPLYVAEQIQKFQESSERLFKINAHMALFIVRYCLFVPKFTYVLRSSCFWRHRDSLVRLDNIVKNALVEILNCSLDGFAWDQATLPVRFGGLGVRRPSDVALPAFLSSAHASSFISGILIGPTVGAGEVSGLTDAKDMWTLRSQKSLPSALYSQRKWDEPLCECIQKDILSSCSDASNRARFLAVSEWESGLWLQAYPSSNIGTLLDKTTLSLAVSLRLGVKTNEPHRCRCGEWVNELGHHGLSCQLSAGRISRHGSINDVIRRAKVSAGVPAVLEPSGICRSDGRRPDGMSLIPWKQGRVLVWDATCVDSLAPSHLPGTTARAGAAARSAETLKMRKYADLGGTYIFLPFAVETLGPWGPEAKLFLSDITSRLIEATSDPRAGSYFAQRVSLAIQRGNAASLLGTLPQCGALEEVFNL

SEQ ID NO: 2334 - protein, 968 aa, Tuta absoluta
MSLPNPSDPILSAGLGTLSYDNGYVRCNKCDCPRLFRGRRGLRIHEGIMHRSDNPSNSISGRNTVRAAVMSPSASLEPIPFTKRLGSCKQGLPIVKRIPRGARITVANAPSKCIDRVVSENTLSSWEHLLLFAYRTLHVDARVDEGVSLTEKIKINCNAVADVTVPASRFFQQYSVVKRVESKVNDGDLKGAAKLIFSNDSLAPNDVVTLDALKLKHPVPSFTPILPDPPSLIDLTPQVSTEDVQDVLMTFKPGSASGLDGLSPQHLKDLVCGVTGNAGRALLVSLTSLTNLMLAGKVPEDIAPFLYGANLCALKKKDGGVRPIAVGCVFRRLVSKVCCRIISPGLQSIFQPRQLGFGTKGGCEAAVHATRTFLNQPGSDVLLKVDVMNAFNTVDRGVLLTEVKENIPAVYPYMRQCYSRPSKLIYKDHELSSSTGCQQGDPLGPAIFSLAIHPIISKLRSTLNVWYLDDGTLGGDPATVLDDLRSLNAAFTCIGLKLNLSKCELFVNPTMSPGSKESIIREFINLAPDLKIVEADTLSILGAPIFDSAIPLYVAEQIQKFQESSERLFKINAHMALFIVRYCLFVPKFTYVLRSSCFWRHRDSLVRLDNIVKNALVEILNCSLDGFAWDQATLPVRFGGLGVRRPSDVALPAFLSSAHASSFISGILIGPTVGAGEVSGLTDAKDMWTLRSQKSLPSALYSQRKWDEPLCECIQKDILSSCSDASNRARFLAVSEWESGLWLQAYPSSNIGTLLDKTTLSLAVSLRLGVKTNEPHRCRCGEWVNELGHHGLSCQLSAGRISRHGSINDVIRRAIVSAGVPAVLEPSGICRSDGRRPDGMSLIPWKQGRVLVWDATCVDSLAPSHLPGTTARAGAAARSAETLKMRKYADLGGTYIFLPFAVETLGPWGPEAKLFLSDITSRLIEATSDPRAGSYFAQRVSLAIQRGNAASLLGTLPQCGALEEVFNL

SEQ ID NO: 2335 - protein, 968 aa, Tuta absoluta
MELDQDVLAILGDDPSSTVKYGPNIRKELASRLQLVATEGLSKESRKELINKYLLPANCLHVGAPTMSPELKAALNDAVVKRDKGIESKQKEMASAISCVSDIISYHITSKEKIDRVVSENTLSSWEHLLLFAYRTLHVDARVDEGVSLTEKIKINCNAVADVTVPASRFFQQYSVVKRVESKVNDGDLKGAAKLIFSNDSLAPNDVVTLDALKLKHPVPSFTPILPDPPSLIDLTPQVSTEDVQDVLMTFKPGSASGLDGLSPQHLKDLVCGVTGNAGRALLVSLTSLTNLMLAGKVPEDIAPVLYGANLCALKKKDGGVRPIAVGCVFRRLVSKVCCRIISPGLQSIFQPRQLGFGTKGGCEAAVHATRTFLNQPGSDVLLKVDVMNAFNTVDRGVLLTEVKENIPAVYPYMRQCYSRPSKLIYKDHELSSSTGCQQGDPLGPAIFSLAIHPIISKLRSTLNVWYLDDGTLGGDPATVLDDLRSLNAAFTCIGLKLNLSKCELFVNPTMSPGSKESIIREFINLAPDLKIVEADTLSILGAPIFDSAIPLYVAEQIQKFQESSERLFKINAHMALFIVRYCLFVPKFTYVLRSSCFWRHRDSLVRLDNIVKNALVEILNCSLDGFAWDQATLPVRFGGLGVRRPSDVALPAFLSSAHASSFISGILIGPTVGAGEVSGLTDAKDMWTLRSQKSLPSALYSQRKWDEPLCECIQKDILSSCSDASNRARFLAVSEWESGLWLQAYPSSNIGTLLDKTTLSLAVSLRLGVKTNEPHRCRCGEWVNELGHHGLSCQLSAGRISRHGSINDVIRRAIVSAGVPAVLEPSGICRSDGRRPDGMSLIPWKQGRVLVWDATCVDSLAPSHLPGTTARAGAAARSAETLKMRKYADLGGTYIFLPFAVETLGPWGPEAKLFLSDITSRLIEATSDPRAGSYFAQRVSLAIQRGNAASLLGTLPQCGALEEVFNL

SEQ ID NO: 2336 - protein, 920 aa, Tuta absoluta
MHRSDNPSNSTSGRNTVRAAVMSPTASLEPIPFTKRLGSCKQGLPIVKRIPRGARITVANALSKCIDRVVSENTLSSWEHLLLFAYRTLHVDARVDEGVSLTEKIKINCNAVADVTVPASRFFQQYSVVKRVESKVNDGDLKGAAKLIFSNDSLAPNDVVTLDALKLKHPVPSFTPILPDPPSLIDLTPQVSTEDVQDVLMTFKPGSASGLDGLSPQHLKDLVCGVTGNAGRALLVSLTSLTNLMLAGKVPEDIAPVLYGANLCALKKKDGGVRPIAVGCVFRRLVSKVCCRIISPGLQSIFQPRQLGFGTKGGCEAAVHATRTFLNQPGSDVLLKVDVMNAFNTVDRGVLLTEVKENIPAVYPYMRQCYSRPSKLIYKDHELSSSTGCQQGDPLGPAIFSLAIHPIISKLRSTLNVWYLDDGTLGGDPATVLDDLRSLNAAFTCIGLKLNLSKCELFVNPTMSPGSKESIIREFINLAPDLKIVEADTLSILGAPIFDSAIPLYVAEQIQKFQESSERLFKINAHMALFIVRYCLFVPKFTYVLRSSCFWRHRDSLVRLDNIVKNALVEILNCSLDGFAWDQATLPVRFGGLGVRRPSDVALPAFLSSAHASSFISGILIGPTVGAGEVSGLTDAKDMWTLRSQKSLPSALYSQRKWDEPLCECIQKDILSSCSDASNRARFLAVSEWESGLWLQAYPSSNIGTLLDKTTLSLAVSLRLGVKTNEPHRCRCGEWVNELGHHGLSCQLSAGRISRHGSINDVIRRAIVSAGVPAVLEPSGICRSDGRRPDGMSLIPWKQGRVLVWDATCVDSLAPSHLPGTTARAGAAARSAETLKMRKYADLGGTYIFLPFAVETLGPWGPEAKLFLSDITTRLIEATSDPRAGSYFAQRVSLAIQRGNAASLLGTLPQCGALEEVFNL

SEQ ID NO: 2337 - protein, 1192 aa, Protaetia brevitarsis
METRSGRKTGGAGQRAGPHRSRQGSRPPAREEETGGASLQVNQTTQEVQEDPNSLTTYTPAGESAADNLICRPTDSENTQDGQRMRWTSQMNEELYRSYLQITEMETSSRPYGEELYNVMIEKYPILRAKKIQNIIDQKRTILTKRRISDERAEQIRREVARQLGIGAVEEEEQEETPTDQSLESNEDESGTEIEKCFQRNWILYGEMDPTKRPKLPKLREKKGTKHIVKEVDKMLGRKNEECNSIVELQRLLYIGAVTVLETNAQIITADVKSNKDKNRKNPWEIRLERKRETLRKEIGALTQYLKAQIPSNRLKNKATYILRKYRNQENKNEIEVLDLLKQKLAVTVNRMRRYKQGRRRRMQNGLFRSNQKLFYRRLNKEEPNHRDITEVPAEGFIDFWEGIWAKEKTHKLNAKWIKQEVREVDRVQNMIFDEIRVSDITEATKKAQNWKAPGVDQLHNYWIKRFAALHPTIAIVFNKIITEPNNTPKFFTTGMTYLLPKTNELNPNPDQYRPITCLTTLYKLFTAILCNKIYDHVEKYHIMPVEQKGCQRNSYGCKEQVTIDTLVTEHAKKTNRNLYWGYVDYRKAFDSVPHSWLQKVLELYKVAPQIRQALTALMSKWETVLYVNNEPLGNIKINRGIFQGDSLSPLWFCLALRPLSSILARRNYGYQVTANYKISHLVYMDDLKVIGHSREELEHMLKQVETFSADINMTFGLEKCKINGLEKGRWKQQKDYELGRLTESEDRRVIGAMGDTDSYKYLGMLQARGIEHKTIKETLTNKYRNRLRQILKTALKSKYITTAINAYAVPVVSYSFGLIKWTNTEMDNLNRLTRKVLTEYRAHHPRSCVERLYLPRSAGGRGLLDVKRLHYKISGSMRQYFHDHMDTSALIKAVVLTDKNYTALNLGNRTVQLGVNSTIPQLLDAWGRKQLHGRHLNNIQQDHINYNASNKWLQNGELFPETEGFVLSIQDHVIATLNYKKYIVKDPTVRDDKCRMCKTKPETLEHIINACPIMAPRDYTERHDAVAKILHNWLAFKIGYVQNRLPYYTYTPQSVCETPEATLYWDRTIQTDHLVSNNRPDIVLRNKKTNQCTIIDVAIPSPTNVQDKYKEKITKYMPLAAEIKQLWNMTDIKIIPIIVGATGEIPTSLLTNLEILDVPKHVYIEMQKAVLLATANIVRKALNMEEATAGR

SEQ ID NO: 2338 - protein, 1444 aa, Schistosoma japonicum
MNSTNNNEICYISDVSRNDGRSGIIVNHSIFDVSRSDGRSGIIVNHSIFDVSRSDGRSGIIVNHSIFDVSRSDGRSGIIVNHSIFDVSRSDGRSGIIVNHSIFDVSRSDGRSGIIVNHSIFDVSRSDGRSGIIVNHSIFDVSRSDGRSGIIVNHSIFDVSRSDGRSGIIVNHSIFDVSRSDGRSGIIVNHSIFDVSRSDGRSGIIVNHSIFDVSRSDGRSGIIVNHSIFDVSRSDGRSGIIVNHSIFDVSRSDGRSGIIVNHSIFDVSRSDGRSGIIVNHSIFDVSRSDGRSGIIVNHSIFDVSRSDGRSGIIVNHSIFDVSRSDGRSGIIVNHSIFDVSRNDGRSGIIVNHSIFDVSRSDGRSSIKVNHSISPVSRSDGRVGISASCFEAGPVEAVGRLPSPSDPSASTVTNESQTRSRIIPILDYSCCLCSYRSASAIGLGQHMRHRHVQEYNAACKWPTRSRIIPILDYSCCLCSYRSASAIGLGQHMRHRHVQEYNARKAAKVTSRRHSQWTNEEEDVLLDTANDIWSETPNLPKCQLYNRLSERLTGRSREAIKRRLLGLHWTPLASINGNTESNPQQRVDSERTVLWRAGLLEAVVRSCDRKHVLYKLAQALLRSRIGIDQGRSRLSTYVEKSYPYSKKAHRRPTTRADLDGLGEREINQINRTKLQKLLRRNKRCGAQQVLNGTWRNAYKGKPDLPVGFQTFWSNILSSGSVADDRPANELRPVDWTLIRPVTVEEVQRSLKRMGRTAPGPDGITPQQLYKRRHSTITALMNLILALEAVPEHLNLARIVFIPKCEDPQTPEDYRPISITSVTLRCLHSILCQRWSDHLSSLNSQLAFLRRDGCFDGVTSVNMILRDTRMARRKLTMCAVDVSKAFDSVSHATITRVASMYGAPAPLISYLTYYYDSSYTDLLGTRVKVGRGVRQGDPLSPLLFIMCMDEVIQYTDRNHGALIGGGRIDSLLFADDMMIFTETAVGMQRKLNQLSAALEKSGLTINAQKSRSLTLIPNGKDKTLCVVPKVYSIAGEPIAPITVVDEFPYLGIRFNHQGIAQQPLLQLTRKMLTEVQAAPLTPIQQLHILRCFVLPKLQYIGQVGFVSVSALSKADILIRKMVKQSVNLPNDTATSYFHARIRDGGLGVESLSSTIPLRRAKRLRSFSTRNCGILELIRQSAGYQTLMARCKLTSKVMGIEVSNIDSMQSAWKSLLYNTLDGKGLRSSDQSPASHLWVTSSVSMFPWLYKKAIQLRGHTLNTKTRRARGGRTHRDLKCSGGCNKLESLTHILQECACTQRLRISRHNRVVTKLEGCLQRLGFAVRREPRIANGQSYLKPDLIACKFPLIYILDVIICADERSNTSWNAKLRKYNRPTLNKCYRNVFDLSGVPEAKVRHLPVVVTMRGMLYSKTETGLRQLGLPKSTISWLSEQTIIGSLICYDAYMAL

SEQ ID NO: 2339 - protein, 1190 aa, Nylanderia fulva
MIILLPFEPTNCPLCTEKDRARYLSLSLNDALSHHAEKHSSFGVSFECRKCRKAYTTKHALLCHIPKCPGARAPGPFPCPECTESFLSQRGLTQHKRHRHPIMRNAEREASAQPTTRAIRDGGSFAAEEIVMMLQLEHSHRGDPDIVQRIVAALPAKTLKQIRDKRREPAYCRRRDQYIRDAAGLLPAVKRRSRASGLGVSSIGSAPSTPNTTACGAASSTSGGDLASGGLASPGIASPDVSVPEGGTLAPALEGSEEMAARGLDANIDAPGADLIIETSVAPIIQLGECYVRLERCDRMLNRPRTPEEKEDDALVEENQWRNKLLEYFKEWDLSGYPKGVSGICGVIRAAAEGPSPDSVEGAYAAVAGHLGGAHSSTESRNCPPRTKQRSKRSVKRYQYARTQDLCKRDPGLLARHVRQGTDHMAPNNQSILRGEVRDLYAALWGTRVPTRIPDPGVVPSVGFEKFGPISAIEVKNRLARTKKSTAPGPVGIRRAALLGAHKNDILARLFSLVLATGILPVSWKQNRTTLILKEGKDGARVTNYRPITISSLISRLFWGIVDERLRSAVQINLRQKGFVAESGCFANVQILHELIGHMKENHGGVGIQLDVAKAFDTVPHEAIPAALKRKGIPQPIVDLIEGSYNGVVTKIGHPDGEIEIGLQRGVKQGDPLSPLLFNLILEPLLEKLEAMPGYPMGGGNNISYLAFADDLILFALDPQGAQALLDCTVEELGSLGMTVAASKSYAYQIRSTRDSWYMVDPGVERTGEKIPACTPGNRLTYLGCSYSVWSGFDLDGVGKHLSGVIARVKALRLKPMQKISLLQTYLIPHYLHQLVIALPPKTFLMSMDQELRVAVKQVLHLPQSICNGVIYCPKRDGGLGFPKLQELVPRVSLAAGLKFAESNDPAIRALLSCSKVTCRLKRMANGVRLNYPYTAADLNKYREACRKTELKRWRELVAQGQAVGALTGDRIGNSFLRDPTLLKPCRFTTALQLRTNTAGNKTSLNRAVPQQDLNCRKCRMSKETLAHVLGQCTHTKASRIRRHNEIRDFVEKVVSEVDKEAIISKEPLVPLAEGGNLKPDLIIKNQGGVFVVDITVRLEDGESLRKAKQEKEEKYERLIPQLKHQFSMEKGKVLPVVVGTRGAMPSETITALAVLGVKQVKDLKTISMMALRSSIEIYHAFIDYDGPLL

SEQ ID NO: 2340 - protein, 1088 aa, Nylanderia fulva
MRNAEREASAQPTTRAIRDGGSFAAEEIVMMLQLEHSHRGDPDIVQRIVAALPAKTLKQIRDKRREPAYCRRRDQYIRDAAGLLPAVKRRSRASGLGVSSIGSAPSTPNTTACGAASSTSGGDLASGGLASPGIASPDVSVPEGGTLAPALEGSEEMAARGLDANIDAPGADLIIETSVAPIIQLGECYVRLEKCDRMLNRPRTPEEKEDDALVEENQWRNKLLEYFKEWDLSGYPKGVSGICGVIRAAAEGPSPDSVEGAYAAVAGHLGGAHSSTESRNCPPRTKQRSKRSVKRYQYARTQDLCKRDPGLLARHVRQGTDHMAPNNQSILRGEVRDLYAALWGTRVPTRIPDPGVVPSVGFEKFGPISAIEVKNRLARTKKSTAPGPDGIRRAALLGAHKNDILARLFSLVLATGILPVSWKQNRTTLILKEGKDGARVTNYRPITISSLISRLFWGIVDERLRSAVQINLRQKGFVAESGCFANVQILHELIGHMKENHGGVGIQLDVAKAFDTVPHEAIPAALKRKGIPQPIVDLIEGSYNGVVTKIGHPDGEIEIGLQRGVKQGDPLSPLLFNLILEPLLEKLEAMPGYPMGGGNNISYLAFADDLILFALDPQGAQALLDCTVEELGSLGMTVAASKSYAYQIRSTRDSWYMVDPGVERTGEKIPACTPGNRLTYLGCSYSVWSGFDLDGVGKHLSGVIARVKALRLKPMQKISLLQTYLIPHYLHQLVIALPPKTFLMSMDQELRVAVKQVLHLPQSICNGVIYCPKRDGGLGFPKLQELVPRVSLAAGLKFAESNDPAIRALLSCSKVTCRLKRMANGVRLNYPYTAADLNKYREACRKTELKRWRELVAQGQAVGALTGDRIGNSFLRDPTLLKPCRFTTALQLRTNTAGNKTSLNRAVPQQDLNCRKCRMSKETLAHVLGQCTHTKASRIRRHNEIRDFVEKVVSEVDKEAIISKEPLVPLAEGGNLKPDLIIKNQGGVFVVDITVRLEDGESLRKAKQEKEEKYERLIPQLKHQFSMEKGKVLPVVVGTRGAMPSETITALAVLGVKQVKDLKTISMMALRSSIEIYHAFIDYDGPLL

SEQ ID NO: 2341 - protein, 1197 aa, Cardiocondyla obscurior
MANLRTMQILLPFESVLCPVCLEADRANYRALSLNDAIRHYSEKHTALEIIYICRLCEKPYKSKHGALCHIPKCPGKKTVTDALQCAECAEAFPTQRGLSQHKRHRHPNKRNEERTAQAQMEKADVPRIGISFTPEDILLMYQLERIYKGDPKITQKMTEHLKTKTLKQISDKRKEPAYCRRRDKYLVEMAKTLPAVKRRSVSLSSASGNVNKTPRDKITRRRGLSVTETDNSNKEIVDIELNDKETGMEPASAVSDTPLDCYRSESEMAENQCQDLTGNNGGHKTRLDITKIILKECRVNLSRCDHMVGTFGSDDEMENDLSESDSWQAGLVEALGKISYAKWPRHLTEIGRSLKEARNKLDIDSVETIYNKIVELLTKSQKSDSHDDRPPRGKHRTKRSHKRYLYARTQDLFKKEPGLLARHVRLGTDHTAQNNASIPRGEVIDLYTALWGSKVPTRVTDCNEAEAMGFDSFGPILAAEIQKRLTRTKKATAPGPDKIKKADLLGPYKCELLAGMFNLMLAAGALPSAWKNNRTTLIPKEGKDGTKVTNYRPLTIGSLLSRLFWGILDERLRSVIQMNPRQKGFVSEAGCYANVRILHELTHQMKKSGGGVGIQLDVSKAFDTVPHEAIPIALKRKGVPAPIVDLIRCSYEGAATTISHPEGEIKITLRRGVKQGDPLSPLLFNLVLEPLLERLEHMPGLPLPGESGISCLAFADDLFLFATDPSKAQDLLDCTVEELGSLGMTIAANKSCAYRIKSSKDSWFMEDPGVERIGEKIPVCTPENKITYLGCSYSVWSGFDLKSVSEHMEQIIKRVKFLKLKPMQKVKLIQVYLIPHFLHQLTIAEPSKAFLIAMDQRLRVAIKQMLHLPLSICDGIIYCGKKDGGLGFPKLQELIPRVSLNAGLKFSESRDPAIRALFGSSVTAVRLRKLANSVRINYPYTKEDVKKYKETCYRTELKRWKELKAQGKAVEAFTDDKIGNMFLQNPQLLKPCRFTTALQLRTNTAGNKTSLNRIAPQNDIACRKCKLQKETLAHILGQCIHTKTARIRRHNEIRDFIENTVSEEDITATISKEPLIDPADGKCLQPDLIIKNQKGVFVVDITVRHEDNDYLEKAKEEKENKYKKLLPQVKQIFEVEHGEVLPIVVGTRGAMPKNTIKALAVLGVKQISKLKTITLMALRSSIEMYHAFIDYDGPLL

SEQ ID NO: 2342 - protein, 1242 aa, Tetramorium simillimum
MALSLIDAANHYTERHADLQILYACRNCHKTYRTKHAALCHVPKCPGVRNPRGSYCCSECPESFATQRGLSQHKRHRHPAVRNEERLAAAQPVVRPARAGCSFAPEEITLMNQLEWTYKGDPNIAQKIAERMGTKTNKQVRDKRREPAYCRRRDQYLKEMASSLPAVRRSLRASLTCSPLGSAEAVGYDSRRSAGLAGTGASCGGSGRRERAAAETSVAGSSRIGATTIERAEDHGISAPDGGDAVDVPVRPAGLGECRVLIERCDRLPRATPPSDAEVDDAAIGAAEWRAETMNTSVASTSTPGDSSRHCVTLSGDDALGDDSENSERRTAASGGIAIAALRECRVTLGRCDHLIRAPLSPGCGDISPADKWKGELIDALREWDLSDCPRELLEVCAALRGAAEDLCADSVETAYEAVIGYLGGAQNPARVEERPPRSRRRFKRSLKRYQFARTQDLFKREPGLLARHVRQGTDHTAPNTMTISRGEVRDLYKALWGTGVPTRITDYDEGESVGFEGFGPISAIDIRRRLARVKKSTAPGPDGLRKSALLGIHKSVVLAKLFSLILAAGVLPAPWKQNRTTLIAKEGKDNTKVTNYRPLTISSLLSRLFWGIMDERIRSVAQINPRQKGFVAEAGCFANVQILHELTCLMKQGQGGVGIQLDVSKAFDTIPHEAIPGALRRKGIPQPIINLVCSSYENATTTISHPGGGIEIALRRGVKQGDPLSPLLFNLVLEPLLEKLERLPGFPLPGERNISCLAFADDLFLFASDPLKAQALLDCTVEELGSLGMTIAANKSCAYQIKKARESWYMVDPGIERIGDKIPACTPTSTLTYLGCSYSVWSGFNLDAVVEHLAAVIARVKALKLKPMQKVSLLQKYLVPHYLHQLVIAAPAKTVLGRIDLELRVAIKEILHLPQSICNGVIYCGNRDGGLGFPKLQELVPRVSLLAGLKFAESKDPAIRALLESSKTTERLRRLANSVRLNYPYTRRDIQRYKEACWKTELRRWRDLVSQGQAVDSFAGDKIGNSFLRDPALLKPSRFITALQLRTNTAANRTSLNRAIPQKDLSCRKCKSSKETLGHILGQCTHTKAARIRRHNEIRNFIESIVLEHDKAAVLSKEPLIPSPDGGNLKPDLVIQNQDGVFVVDITVRHEDGDSLARARREKEEKYEKLLPQLKTQFGADRGGVLGIVVGTRGAVPKDTSAALAVIGIKKVGELKTISLMALRSSIELYHAFIDYDGPLM

SEQ ID NO: 2343 - protein, 1184 aa, Planiliza haematocheilus
MERQLTGGNSPHRGYSGLAAHCGSSPGFNKPWTTPQVATNTINDKIPLESARAGAEDDSLWTDTAFDPGLNLTLSRQGTLLEATSSDGDGKKQQVCVCGWQKLTTMKGLRIHQGRKKCLAEGTQGPRIDSYFLRSALSQSVEVQRQELTHSSQDISTPNVEVGASTEADREVSQPKREKISSQKGRIKWPGAADIRQWEDINSDLVCVLGRLKGTAESKLEKMGDLIYDYGKERFGVAEKQKKQKGQVVRSRRQQEIDRLIQERRLLKKQWRKATVEEKEGIDCLQADVRKRLAALRRAENIRKNRKRKERARIAFYKDPFRFVKSLFSKEKNGSLTVPKEKLEEYLEEVHKDADRFRKLSLPSDIPPIGEIVSQCDDSPPRWKEVQEVVRRARASSAPGPNGVPYRLYKSAPDVLRFLWKLMKVVWKKQVIPKAWRRAGGIFIPKERDSLEISQFRPISLLNVEGKIFFSVVAQRLSSYLVKNGLVDTSVQKAGIPGFSGCLEHTSMIWHQIQSAKQEKRDLHVVFLDLANAFGSVPHSLLWEAFDFFRVPGSIKNLVKAYFLDIQLCFTTAEYTTAWQQLEVGIMAGCTISPLAFTMAMEVIIRASKWVVGGERLQGGLRLPPIRAYMDDMTTTTSTAPCTRRLLDKLNSNLQWARMKVKPTKSRSISIIKGKVVDKKFFINDEVIPTVLEKPVKSLGRWYDASLSDKAQFEGLRQEMIQGISSIDRSGLPGKLKLWCWQFGLLPRLMWPLTVYEVALSKVEKLERMSNSFIRKWLGVPRCLSSTALYGKGILELPVTCLTEEFKCTKVRLEMTLTQSKDPVVRSVAPTIKTGRKWKAKEAVQQAQAALKHRDIIGHVQQGRGGLGLCAGKPLWSKASAVERRKMIVEEVQRQEEMVRCSKAVSQAKQGQWVNWESVEKRKVKWRELWSMEASRIRFMLGATYDVLPTPQNLNQWVGEDAACPLCTCVCTLSHILTGCTVSLSQGRYTWRHNQVLKCLAAAIEEKRVNVNSVAVNREHRGIKFVREGEKARGAGFRHNMGQLRVGGAWEMRADLNSQLVVPGEIASTRLRPDLLLWSEPEKAVYFIELTVPWEDRVEEANERKRAKYAELAADAEQNGWKAYVRPVEVGCRGFVAKSVIALLSELGIRGRSQRTAVSNMSRAAERASDWLWVRRKHASWGAN

SEQ ID NO: 2344 - protein, 1149 aa, Planiliza haematocheilus
MERQLTGGNSPHRGYSGLAAHCGSSPGFNKPWTTPQVATNTINDKIPLESARAGAEDDSLWTDTAFDPGLNLTLSRQGTLLEATSSDGDGKKQQVCVCGWQKLTTMKGLRIHQGRKKCLAEGTQGPRIDSYFLRSALSQSVEVQRQELTHSSQDISTPNVEVGASTEADREVSQPKREKISSQKGRIKWPGAADIRQWEDINSDLVCVLGRLKGTAESKLEKMGDLIYDYGKERFGVAEKQKKQKGQVVRSRRQQEIDRLIQERRLLKKQWRKATVEEKEGIDCLQADVRKRLAALRRAENIRKNRKRKERARIAFYKDPFRFVKSLFSKEKNGSLTVPKEKLEEYLEEVHKDVDRFRKLSLPSDIPPIGEIVSQCDDSPPRWKEVQEVVRRARASSAPGPNGVPYRLYKSAPDVLRFLWKLMKVVWKKQVIPKAWRRAGGIFIPKERDSLEISQFRPISLLNVEGKIFFSVVAQRLSSYLVKNGLVDTSVQKAGIPGFSGCLEHTSMIWHQIQSAKQEKRDLHVVFLDLANAFGSVPHSLLWEAFDFFRVPGSIKNLVKAYFLDIQLCFTTAEYTTAWQQLEVGIMAECTISPLAFTMAMEVIIRASKWVVGGERLQGGLRLPPIWAYMDDMTTTTSTAPCTRRLLDKLNSNLQWARMKVKPTKSRSISIIKGKVVDKKFFINDEVIPTVLEKPVKSLGRWYDASLSDKAQFEGLRQEMIQGISSIDRSGLPGKLKLWCWQFGLLPRLMWPLTVYEVALSKVEKLERMSNSFIRKWLGVPRCLSSTALYGKGILELPVTCLTEEFKCTKVRLEMTLTQSKDPVVRSVAPTIKTGRKWKAKEAVQQAQAALKHRDIIGHVQQGRGGLGLCAGKPLWSKASAVERRKMIVEEVQRQEEMVRCSKAVSQAKQGQWVNWESVEKRKVKWRELWSMEASRIRFMLGSTYDVLPTPQNLNQWVGEDAACPLCTCVCTLSHILTGCKVSLSQGRYTWRHNQVLKCLAAAIEEKRVNVNSVAVNRENRGIKFVREGEKARGAGFRHNMGQLRVGGAWEMRADLNSQLVVPGEIASTRLRPDLLLWSEPEKAVYFIELTVPWEDRVEEANERKRAKYAELAADAEQNGWKAYVRPVEVGCRGFVAKSVIALLSELGI

SEQ ID NO: 2345 - protein, 1184 aa, Planiliza haematocheilus
MERQLTGGNSPHRGYSGLAAHCGSSPGFNKPWTTPQVATNTINDKIPLESARAGAEDDSLWTDTAFDPGLNLTLSRQGTLLEATSSDGDGKKQQVCVCGWQKLTTMKGLRIHQGRKKCLAEGTQGPRIDSYFLRSALSQSVEVQRQELTHSSQDISTPNVEVGASTEADREVSQPKREKISSQKGRIKWPGAADIRQWEDINSDLVCVLGRLKGTAESKLEKMGDLIYDYGKERFGVAEKQKKQKGQVVRSRRQQEIDRLIQERRLLKKQWRKATVEEKEGIDCLQADVRKRLAALRRAENIRKNRKRKERARIAFYKDPFRFVKSLFSKEKNGSLTVPKEKLEEYLEEVHKDADRFRKLSLPSDIPPIGEIVSQCDDSPPRWKEVQEVVRRARASSAPGPNGVPYRLYKSAPDVLRFLWKLMKVVWKKQVIPKAWRRAGGIFIPKERDSLEISQFRPISLLNVEGKIFFSVVAQRLSSYLVKNGLVDTSVQKAGIPGFSGCLEHTSMIWHQIQSAKQEKRDLHVVFLDLANAFGSVPHSLLWEAFDFFRVPGSIKNLVKAYFLDIQLCFTTAEYTTAWQQLEVGIMAGCTISPLAFTMAMEVIIRASKWVVGGERLQGGLRLPPIRAYMDDMTTTTSTAPCTRRLLDKLNSNLQWARMKVKPTKSRSISIIKGKVVDKKFFINDEVIPTVLEKPVKSLGRWYDASLSDKAQFEGLRQEMIQGISSIDRSGLPGKLKLWCWQFGLLPRLMWPLTVYEVALSKVEKLERMSNSFIRKWLGVPRCLSSTALYGKGILELPVTCLTEEFKCTKVRLEMTLTQSKDPVVRSVAPTIKTGRKWKAKEAVQQAQAALKHRDIIGHVQQGRGGLGLCAGKPLWSKASAVERRKMIVEEVQRQEEMVRCSKAVSQAKQGQWVNWESVEKRKVKWRELWSMEASRIRFMLGATYDVLPTPQNLNQWVGEDAACPLCTCVCTLSHILTGCKVSLSQGRYTWRHNQVLKCLAAAIEEKRVNVNSVAVNRENRGIKFVREGEKARGAGFRHNMGQLRVGGAWEMRADLNSQLVVPGEIASTRLRPDLLLWSEPEKAVYFIELTVPWEDRVEEANERKRAKYAELAADAEQNGWKAYVRPVEVGCRGFVAKSVIALLSELGIRGRSQRTAVSNMSRAAERASDWLWVRRKHASWGAN

SEQ ID NO: 2346 - protein, 1184 aa, Planiliza haematocheilus
MERQLTGGNSPHRGYSGLAAHCGSSPGFNKPWTTPQVATNTINDKIPLESARAGAEDDSLWTDTAFDPGLNLTLSRQGTLLEATSSDGDGKKQQVCVCGWQKLTTMKGLRIHQGRKKCLAEGTQGPRIDSYFLRSALSQSVEVQRQELTHSSQDISTPNVEVGASTEADREVSQPKREKISSQKGRIKWPGAADIRQWEDINSDLVCVLGRLKGTAESKLEKMGDLIYDYGKERFGVAEKQKKQKGQVVRSRRQQEIDRLIQERRLLKKQWRKATVEEKEGIDCLQADVRKRLAALRRAENIRKNRKRKERARIAFYKDPFRFVKSLFSKEKNGSLTVPKEKLEEYLEEVHKDVDRFRKLSLPSDIPPIGEIVSQCDDSPPRWKEVQEVVRRARASSAPGPNGVPYRLYKSAPDVLRFLWKLMKVVWKKQVIPKAWRRAGGIFIPKERDSLEISQFRPISLLNVEGKIFFSVVAQRLSSYLVKNGLVDTSVQKAGIPGFSGCLEHTSMIWHQIQSAKQEKRDLHVVFLDLANAFGSVPHSLLWEAFDFFRVPGSIKNLVKAYFLDIQLCFTTAEYTTAWQQLEVGIMAGCTISPLAFTMAMEVIIRASKWVVGGERLQGGLRLPPIWAYMDDMTTTTSTAPCTRRLLDKLNSNLQWARMKVKPTKSRSISIIKGKVVDKKFFINDEVIPTVLEKPVKSLGRWYDASLSDKAQFEGLRQEMIQGISSIDRSGLPGKLKLWCWQFGLLPRLMWPLTVYEVALSKVEKLERMSNSFIRKWLGVPRCLSSTALYGKGILELPVTCLTEEFKCTKVRLEMTLTQSKDPVVRSVAPTIKTGRKWKAKEAVQQAQAALKHRDIIGHVQQGRGGLGLCAGKPLWSKASAVERRKMIVEEVQRQEEMVRCSKAVSQAKQGQWVNWESVEKRKVKWRELWSMEASRIRFMLGATYDVLPTPQNLNQWVGEDAACPLCTCVCTLSHILTGCKVSLSQGRYTWRHNQVLKCLAAAIEEKRVNVNSVAVNRENRGIKFVREGEKARGAGFRHNMGQLRVGGAWEMRADLNSQLVVPGEIASTRLRPDLLLWSEPEKAVYFIELTVPWEDRVEEANERKRAKYAELAADAEQNGWKAYVRPVEVGCRGFVAKSVIALLSELGIRGRSQRTAVSNMSRAAERASDWLWVRRKHASWGAN

SEQ ID NO: 2347 - protein, 762 aa, Planiliza haematocheilus
MKVVWKKQVIPKAWRRAGGIFIPKERDSVEISQFRPISLLNVEGKIFFSVVAQRLSSYLVKNGLVDTSVQKAGIPGFSGCLEHTSMIWHQIQSAKQEKRDLHVVFLDLANAFGSVPHSLLWEAFDFFRVPGSIKNLVKAYFLDIQLCFTTAEYTTAWQQLEVGIMAGCTISPLAFTMAMEVIIRASKWVVGGERLQGGLRLPPIRAYMDDMTTTTSTAPCTRRLLDKLNSNLQWARMKVKPTKSRSISIIKGKVVDKKFFINDEVIPTVLEKPVKSLGRWYDASLSDKAQFEGLRQEMIQGISSIDRSGLPGKLKLWCWQFGLLPRLMWPLTVYEVALSKVEKLERMSNSFIRKWLGVPRCLSSTALYGKGILELPVTCLTEEFKCTKVRLEMTLTQSKDPVVRSVAPTIKTGRKWKAKEAVQQAQAALKHRDIIGHVQQGRGGLGLCAGKPLWSKASAVERRKMIVEEVQRQEEMVRCSKAVSQAKQGQWVNWESVEKRKVKWRELWSMEASRIRFMLGATYDVLPTPQNLNQWVGEDAACPLCTCVCTLSHILTGCKVSLSQGRYTWRHNQVLKCLAAAIEEKRVNVNSVAVNRENRGIKFVREGEKARGAGFRHNMGQLRVGGAWEMRADLNSQLVVPGEIASTRLRPDLLLWSEPEKAVYFIELTVPWEDRVEEANERKRAKYAELAADAEQNGWKAYVRPVEVGCRGFVAKSVIALLSELGIRGRSQRTAVSNMSRAAERASDWLWVRRKHASWGAN

SEQ ID NO: 2348 - protein, 1121 aa, Alosa sapidissima
MVTDPGTNLITSKENMFVEATSSEKTEKKLQMCVCGWQKVTSLKGLKIHQGKKKCLVEGTQGPRIDSYFLRSASSQSVEVQRQEETHSSQDISTPVVEESSSTEAEREASQPRREKINGHRPGVRWPGAAECRMWEDVNSDLVSILGQLKGTAESKLEKMGDIIYSYGKERFGTIERRTKRQHEVVKSRRQQEIDKLIKERRQLKKQWRKATDDEKEGIDCLQADVRERLVVLRRAENIRKNRKKKSRARLAFYKDPFKFVKSLFVMQKSGSLLEPKQKLEEYLEGVHKDGERFREMVLPADIPPIGELSSQCDDSPPRWKEVQEVIKRARASSAPGPNGVPYRLYKNAPDVLRFLWQLMKIVWKKQSIPKAWRRAGGIFIPKEKDAVEINQFRPISLLNVEGKVFFSVVARRLTNYLERNKLIDTTVQKAGIPGFSGCLEHTSMIWHQIQLAKREKRDLHVVFLDLANAFGSVPHSLLWEAFDYFRIPGSIKSLVKAYFLDIQLCFTTADYTTGWQQLEIGIMAGCTISPLAFTMAMEVIIRASKWVVGGEKLQGGPRLPPIRAFMDDMTTLTTTVPCTNRLLGKLNSNLQWVRMKVKPSKSRSLSIVKGKVTDKKFAINEEVIPTVLEKPVKSLGRWYDASLSDKSQVEDLRQVTRQGIAKIDKSGLPGKLKLWCLQFGLLPRLMCPLTVYEVPLSKVERLEKMINSFVRKWLGVPRCLSSVALYGKGIVELPISSLTEEFKCAKARLELTLTQSKDPVVRKVAPTVNAGRKWNPEQAVKQAQSALKHRDIMGHVQHGREGLGVGASKPLWSKASAGEKRKMVMEEMHRQEEAVRCTKAVSQAKQGQWVNWEGVEKRRIKWKDLWGMEAGKIKFMFGATYDVLPSPKNLSQWFGEDDKCILCSCVGSLHHILSGCKVSLTQGRYTWRHNQVLKCVAAAIEDKRREVNSLAASKGVRQINFVRQGDKPCSAKARCKTGQLKNGAGWEMKVDLGQQMAVPPHIVSTKLRPDVILWSDSEKIVYFIELTVPWEDRVEVANELKRAKYTEIAEEATKRGWSARLRPIEIGACGFVARSAIGLLSELGICGRSLRQVVSNMSLAAERASEWLWVRRSYPSWGAS

SEQ ID NO: 2349 - protein, 1184 aa, Planiliza haematocheilus
MERQLTGGNSPHRGYSGLAAHCGSSPGFNKPWTTPQVATNTINDKIPLESARAGAEDDSLWTDTAFDPGLNLTLSRQGTLLEATSSDGDGKKQQVCVCGWQKLTTVKGLRIHQGRKKCLAEGTQGPRIDSYFLRSALSQSVEVQRQELTHSSQDISTPNVEVGASTEADREVSQPKREKISSQKGRIKWPGAADIRQWEDINSDLVCVLGRLKGTAESKLEKMGDLIYDYGKERFGVAEKQKKQKGQVVRSRRQQEIDRLIQERRLLKKQWRKATVEEKEGIDCLQADVRKRLAALRRAENIRKNRKRKERARIAFYKDPFRFVKSLFSKEKNGSLTVPKEKLEEYLEEVHKDADRFRKLSLPSDIPPIGEIVSQCDDSPPRWKEVQEVVRRARASSAPGPNGVPYRLYKSAPDVLRFLWKLMKVVWKKQVIPKAWRRAGGIFIPKERDSLEISQFRPISLLNVEGKIFFSVVAQRLSSYLVKNGLVDTSVQKAGIPGFSGCLEHTSMIWHQIQSAKQEKRDLHVVFLDLANAFGSVPHSLLWEAFDFFRVPGSIKNLVKAYFLDIQLCFTTAEYTTAWQQLEVGIMAGCTISPLAFTMAMEVIIRASKWVVGGERLQGGLRLPPIRAYMDDMTTTTSTAPCTRRLLDKLNSNLQWARMKVKPTKSRSISIIKGKVVDKKFFINDEVIPTVLEKPVKSLGRWYDASLSDKAQFEGLRQEMIQGISSIDRSGLPGKLKLWCWQFGLLPRLMWPLTVYEVALSKVEKLERMSNSFIRKWLGVPRCLSSTALYGKGILELPVTCLTEEFKCTKVRLEMTLTQSKDPVVRSVAPTIKTGRKWKAKEAVQQAQAALKHRDIIGHVQQGRGGLGLCAGKPLWSKASAVERRKMIVEEVQRQEEMVRCSKAVSQAKQGQWVNWESVEKRKVKWRELWSMEVSRIRFMLGATYDVLPTPQNLNQWVGEDAACPLCTCVCTLSHILTGCKVSLSQGRYTWRHNQVLKCLAAAIEEKRVNVNSVAVNRENRGIKFVREGEKARGAGFRHNMGQLRVGGAWEMRADLNSQLVVPGEIASTRLRPDLLLWSEPEKAVYFIELTVPWEDRVEEANERKRAKYAELAADAEQNGWKAYVRPVEVGCRGFVAKSVIALLSELGIRGRSQRTAVSNMSRAAERASDWLWVRRKHASWGAN

SEQ ID NO: 2350 - protein, 1184 aa, Planiliza haematocheilus
MERQLTGGNSPHRGYSGLAAHCGSSPGFNKPWTTPQVATNTINDKIPLESARAGAEDDSLWTDTAFDPGLNLTLSRQGTLLEATSSDGDGKKQQVCVCGWQKLTTVKGLRIHQGRKKCLAEGTQGPRIDSYFLRSALSQSVEVQRQELTHSSQDISTPNVEVGASTEADREVSQPKREKISSQKGRIKWPGAADIRQWEDINSDLVCVLGRLKGTAESKLEKMGDLIYDYGKERFGVAEKQKKQKGQVVRSRRQQEIDRLIQERRLLKKQWRKATVEEKEGIDCLQADVRKRLAALRRAENIRKNRKRKERARIAFYKDPFRFVKSLFSKEKNGSLTVPKEKLEEYLEEVHKDADRFRKLSLPSDIPPIGEIVSQCDDSPPRWKEVQEVVRRARASSAPGPNGVPYRLYKSAPDVLRFLWKLMKVVWKKQVIPKAWRRAGGIFIPKERDSLEISQFRPISLLNVEGKIFFSVVAQRLSSYLVKNGLVDTSVQKAGIPGFSGCLEHTSMIWHQIQSAKQEKRDLHVVFLDLANAFGSVPHSLLWEAFDFFRVPGSIKNLVKAYFLDIQLCFTTAEYTTAWQQLEVGIMAGCTISPLAFTMAMEVIIRASKWVVGGERLQGGLRLPPIRAYMDDMTTTTSTAPCTRRLLDKLNSNLQWARMKVKPTKSRSISIIKGKVVDKKFFINDEVIPTVLEKPVKSLGRWYDASLSDKAQFEGLRQEMIQGISSIDRSGLPGKLKLWCWQFGLLPRLMWPLTVYEVALSKVEKLERMSNSFIRKWLGVPRCLSSTALYGKGILELPVTCLTEEFKCTKVRLEMTLTQSKDPVVRSVAPTIKTGRKWKAKEAVQQAQAALKHRDIIGHVQQGRGGLGLCAGKPLWSKASAVERRKMIVEEVQRQEEMVRCSKAVSQAKQGQWVNWESVEKRKVKWRELWSMEASRIRFMLGATYDVLPTPQNLNQWVGEDAACPLCTCVCTLSHILTGCKVSLSQGRYTWRHNQVLKCLAAAIEEKRVNVNSVAVNRENRGIKFVREGEKARGAGFRHNMGQLRVGGAWEMRADLNSQLVVPGEIASTRLRPDLLLWSEPEKAVYFIELTVPWEDRVEEANERKRAKYAELAADAEQNGWKAYVRPVEVGCRGFVAKSVIALLSELGIRGRSQRTAVSNMSRAAERASDWLWVRRKHASWGAN

SEQ ID NO: 2351 - protein, 1184 aa, Planiliza haematocheilus
MERQLTGGNSPHRGYSGLAAHCGSSPGFNKPWTTPQVATNTINDKIPLESARAGAEDDSLWTDTAFDPGLNLTLSRQGTLLEATSSDGDGKKQQVCVCGWQKLTTMKGLRIHQGRKKCLAEGTQGPRIDSYFLRSALSQSVEVQRQELTHSSQDISTPNVEVGASTEADREVSQPKREKISSQKGRIKWPGAADIRQWEDINSDLVCVLGRLKGTAESKLEKMGDLIYDYGKERFGVAEKQKKQKGQVVRSRRQQEIDRLIQERRLLKKQWRKATVEEKEGIDCLQADVRKRLAALRRAENIRKNRKRKERARIAFYKDPFRFVKSLFSKEKNGSLTVPKEKLEEYLEEVHKDADRFRKLSLPSDIPPIGEIVSQCDDSPPRWKEVQEVVRRARASSAPGPNGVPYRLYKSAPDVLRFLWKLMKVVWKKQVIPKAWRRAGGIFIPKERDSLEISQFRPISLLNVEGKIFFSVVAQRLSSYLVKNGLVDTSVQKAGIPGFSGCLEHTSMIWHQIQSAKQEKRDLHVVFLDLANAFGSVPHSLLWEAFDFFRVPGSIKNLVKAYFLDIQLCFTTAEYTTAWQQLEVGIMAGCTISPLAFTMAMEVIIRASKWVVGGERLQGGLRLPPIRAYMDDMTTTTSTAPCTRRLLDKLNSNLQWARMKVKPTKSRSISIIKGKVVDKKFFINDEVIPTVLEKPVKSLGRWYDASLSDKAQFEGLRQEMIQGISSIDRSGLPGKLKLWCWQFGLLPRLMWPLTVYEVALSKVEKLERMSNSFIRKWLGVPRCLSSTALYGKGILELPVTCLTEEFKCTTVRLEMTLTQSKDPVVRSVAPTIKTGRKWKAKEAVQQAQAALKHRDIIGHVQQGRGGLGLWAGKPLWSKASAVERRKMIVEEVQRQEEMVRCSKAVSQAKQGQWVNWESVEKRKVKWRELWSMEASRIRFMLGATYDVLPTPQNLNQWVGEDAACPLCTCVCTLSHILTGCKVSLSQGRYTWRHNQVLKCLAAAIEEKRVNVNSVAVNRENRGIKFVREGEKARGAGFRHNMGQLRVGGAWEMRADLNSQLVVPGEIASTRLRPDLLLWSEPEKAVYFIELTVPWEDRVEEANERKRAKYAELAADAEQNGWKAYVRPVEVGCRGFVAKSVIALLSELGIRGRSQRTAVSNMSRAAERASDWLWVRRKHASWGAN

SEQ ID NO: 2352 - protein, 1184 aa, Planiliza haematocheilus
MERQLTGGNSPHRGYSGLAAHCGSSPGFNKPWTTPQVATNTINDKIPLESARAGAEDDSLWTDTAFDPGLNLTLSRQGTLLEATSSDGDGKKQQVCVCGWQKLTTMKGLRIHQGRKKCLAEGTQGPRIDSYFLRSALSQSVEVQRQELTHSSQDISTPNVEVGASTEADREVSQPKREKISSQKGRIKWPGAADIRQWEDINSDLVCVLGRLKGTAESKLEKMGDLIYDYGKERFGVAEKQKKQKGQVVRSRRQQEIDRLIQERRLLKKQWRKATVEEKEGIDCLQADVRKRLSALRRAENIRKNRKRKERARIAFYKDPFRFVKSLFSKEKNGSLTVPKEKLEEYLEEVHKDADRFRKLSLPSDIPPIGEIVSQCDDSPPRWKEVQEVVRRARASSAPGPNGVPYRLYKSAPDVLRFLWKLMKVVWKKQVIPKAWRRAGGIFIPKERDSLEISQFRPISLLNVEGKIFFSVVAQRLSSYLVKNGLVDTSVQKAGIPGFSGCLEHTSMIWHQIQSAKQEKRDLHVVFLDLANAFGSVPHSLLWEAFDFFRVPGSIKNLVKAYFLDIQLCFTTAEYTTAWQQLEVGIMAGCTISPLAFTMAMEVIIRASKWVVGGERLQGGLRLPPIRAYMDDMTTTTSTAPCTRRLLDKLNSNLQWARMKVKPTKSRSISIIKGKVVDKKFFINDEVIPTVLEKPVKSLGRWYDASLSDKAQFEGLRQEMIQGISSIDRSGLPGKLKLWCWQFGLLPRLMWPLTVYEVALSKVEKLERMSNSFIRKWLGVPRCLSSTALYGKGILELPVTCLTEEFKCTKVRLEMTLTQSKDPVVRSVAPTIKTGRKWKAKEAVQQAQAALKHRDIIGHVQQGRGGLGLCAGKPLWSKASAVERRKMIVEEVQRQEEMVRCSKAVSQAKQGQWVNWESVEKRKVKWRELWSMEASRIRFMLGATYDVLPTPQNLNQWVGEDAACPLCTCVCTLSHILTGCKVSLSQGRYTWRHNQVLKCLAAAIEEKRVNVNSVAVNRENRGIKFVREGEKARGAGFRHNMGQLRVGGAWEMRADLNSQLVVPGEIASTRLRPDLLLWSEPEKAVYFIELTVPWEDRVEEANERKRAKYAELAADAEQNGWKAYVRPVEVGCRGFVAKSVIALLSELGIRGRSQRTAVSNMSRAAERASDWLWVRRKHASWGAN

SEQ ID NO: 2353 - protein, 996 aa, Planiliza haematocheilus
MFYPFKQPDIITAISDLVCVLGRLKGTAESKLEKMGDLIYDYGKERFGVAEKQKKQKGQVVRSRRQQEIDRLIQERRLLKKQWRKATVEEKEGIDCLQADVRKRLAALRRAENIRKNRKRKERARIAFYKDPFRFVKSLFSKEKNGSLTVPKEKLEEYLEEVHKDADRFRKLSLPSDIPPIGEIVSQCDDSPPRWKEVQEVVRRARASSAPGPNGVPYRLYKSAPDVLRFLWKLMKVVWKKQVIPKAWRRAGGIFIPKERDSLEISQFRPISLLNVEGKIFFSVVAQRLSSYLVKNGLVDTSVQKAGIPGFSGCLEHTSMIWHQIQSAKQEKRDLHVVFLDLANAFGSVPHSLLWEAFDFFRVPGSIKNLVKAYFLDIQLCFTTAEYTTAWQQLEVGIMAGCTISPLAFTMAMEVIIRASKWVVGGERLQGGLRLPPIRAYMDDMTTTTSTAPCTRRLLDKLNSNLQWARMKVKPTKSRSISIIKGKVVDKKFFINDEVIPTVLEKPVKSLGRWYDASLSDKAQFEGLRQEMTQGISSIDRSGLPGKLKLWCWQFGLLPRLMWPLTVYEVALSKVEKLERMSNSFIRKWLGVPRCLSSTALYGKGILELPVTCLTEEFKCTKVRLEMTLTQSKDPVVRSVAPTIKTGRKWKAKEAVQQAQAALKHRDIIGHVQQGRGGLGLCAGKPLWSKASAVERRKMIVEEVQRQEEMVRCSKAVSQAKQGQWVNWESVEKRKVKWRELWSMEASRIRFMLGATYDVLPTPQNLNQWVGEDAACPLCTCVCTLSHILTGCKVSLSQGRYTWRHNQVLKCLAAAIEEKRVNVNSVAVNRENRGIKFVREGEKARGAGFRHNMGQLRVGGAWEMRADLNSQLVVPGEIASTRLRPDLLLWSEPEKAVYFIELTVPWEDRVEEANERKRAKYAELAADAEQNGWKAYVRPVEVGCRGFVAKSVIALLSELGIRGRSQRTAVSNMSRAAERASDWLWVRRKHASWGAN

SEQ ID NO: 2354 - protein, 1184 aa, Planiliza haematocheilus
MERQLTGGNSPHRGYSGLAAHCGSSPGFNKPWTTPQVATNTTNDKIPLESARAGAEDDSLWTDTAFDPGLNLTLSRQGTLLEAISSDGDGKKQQVCVCGWQKLTTMKGLRIHQGRKKCLAEGTQGPRIDSYFLRSALSQSVEVQRQELTHSSQDISTPNVEVGASTEADREVSQPKREKISSQKGRIKWPGAADIRQWEDINSDLVCVLGRLKGTAESKLEKMGDLIYDYGKERFGVAEKQKKQQGQVVRSRRQQEIDRLIQERRLLKRQWRKATVEEKEGIDCLQADVRKRLAALRRAENIRKNRKRKERARVAFYKDPFRFVKSLFSKEKNGSLTVPKEKLEEYLEEVHKDADRFRKLSLSSDIPPIGEIVSQCDDSPPRWKEVQEVVRRARASSAPGPNGVPYRLYKSAPDVLRFLWKLMKVVWKKQVIPKAWRRAGGIFIPKERDSLEISQFRPISLLNVEGKIFFSVVAQRLSSYLVKNGLVDTSVQKAGIPGFSGCLEHTSMIWHQIQSAKQEKRDLHVVFLDLANAFGSVPHSLLWEAFDFFRVPGSIKNLVKAYFLDIQLCFTTAEYTTAWQQLEVGIMAGCTISPLAFTMAMEVIIRASKWVVGGERLQGGLRLPPIRAYMDDMTTTTSTAPCTRRLLDKLNSNLQWARMKVKPTKSRSISIIKGKVVDKKFFINDEVIPTVLEKPVKSLGRWYDASLSDKAQFEGLRQEMIQGISSIDWSGLPGKLKLWCWQFGLLPQLMWPLTVYEVALSKVEKLERMSNSFIRKWLGVPRCLSSTALYGKGILELPVTCLTEEFKCTKVRLEMTLTQSKDPVVRSVAPTIKTGRKWKAKEAVQQAQAALKHRDIIGHVQQGRGGLGLCAGKPLWSKASAVERRKMIVEEVQRQEEMVRCSKAVSQAKQGQWVNWESVEKRKVKWRELWSMEASRIRFMLGATYDVLPTPQNLNQWVGEDAACPLCICVCTLSHILTGCKVSLSQGHYTWRHNQVLKCLAAAIEEKRVNVNSVAVNRENRCIKFIREGEKARGAGFRHNTGQLRVGGAWEMRADLNSQLVVPGEIASTRLRPDLLLWSEPEKVVYFIELTVPWEDRVEEANERKRAKYAELAADAEQNGWKAYVRPVEVGCRGFVAKSVIALLSELGIRGRSQRTAVSNMSRAAERASDWLWVRRKHASWGAN

SEQ ID NO: 2355 - protein, 1184 aa, Planiliza haematocheilus
MERQLTGGNSPHRGYSGLAAHCGSSPGFNKPWTTPQVATNTINDKIPLESARAGAEDDSLWTDTAFDPGLNLTLSRQGTLLEATSSDGDGKKQQVCVCGWQKLTTMKGLRIHQGRKKCLAEGTQGPRIDSYFLRSALSQSVEVQRQELTHSSQDISTPNVEVGASTEADREVSQPKREKISSQKGRIKWPGAADIRQWEDINSDLVCVLGRLKGTAESKLEKMGDLIYDYGKERFGVAEKQKKQKGQVVRSRRQQEIDRLIQERRLLKKQWRKATVEEKEGIDCLQADVRKRLAALRRAENIRKNRKRKERARIAFYKDPFRFVKSLFSKEKNGSLTVPKEKLEEYLEEVHKDADRFRKLSLPSDIPPIGEIVSQCDDSPPRWKEVQEVVRRARASSAPGPNGVPYRLYKSAPDVLRFLWKLMKVVWKKQVIPKAWRRAGGIFIPKERDSLEISQFRPISLLNVEGKIFFSVVAQRLSSYLVKNGLVDTSVQKAGIPGFSGCLEHTSMIWHQIQSAKQEKRDLHVVFLDLANAFGSVPHSLLWEAFDFFRVPGSIKNLVKAYFLDIQLCFTTAEYTTAWQQLEVGIMAGCTISPLAFTMAMEVIIRASKWVVGGERLQGGLRLPPIRAYMDDMTTTTSTAPCTRRLLDKLNSNLQWARMKVKPTKSRSISIIKGKVVDKKFVINDEVIPTVLEKPVKSLGRWYDASLSDKAQFEGLRQEMIQGISSIDRSGLPGKLKLWCWQFGLLPRLMWPLTVYEVALSKVEKLERMSNSFIRKWLGVPRCLSSTALYGKGILELPVTCLTEEFKCTKVRLEMTLTQSKDPVVRSVAPTIKTGRKWKAKEAVQQAQAALKHRDIIGHVQQGRGGLGLCAGKPLWSKASAVERRKMIVEEVQRQEETVRCSKAVSQAKQGQWVNWESVEKRKVKWRELWSMEASRIRFMLGATYDVLPTPQNLNQWVGEDAACPLCTCVCTLSHILTGCKVSLSQGRYTWRHNQVLKCLAAAIEEKRVNVNSVAVNRENRGIKFVREGEKARGAGFRHNMGQLRVGGAWEMRADLNSQLVVPGEIASTRLRPDLLLWSEPEKAVYFIELTVPWEDRVEEANERKRAKYAELAADAEQNGWKAYVRPVEVGCRGFVAKSVIALLSELGIRGRSQRTAVSNMSRAAERASDWLWVRRKHASWGAN

SEQ ID NO: 2356 - protein, 1124 aa, Gadus morhua
MMDTGNDPGTNLTMSKEGMSMEAVSSNLTEKKLQVCVCGWQKVTTMRGLRIHQGRMKCLVEGTQGTRIDSYFLRSVLSQSVEVQRQEVTHSSQDISTPDVVVESSAEAEREASQPRREKMSGHKPGVRWPGAAEGRTWEVVDSDLVSILGRLKGTAESKLEKMGDIIYSYGQERFGIVEKRTKRQHEVVKSRRQQEIDRLIQERRQLKKQWRKATDNEKEGIDCLQAAVRERLAVLRRAENFRKNRKKKSRARVAFYKDPFKFVKSLFDRQKSGCLMEPKQKLEEYLEGVHKDRERFREMVLPADIPLIGELSSQCDDSPPRWKEVQDVIKRAKSSSAPGPNGVPYRLYKSAPDVLRFLWKLMRIVWKKHSIPKAWRRAGGIFIPKERDSVEINQFRPISLLNVEGKVFFSIVARRLTSYLENNGLIDTTVQKAGIPGFSGCLEHTSMIWHQIQLAKRERRDLHVVFLDLANAFGSVPHSLLWEAFDYFRIPGSIKSLVKAYFLDIQLCFNTAEYTTGWQQLEIGIMAGCTISPLAFTMAMEVIIRASKWVVGGEKFQGGPRLPPIRAFMDDMTTMTSTAPCTRRLLDKLNSNLQWARMKVKPSKSRSLSIVKGKVVDKKFAINEEVMPTVLEKPVKSLGRWYDASLSDKAQVEELRQETRQGIAKIDKSGLPGKLKLWCLQFGLFPRLMWPLTVYEVPLSKVERMEKMINSFVRKWLGVPRCLSSVALYGKGIVELPISNLTEEFKCAKVRLEMTLTQSKDPVVRRVAPTVNAGRKWKPKQAVQQAQSALRHRDIMGHVQHGRGGLGRDVGKPSWGKASAGERRKMVVEEIHRQEEIVRCTKAVSQAKQGQWVNWEGVEKKKIKWRDLWSMEASRIRFMIGATYDVLPSPQNLNQWYGEDETCTLCSCVCSLRHILSGCKVSLSQGRYTWRHNQVLKCLAEAVDDKRGEANSSVASKEGRQINFVHQGEKARPFRGRHRVGQLSNGGAWELKADLIQQVVVPPHIVSTRLRPDMLLWSDLEKIVYFIELTVPWEDRVEVANELKKAKYAEMAEEAAQRGWSSRLRPIEIGARGFVARSAISLLTELGICGRSLRQAVSNMSVAAERASEWLWVRRKHTSWGAS

SEQ ID NO: 2357 - protein, 1124 aa, Gadus morhua
MMDTGIDPGTNLTMSKEGMSMEAVSSNLTEKKLQVCVCGWQKVTTMRGLRIHQGRMKCLVEGTQGTRIDSYFLRSVLSQSVEVQRQEVTHSSQDISTPDVVVESSTEAEREASQPRREKMSGHKPGVRWPGAAEGRTWEVVNSDLVSILGRLKGTAESKLEKMGDIIYSYGQERFGIVEKRTKRQHEVVKSRRQQEIDRLIQERRQLKKQWRKATDNEKEGIDCLQAAVRERLAVLRRAENIRKNRKKKSRARVAFYKDPFKFVKSLFDRQKSGCLMEPKQKLEEYLEGVHKDRERFREMVLPADIPPIGELSSQCDDSPPRWKEVQDVIKRAKSSSAPGPNGVPYRLYKSAPDVLRFLWKLMRIVWKKHSIPKAWRRAGGIFIPKERDSVEINQFRPISLLNVEGKVFFSIVARRLTSYLENNGLIDTTVQKAGIPGFSGCLEHTSMIWHQIQLAKRERRDLHVVFLDLANAFGSVPHSLLWEAFDYFRIPGSIKSLVKAYFLDIQLCFNTEEYTTGWQQLEIGIMAGCTISPLAFTMAMEVIIRASKWVVGGEKFQGGPRLPPIRAFMDDMTTMTSTAPCTRRLLDKLNSNLQWARMKVKPSKSRSLSIVKGKVVDKKFAINEEVMPTVLEKPVKSLGRWYDASLSDKAQVEELRQETRQGIAKIDKSGLPGKLKLWCLQFGLLPRLMWPLTVYEVPLSKVERMEKMINSFVRKWLGVPRCLSSVALYGKGIVELPISNLTEEFKCAKVRLEMTLTQSKDPVVRRVAPTVNAGRKWKPKQAVQQAQSALRHRDIMGHVQHGRGGLGRDVGKPSWGKASAGERRKMVVEEIHRQEEIVRCTKAVSQAKQGQWVNWEGVEKKKIKWRDLWSMEASRIRFMIGATYDVLPSPQNLNQWYGEDETCTLCSCVCSLRHILSGCKVSLSQGRYTWRHNQVLKCLAEAVDDKRGEANSSAASKEGRQINFVHQGEKARPFRGRHRVGQLSNGGAWELKADLIQQVVVPPHIVSTRLRPDMLLWSDLEKIVYFIELTVPWEDRVEVANELKKAKYAEMAEEAAQRGWSSRLRPIEIGARGFVARSAISLLTELGICGRSLRQAVSNMSVAAERASEWLWVRRKHTSWGAS

SEQ ID NO: 2358 - protein, 1111 aa, Planiliza haematocheilus
MERHVTGGNSRHRGYSGLAAHCGSSPGFNKPWTTPQVATNTINDKIPLESARAGAEDDSLWTDTAFDPGLNLTLSRQGTLLEATSSDGDGKKQQVCVCGWQKLTTMKGLRIHQGRKKCLAEGTQGPRIDSYFLRSALSQSVEVQRQELTHSSQDISTPNVEVGASTEADREVSQPKREKISSQKGRIKWPGAADIRQWEDINSDLVCVLGRLKGTAESKLEKMGDLIYDYGKERFGVAEKQKKQKGQVVRSRRQQEIDRLIQERRLLKKQWRKATVEEKEGIDCLQADVRKRLAALRRAENIRKNTKRKERARIAFYKDPFRFVKSLFSKEKNGSLTVPKEKLEEYLEEVHKDADRFRKLSLPSDIPPIGEIVSQCDDSPPRWKEVQEWVRRARASSAPGPNGVPYRLYKSAPDVLRFLWKLMKVVWKKQVIPKAWRRAGGIFIPKERDSLEISQFRPISLLNVEGKIFFSVVAQRLSSYLVKNGLVDTSVQKAGIPGFSGCLEHTSMIWHQIQSAKQEKRDLHVVFLDLANAFGSVPHSLLWEAFDFFRVPGSIKNLVKAYFLDIQLCFTTAEYTTAWQQLEVGIMAGCTISPLAFTMAMEVIIRASKWVVGGERLQGGLRLPPIRAYMDDMTTTTSTAPCTRRLLDKLNSNLQWARMKVKPTKSRSISIIKGKVVDKKFFINDEVIPTVLEKPVKSLGRWYDASLSDKAQFEGLRQEMIQGISSIDRSGLPGKLKLWCWQFGLLPRLMWPLTVYEVALSKVEKLERMSNSFIRKWLGVPRCLSSTALYGKGILELPVTCLTEEFKCTKVRLEMTLTQSKDPVVRSVAPTIKTGRKWKAKEAVQQAQAALKHRDIIGHVQQGRGGLGLCAGKPLWSKASAVERRKMIVEEVQRQEEMVRCSKAVSQAKQGQWVNWESVEKRKVKWRELWSMEASRIRFMLGATYDVLPTPQNLNQWVGEDAACPLCTCVCTLSHILTGCKVSLSQGRYTWRHNQVLKCLAAAIEEKRVNVNSVAVNRENRGIKFVREGEKARGAGFRHNMGQLRVGGAWEMRADLNSQLVVPGEIASTRLRPDLLLWSEPEKAVYFIELTVPWEDRVEEANERKELSMQS

SEQ ID NO: 2359 - protein, 1079 aa, Planiliza haematocheilus
MKGLRIHQGRKKCLAEGTQGPRIDSYFLRSALSQSVEVQRQELTHSSQDISTPNVEVGASTEADREVSQPKREKISSQKGRIKWPGAADIRQWEDINSDLVCVLGRLKGTAESKLEKMGDLIYDYGKERFGVAEKQKKQKGQVVRSRRQQEIDRLIQERRLLKKQWRKATVEEKEGIDCLQADVRKRLAALRRAENIRKNRKRKERARIAFYKDPFRFVKSLFSKEKNGSLTVPKEKLEEYLEEVHKDADRFRKLSLPSDIPPIGEIVSQCDDSPPRWKEVQEVVRRARASSAPGPNGVPYRLYKSAPDVLRFLWKLMKVVWKKQVIPKAWRRAGGIFIPKERDSLEISQFRPISLLNVEGKIFFSVVAQRLSSYLVKNGLVDTSVQKAGIPGFSGCLEHTSMIWHQIQSAKQEKRDLHVVFLDLANAFGSVPHSLLWEAFDFFRVPGSIKNLVKAYFLDIQLCFTTAEYTTAWQQLEVGIMAGCTISPLAFTMAMEVIIRASKWVVGGERLQGGLRLPPIRAYMDDMTTTTSTAPCIRRLLDKLNSNLQWARMKVKPTKSRSISIIKGKVVDKKFFINDEVIPTVLEKPVKSLGRWYDASLSDKAQFEGLRQEMIQGISSIDRSGLPGKLKLWCWQFGLLPRLMWPLTVYEVALSKVEKLERMSNSFIRKWLGVPRCLSSTALYGKGILELPVTCLTEEFKCTKVRLEMTLTQSKDPVVRSVAPTIKTGRKWKAKEAVQQAQAALKHRDIIGHVQQGRGGLGLCAGKPLWSKASAVERRKMIVEEVQRQEEMVRCSKAVSQAKQGQWVNWESVEKRKVKWRELWSMEASRIRFMLGATYDVLPTPQNLNQWVGEDAACPLCTCVCTLSHILTGCKVSLSQGRYTWRHNQVLKCLAAAIEEKRVNVNSVAVNRENRGIKFVREGEKARGAGFRHNMGQLRVGGAWEMRADLNSQLVVPGEIASTRLRPDLLLWSEPEKAVYFIELTVPWEDRVEEANERKRAKYAELAADAEQNGWKAYVRPVEVGCRGFVAKSVIALLSELGIRGRSQRTAVSNMSRAAERASDWLWVRRKHASWGAN

SEQ ID NO: 2360 - protein, 1184 aa, Planiliza haematocheilus
MERQLTGGNSPHRGYSGLAAHCGSSPGFNKPWTTPQVATNTINDKIPLESARAGAEDDSLWTDTAFDPGLNLTLSRQGTLLDATSSDGDGKKQQVCVCGWQKLTTMKGLRIHQGRKKCLAEGTQGPRIDSYFLRSALSQSVEVQRQELTHSSQDISTPNVEVGASTEADREVSQPKREKISSQKGRIKWPGAADIRQWEDINSDLVCVLGRLKGTAESKLEKMGDLIYDYGKERFGVAEKQKKQKGQVVRSRRQQEIDRLIQERRLLKRQWRKATVEEKEGIDCLQADVRKRLAALRRAENIRKNRKRKERARIAFYKDPFRFVKSLFSKEKNGSLTVPKEKLEEYLEEVHKDADRFRKLSLPSDIPPIGEIVSQCDDSPPRWKEVQEVVRRARASSAPGPNGVPYRLYKSAPDVLRFLWKLMKVVWKKQVIPKAWRRAGGIFIPKERDSLEISQFRPISLLNVEGKIFFSVVAQRLSSYLVKNGLVDTSVQKAGIPGFSGCLEHTSMIWHQIQSAKQEKRDLHVVFLDLANAFGSVPHSLLWEAFDFFRVPGSIKNLVKAYFLDIQLCFTTAEYTTAWQQLEVGIMAGCTISPLAFTMAMEVIIRASKWVVGGERLQGGLRLPPIRAYMDDMTTTTSTAPCTRRLLDKLNSNLQWARMKVKPTKSRSISIIKGKVVDKKFFINDEVIPTVLEKPVKSLGRWYDASLSDKAQFEGLRQEMIQGISSIDRSGLPGKLKLWCWQFGLLPRLMWPLTVYEVALSKVEKLERMSNSFIRKWLGVPRCLSSTALYGKGILELPVTCLTEEFKCTKVRLEMTLTQSKDPVVRSVAPTIKTGRKWKAKEAVQQAQAALKHRDIIGHVQQGRGGLGLCAGKPLWSKASAVERRKMIVEEVQRQEEMVRCSKAVSQAKQGQWVNWESVEKRKVKWRELWSMEASRIRFMLGATYDVLPTPQNLNQWVGEDAACPLCTCVCTLSHILTGCKVSLSQGRYTWRHNQVLKCLAAAIEEKRVNVNSVAVNRENRGIKFVREGEKARGAGFRHNMGQLRVGGAWEMRADLNSQLVVPGEIASTRLRPDLLLWSEPEKAVYFIELTVPWEDRVEEANERKRAKYAELAADAEQNGWKAYVRPVEVGCRGFVAKSVIALLSELGIRGRSQRTAVSNMSRAAERASDWLWVRRKHASWGAN

SEQ ID NO: 2361 - protein, 1184 aa, Planiliza haematocheilus
MERQLTGGNSPHRGYSGLAAHCGSSPGFNKPWTTPQVATNTINDKIPLESARAGAEDDSLWTDTAFDPGLNLTLSRQGTLLEATSSDGDGKKQQVCVCGWQKLTTMKGLRIHQGRKKCLAEGTQGPRIDSYFLRSALSQSVEVQRQELTHSSQDISTPNVEVGASTEADREVSQPKREKISSQKGRIKWPGAADIRQWEDINSDLVCVLGRLKGTAESKLEKMGDLIYDYGKERFGVAEKQKKQKGQVVRSRRQQEIDRLIQERRLLKKQWRKATVEEKEGIDCLQADVRKRLAALRRAENIRKNRKRKERARIAFYKDPFRFVKSLFSKEKNGSLTVPKEKLEEYLEEVHKDADRFRKLSPPSDIPPIGEIVSQCDDSPPRWKEVQEVVRRARASSAPGPNGVPYRLYKSAPDVLRFLWKLMKVVWKKQVIPKAWRRAGGIFIPKERDSLEISQFRPISLLNVEGKIFFSVVAQRLSSYLVKNGLVDTSVQKAGIPGFSGCLEHTSMIWHQIQSAKQEKRDLHVVFLDLANAFGSVPHSLLWEAFDFFRVPGSIKNLVKAYFLDIQLCFTTAEYTTAWQQLEVGIMAGCTISPLAFTMAMEVIIRASKWVVGGERLQGGLRLPPIRAYMDDMTTTTSTAPCTRRLLDKLNSNLQWARMKVKPTKSRSISIIKGKVVDKKFFINDEVIPTVLEKPVKSLGRWYDASLSDKAQFEGLRQEMIQGISSIDRSGLPGKLKLWCWQFGLLPRLMWPLTVYEVALSKVEKLERMSNSFIRKWLGVPRCLSSTALYGKGILELPVTCLTEEFKCTKVRLEMTLTQSKDPVVRSVAPTIKTGRKWKAKEAVQQAQAALKHRDIIGHVQQGRGGLGLCAGKPLWSKASAVERRKMIVEEVQRQEEMVRCSKAVSQAKQGQWVNWESVEKRKVKWRELWSMEASRIRFMLGATYDVLPTPQNLNQWVGEDAACPLCTCVCTLSHILTGCKVSLSQGRYTWRHNQVLKCLAAAIEEKRVNVNSVAVNRENRGIKFVREGEKARGAGFRHNMGQLRVGGAWEMRADLNSQLVVPGEIASTRLRPDLLLWSEPEKAVYFIELTVPWEDRVEEANERKRAKYAELAADAEQNGWKAYVRPVEVGCRGFVAKSVIALLSELGIRGRSQRTAVSNMSRAAERASDWLWVRRKHASWGAN

SEQ ID NO: 2362 - protein, 1184 aa, Planiliza haematocheilus
MERQLTGGNSPHRGYSGLAAHCGSSPGFNKPWTTPQVATNTINDKIPLESARAGAEDDSLWTDTAFDPGLNLTLSRQGTLLEATSSDGDGKKQQVCVCGWQKLTTMKGLRIHQGRKKCLAEGTQGPRIDSYFLRSALSQSVEVQRQELTHSSQDISTPNVEVGASTEADREVSQPKREKISSQKGRIKWPGAADIRQWEDINSDLVCVLGRLKGTAESKLEKMGDLIYDYGKERFGVAEKQKKQKGQVVRSRRQQEIDRLIQERRLLKKQWRKATVEEKEGIDCLQADVRKRLAALRRAENIRKNRKRKERARIAFYKDPFRFVKSLFSKEKNGSLTVPKEKLEEYLEEVHKDADRFRKLSLPADIPPIGEIVSQCDDSPPRWKEVQEVVRRARASSAPGPNGVPYRLYKSAPDVLRFLWKLMKVVWKKQVIPKAWRRAGGIFIPKERDSLEISQFRPISLLNVEGKIFFSVVAQRLSSYLVKNGLVDTSVQKAGIPGFSGCLEHTSMIWHQIQSAKQEKRDLHVVFLDLANAFGSVPHSLLWEAFDFFRVPGSIKNLVKAYFLDIQLCFTTAEYTTAWQQLEVGIMAGCTISPLAFTMAMEVIIRASKWVVGGERLQGGLRLPPIRAYMDDMTTTTSTAPCTRRLLDKLNSNLQWARMKVKPTKSRSISIIKGKVVDKKFFINDEVIPTVLEKPVKSLGRWYDASLSDKAQFEGLRQEMIQGISSIDRSGLPGKLKLWCWQFGLLPRLMWPLTVYEVALSKVEKLERMSNSFIRKWLGVPRCLSSTALYGKGILELPVTCLTEEFKCTKVRLEMTLTQSKDPVVRSVAPTIKTGRKWKAKEAVQQAQAALKHRDIIGHVQQGRGGLGLCAGKPLWSKASAVERRKMIVEEVQRQEEMVRCSKAVSQAKQGQWVNWESVEKRKVKWRELWSMEASRIRFMLGATYDVLPTPQNLNQWVGEDAACPLCTCVCTLSHILTGCKVSLSQGRYTWRHNQVLKCLAAAIEEKRVNVNSVAVNRENRGIKFVREGEKARGAGFRHNMGQLRVGGAWEMRADLNSQLVVPGEIASTRLRPDLLLWSEPEKAVYFIELTVPWEDRVEEANERKRAKYAELAADAEQNGWKAYVRPVEVGCRGFVAKSVIALLSELGIRGRSQRTAVSNMSRAAERASDWLWVRRKHASWGAN

SEQ ID NO: 2363 - protein, 1184 aa, Planiliza haematocheilus
MERQLTGGNSPHRGYSGLAAHCGSSPGFNKPWTTPQVATNTINDKIPLESARAGAEDDSLWTDTAFDPGLNLTLSRQGTLLEATSSDGDGKKQQVCVCGWQKLTTMKGLRIHQGRKKCLAEGTQGPRIDSYFLRSALSQSVEVQRQELTHSSQDISTPNVEVGASTEADREVSQPKREKISSQKGRIKWPGAADIRQWEDINSDLVCVLGRLKGTAESKLEKMGDLIYDYGKERFGVAEKQKKQKGQVVRSRRQQEIDRLIQERRLLKKQWRKATVEEKEGIDCLQADVRKRLAALRRAENIRKNRKRKERARIAFYKDPFRFVKSLFSKEKNGSLTVPKEKLEEYLEEVHKDADRFRKLSLPSDIPPIGEIVSQCDDSPPRWKEVQEVVRRARASSAPGPNGVPYRLYKSAPDVLRFLWKLMKVVWKKQVIPKAWRRAGGIFIPKERDSLEISQFRPISLLNVEGKIIFSVVAQRLSSYLVKNGLVDTSVQKAGIPGFSGCLEHTSMIWHQIQSAKQEKRDLHVVFLDLANAFGSVPHSLLWEAFDFFRVPGSIKNLVKAYFLDIQLCFTTAEYTTAWQQLEVGIMAGCTISPLAFTMAMEVIIRASKWVVGGERLQGGLRLPPIRAYMDDMTTTTSTAPCTRRLLDKLNSNLQWARMKVKPTKSRSISIIKGKVVDKKFFINDEVIPTVLEKPVKSLGRWYDASLSDKAQFEGLRQEMIQGISSIDRSGLPGKLKLWCWQFGLLPRLMWPLTVYEVALSKVEKLERMSNSFIRKWLGVPRCLSSTALYGKGILELPVTCLTEEFKCTKVRLEMTLTQSKDPVVRSVAPTIKTGRKWKAKEAVQQAQAALKHRDIIGHVQQGRGGLGLCAGKPLWSKASAVERRKMIVEEVQRQEEMVRCSKAVSQAKQGQWVNWESVEKRKVKWRELWSMEASRIRFMLGATYDVLPTPQNLNQWVGEDAACPLCTCVCTLSHILTGCKVSLSQGRYTWRHNQVLKCLAAAIEEKRVNVNSVAVNRENRGIKFVREGEKARGAGFRHNMGQLRVGGAWEMRADLNSQLVVPGEIASTRLRPDLLLWSEPEKAVYFIELTVPWEDRVEEANERKRAKYAELAADAEQNGWKAYVRPVEVGCRGFVAKSVIALLSELGIRGRSQRTAVSNMSRAAERASDWLWVRRKHASWGAN

SEQ ID NO: 2364 - protein, 1079 aa, Planiliza haematocheilus
MKGLRIHQGRKKCLAEGTQGPRIDSYFLRSALSQSVEVQRQELTHSSQDISTPNVEVGASTEADREVSQPKREKISSQKGRIKWPGAADIRQWEDINSDLVCVLGRLKGTAESKLEKMGDLIYDYGKERFGVAEKQKKQKGQVVRSRRQQEIDRLIQERRLLKKQWRKATVEEKEGIDCLQADVRKRLAALRRAENIRKNRKRKERARIAFYKDPFRFVKSLFSKEKNGSLTVPKEKLEEYLEEVHKDADRFRKLSLPSDIPPIGEIVSQCDDSPPRWKEVQEVVRRARASSAPGPNGVPYRLYKSAPDVLRFLWKLMKVVWKKQVIPKAWRRAGGIFIPKERDSLEISQFRPISLLNVEGKIFFSVVAQRLSSYLVKNGLVDTSVQKAGIPGFSGCLEHTSMIWHQIQSAKQEKRDLHVVFLDLANAFGSVPHSLLWEAFDFFRVPGSMKNLVKAYFLDIQLCFTTAEYTTAWQQLEVGIMAGCTISPLAFTMAMEVIIRASKWVVGGERLQGGLRLPPIRAYMDDMTTTTSTAPCTRRLLDKLNSNLQWARMKVKPTKSRSISLIKGKVVDKKFFINDEVIPTVLEKPVKSLGRWYDASLSDKAQFEGLRQEMIQGISSIDRSGLPGKLKLWCWQFGLLPRLMWPLTVYEVALSKVEKLERMSNSFIRKWLGVPRCLSSTALYGKGILELPVTCLTEEFKCTKVRLEMTLTQSKDPVVRSVAPTIKTGRKWKAKEAVQQAQAALKHRDIIGHVQQGRGGLGLCAGKPLWSKASAVERRKMIVEEVQRQEEMVRCSKAVSQAKQGQWVNWESVEKRKVKWRELWSMEASRIRFMLGATYDVLPTPQNLNQWVGEDAACPLCTCVCTLSHILTGCKVSLSQGRYTWRHNQVLKCLAAAIEEKRVNVNSVAVNRENRGIKFVREGEKARGAGFRHNMGQLRVGGAWEMRADLNSQLVVPGEIASTRLRPDLLLWSEPEKAVYFIELTVPWEDRVEEANERKRAKYAELAADAEQNGWKAYVRPVEVGCRGFVAKSVIALLSELGIRGRSQRTAVSNMSRAAERASDWLWVRRKHASWGAN

SEQ ID NO: 2365 - protein, 1079 aa, Planiliza haematocheilus
MKGLRIHQGRKKCLAEGTQGPRIDSYFLRSALSQSVEVQRQELTHSSQDISTPNVEVGASTEADREVSQPKREKISSQKGRIKWPGAADIRQWEDINSDLVCVLGRLKGTAESKLEKMGDLIYDYGKERFGVAEKQKKQKGQVVRSRRQQEIDRLIQERRLLKKQWRKATVEEKEGIDCLQADVRKRLAALRRAENIRKNRKRKERARIAFYKDPFRFVKSLFSKEKNGSLTVPKEKLEEYLEEVHKDADRFRKLSLPSDIPLIGEIVSQCDDSPPRWKEVQEVVRRARASSAPGPNGVPYRLYKSAPDVLRFLWKLMKVVWKKQVIPKAWRRAGGIFIPKERDSLEISQFRPISLLNVEGKIFFSVVAQRLSSYLVKNGLVDTSVQKAGIPGFSGCLEHTSMIWHQIQSAKQEKRDLHVVFLDLANAFGSVPHSLLWEAFDFFRVPGSIKNLVKAYFLDIQLCFTTAEYTTAWQQLEVGIMAGCTISPLAFTMAMEVIIRASKWVVGGERLQGGLRLPPIRAYMDDMTTTTSTAPCTRRLLDKLNSNLQWARMKVKPTKSRSISIIKGKVVDKKFFINDEVIPTVLEKPVKSLGRWYDASLSDKAQFEGLRQEMIQGISSIDRSGLPGKLKLWCWQFGLLPRLMWPLTVYEVALSKVEKLERMSNSFIRKWLGVPRCLSSTALYGKGILELPVTCLTEEFKCTKVRLEMTLTQSKDPVVRSVAPTIKTGRKWKAKEAVQQAQAALKHRDIIGHVQQGRGGLGLCAGKPLWSKASAVERRKMIVEEVQRQEEMVRCSKAVSQAKQGQWVNWESVEKRKVKWRELWSMEASRIRFMLGATYDVLPTPQNLNQWVGEDAACPLCTCVCTLSHILTGCKVSLSQGRYTWRHNQVLKCLAAAIEEKRVNVNSVAVNRENRGIKFVREGEKARGAGFRHNMGQLRVGGAWEMRADLNSQLVVPGEIASTRLRPDLLLWSEPEKAVYFIELTVPWEDRVEEANERKRAKYAELAADAEQNGWKAYVRPVEVGCRGFVAKSVIALLSELGIRGRSQRTAVSNMSRAAERASDWLWVRRKHASWGAN

SEQ ID NO: 2366 - protein, 762 aa, Planiliza haematocheilus
MKVVWKKQVIPKAWRRAGGIFIPKERDSLEISQFRPISLLNVEGKIFFSVVAQRLSSYLVKNGLVDTSVQKAGIPGFSGCLEHTSMIWHQIQSAKQEKRDLHVVFLDLANAFGSVPHSLLWEAFDFFRVPGSIKNLVKAYFLDIQLCFTTAENTTAWQQLEVGIMAGCTISPLAFTMAMEVIIRASKWVVGGERLQGGLRLPPIRAYMDDMTTTTSTAPCTRRLLDKLNSNLQWARMKVKPTKSRSISIIKGKVVDKKFFINDEVIPTVLEKPVKSLGRWYDASLSDKAQFEGLRQEMIQGISSIDRSGLPGKLKLWCWQFGLLPRLMWPLTVYEVALSKVEKLERMSNSFIRKWLGVPRCLSSTALYGKGILELPVTCLTEEFKCTKVRLEMTLTQSKDPVVRSVAPTIKTGRKWKAKEAVQQAQAALKHRDIIGHVQQGRGGLGLCAGKPLWSKASAVERRKMIVEEVQRQEEMVRCSKAVSQAKQGQWVNWESVEKRKVKWRELWSMEASRIRFMLGATYDVLPTPQNLNQWVGEDAACPLCTCVCTLSHILTGCKVSLSQGRYTWRHNQVLKCLAAAIEEKRVNVNSVAVNRENRGIKFVREGEKARGAGFRHNTGQLRVGGAWEMRADLNSQLVVPGEIASTRLRPDLLLWSEPEKAVYFIELTVPWEDRVEEANERKRAKYAELAADAEQNGWKAYVRPVEVGCRGFVAKSVIALLSELGIRGRSQRTAVSNMSRAAERASDWLWVRRKHASWGAN

SEQ ID NO: 2367 - protein, 1121 aa, Alosa sapidissima
MVTDPGTNLITSKENMFVEATSSEKTEKKLQMCVCGWQKVTSLKGLKIHQGKKKCLVEGTQGPRIDSYFLRSASSQSVEVQRQEETHSSQDISTPVVEESSSTEAEREASQPRREKINGHRPGVRWPGAAECRMWEDVNSDLVSILGQLKGTAESKLEKMGDIIYSYGKERFGTIERRTKRQHEVVKSRRQQEIDKLIKERRQLKKQWRKATDDEKEGIDCLQADVRERLVVLRRAENIRKNRKKKSRARLAFYKDPFKFVKSLFVMQKSGSLLEPKQKLEEYLEGVHKDRERFREMVLPADIPPIGELSSQCDDSPPRWKEVQEVIKHARASSAPGPNGVPYRLYKNAPDVLRFLWQLMKIVWKKQSIPKAWRRAGGIFIPKEKDAVEINQFRPISLLNVEGKVFFSVVARRLTNYLERNKLIDTTVQKAGIPGFSRCLEHTSMIWHQIQLAKREKRDLHVVFLDLANAFGSVPHSLLWEAFDYFRIPGSIKSLVKAYFLDIQLCFTTADYTTGWQQLEIGIMAGCTISPLAFTMAMEVIIRASKWVVGGEKLQGGPRLPPIRAFMDDMTTLTTTVPCTNRLLGKLNSNLQWARMKVKPSKSRSLSIVKGKVTDKKFAINEEVIPTVLEKPVKSLGRWYDASLSDKSQVEDLRQVTRQGIAKIDKSGLPGKLKLWCLQFGLFPRLMWPLTVYEVPLSKVERLEKMINSFVRKWLGVPRCLSSVALYGKGIVELPISSLTEEFKCAKARLELTLTQSKDPVVRKVAPTVNAGRKWNPEQAVKQAQSALKHRDIMGHVQHGRESLGVGASKPLWSKASAGEKRKMVVEEMHRQEEAVRCTKAVSQAKQGQWVNWEGVEKRRIKWKDLWGMEAGKIKFMLGATYDVLPSPKNLSQWFGEDDKCILCSCVGSLHHILSGCKVSLTQGRYMWRHNQVLKCVAAAIEDKRREVNSLAASKGVRQINFVRQGDKPCSAKARCKTGQLKNGAGWEMKVDLGQQMAVPPHIVSTKLRPDVILWSDSEKIVYFIELTVPWEDRVEVANELKRAKYTEIAEEATKRGWSARLRPIEIGARGFVARSAIGLLSELGICGRSLRQVVSNMSLAAERASEWLWVRRSYPSWGAS

SEQ ID NO: 2368 - protein, 1121 aa, Alosa sapidissima
MVTDPGTNLITSKENMFVEATSSEKTEKKLQMCVCGWQKVTSLKGLKIHQGKKKCLVEGTQGPRIDSYFLRSASSQSVEVQRQEETHSSQDISTPVVEESSSTEAEREASQPRREKINGHRPGVRWPGAAECRMWEDVNSDLVSILGQLKGTAESKLEKMGDIIHSYGKERFGTIERRTKRQHEVVKSRRQQEIDKLIKERRQLKKQWRKATDDEKEGIDCLQADVRERLVVLRRAENIRKNMKKKSRARLAFYKDPFKFVKSLFVMQKSGNLSEPKQKLEEYLEGVHKDGERFREMVLPADIPPIGELSSQCDDSPPRWKEVQEVIKHARATSAPGPNGVPYRLYKNAPDVLRFLWQLMKIVWKKQSIPKAWRRAGGIFIPKEKDAVEINQFRPISLLNVEGKVFFSVVARRLTNYLERNKLIDTTVQKAGIPGFSGCLEHTSMIWHQIQLAKREKRDLHVVFLDLANAFGSVPHSLLWEAFDYFRIPGSIKSLVKAYFLDIQLCFTTADYTTGWQQLEIGIMAGCTISPLAFTMAMEVLIRASKWVVGGEKLQGGPRLPPIRAFMDDMTTLTTTVPCTNRLLGKLNSNLQWARMKVKPSKSRSLSIVKGKVTDKKFAINEEVIPTVLEKPVKSLGRWYDASLSDKSQVEDLRQVTRQGIAKIDKSGLPGKLKLWCLQFGLLPRLMWPLTVYEVPLSKVERLEKMINSFVRKWLGVPRCLSSVALYGKGIVELPISSLTEEFKCAKARLELTLTQSKDPVVRKVAPTVNAGRKWNPEQAVKQAQSALKHRDIMGHVQHGREGLGVGASKPLWSKASAGEKRKMVVEEMHRQEEAVRCTKAVSQAKQGQWVNWEGVEKRRIKWKDLWGMEAGKIKFMLGATYDVLPSPKNLSQWFGEDDKCILCSCVGSLHHILSGCKVSLTQGRYTWRHNQVLKCVAAAIEDKRREVNSLAASKGVRQINFVRQGDKPCSAKARCKTGQLKNGAGWEMKVDLGQQMAVPPHIVSTKLRPDVILWSDSEKIVYFIELTVPWEDRVEVANELKRAKYTEIAEEATKRGWSARLRPIEIGARGFVARSAIGLLSELGICGRSLRQVVSNMSLAAERASEWLWVRRSYPSWGAS

SEQ ID NO: 2369 - protein, 1184 aa, Planiliza haematocheilus
MERQLTGGNSPHRGYSGLAAHCGSSPGFNKPWTTPQVATNTINDKIPLESARAGAEDDSLWTDTAFDPGLNLTLSRQGTLLEATSSDGDGKKQQVCVCGWQKLTTMKGLRIHQGRKKCLAEGTQGPRIDSYFLRSALSQSVEVQRQELTHSSQDISTPNVEVGASTEADREVSQPKREKISSQKERIKWPGAADIRQWEDINSDLVCVLGRLKGTAESKLEKMGDLIYDYGKERFGVAEKQKKQKGQVVRSRRQQEIDRLIQERRLLKKQWRKATVEEKEGIDCLQADVRKRLAALRRAENIRKNRKRKERARVAFYKDPFRFVKSLFSKEKNGSLTVPKEKLEEYLEEVHKDADRFRKLSLPSDIPPIGEIVSQCDDSPPRWKEVQEVVRRARASSAPGPNGVPYRLYKSAPDVLRFLWKLMKVVWKKQVIPKAWRRAGGIFIPKERDSLEISQFRPISLLNVEGKIFFSVVAQRLSSYLVKNGLVDTSVQKAGIPGFSGCLEHTSMIWHQIQSAKQEKRDLHVVFLDLANAFGSVPHSLLWEAFDFFRVPGSIKNLVKAYFLDIQLCFTTAEYTTAWQQLEVGIMAGCTISPLAFTMAMEVIIRASKWVVGGERLQGGLRLPPIRAYMDDMTTTTSTAPCTRRLLDKLNSNLQWARMKVKPTKSRSISIIKGKVVDKKFFINDEVIPTVLEKPVKSLGRWYDASLSDKAQFEGLRQEMIQGISSIDRSGLPGKLKLWCWQFGLLPRLMWPLTVYEVALSKVEKLERMSNSFIRKWLGVPRCLSSTALYGKGILELPVTCLTEEFKCTKVRLEMTLTQSKDPVVRSVAPTIKTGRKWKAKEAVQQAQAALKHRDIIGHVQQGRGGLGLCAGKPLWSKASAVERRKMIVEEVQRQEEMVRCSKAVSQAKQGQWVNWESVEKRKVKWRELWSMEASRIRFMLGATYDVLPTPQNLNQWVGEDAACPLCTCVCTLSHILTGCKVSLSQGRYTWRHNQVLKCLAAAIEEKRVNVNSVAVNRENRGIKFVREGEKARGAGFRHNMGQLRVGGAWEMRADLNSQLVVPGEIASTRLRPDLLLWSEPEKAVYFIELTVPWEDRVEEANERKRAKYAELAADAEQNGWKAYVRPVEVGCRGFVAKSVIALLSELGIRGRSQRTAVSNMSRAAERASDWLWVRRKHASWGAN

SEQ ID NO: 2370 - protein, 947 aa, Alosa sapidissima
MGDIIYSYGKERFGTIERRTKRQHEVVKSRRQQEIDKLIKERRQLKKQWRKATDDEKEGIDCLQADVRERLVVLRRAENIRKNRKKKSRARLAFYKDPFKFVKSLFVMQKSGSLLEPKQKLEEYLEGVHKDGERFREMVLPADIPPIGELSSQCDDSPPRWKEVQEVIKRARASSAPGPNGVPYRLYKNAPDVLRFLWQLMKIVWKKQSIPKAWRRAGGIFIPKEKDAVEINQFRPISLLNVEGKVFFSVVARRLTNYLERNKLIDTTVQKAGIPGFSGCLEHTSMIWHQIQLAKREKRDLHVVFLDLANAFGSVPHSLLWEAFDYFRIPGSIKSLVKAYFLDIQLCFTTADYTTGWQQLEIGIMAGCTISPLAFTMAMEVIIRASKWVVGGEKLQGGPRLPPIRAFMDDMTTLTTTVPCTNRLLGKLNSNLQWARMKVKPSKSRSLSIVKGKVTDKKFAINEEVIPTVLEKPVKSLGRWYDASLSDKSQVEDLRQVTRQGIVKIDKSGLPGKLKLWCLQFGLLPRLMWPLTVYEVPLSKVERLEKMINSFVRKWLGVPRCLSSVALYGKGIVELPISSLTEEFKCAKARLELTLTQSKDPVVRKVAPTVNAGRKWNPEQAVKQAQSALKHRDIMGHVQHGREGLGVGASKPLWSKASAGDVRCTKAVSQAKQGQWVNWEGVEKRRIKWKDLWGMEAGKIKFMLGATYDVLPSPKNLSQWFGEDDKCILCSCVGSLHHILSGCKVSLTQGRYTWRHNQVLKCVAAAIEDKRREVNSLAASKGVRQINFVRQGDKPCSAKARCKTGQLKNGAGWEMKVDLGQQMAVPPHIVSTKLRPDVILWSDSEKIVYFIELTVPWEDRVEVANELKRAKYTEIAEEATKRGWSARLRPIEIGARGFVARSAIGLLSELGICGRSLRQVVSNMSLAAERASEWLWVRRSYPSWGAS

SEQ ID NO: 2371 - protein, 898 aa, Planiliza haematocheilus
MGDLIYDYGKERFGEAERQKKQKGKVVRSRRQQEIDRLIQERRLLKRQWRKATVEEKEGIDCLQADVRKRLAALRRAENIRKNRKRKERARLAFYKDPFRFVKSLFSKEKNGSLTVPKEKLEEYLEEVHKDTDRFRKLALPADIPPIGEIGSQCDDSPPRWKEVQEVVRRARASSAPGPNGVPYRLYKSAPDVLRFLWKLMKVVWKKQVIPKAWRRAGGIFIPKERDSLEISQFRPISLLNVEGKIFFSVVAQRLSIYLVKNGLVDTSVQKAGIPGFSGCLEHTSMIWHQIQSAKQEKRDLHVVFLDLANAFGSVPHSLLWEAFDFFRVPSSIKNLVKAYFLDIQLCFTTAEYTTAWQQLEVGIMAGCTISPLAFTMAMEVIIRASKWVVGGERLQGGLRLPPIRAYMDDMTTTTSTAPCTRRLLDKLNSNLQWARMKVKPTKSRSISIVKGKVVDKKFFINDEVIPTVLEKPVKSLGRWYDASLSDKAQFEGLRQEMIQGISSIDRSGLPGKLKLWCWQFGLLPRLMWPLTVYEVALSKVEKLERMSNSFIRKWLGVPRCLSSTALYGKGILELPVTCLTEEFKCAKVRLEMTLTQSKDPVVRSIAPTIKTGRKWKAKEAVQQAQAALKHHRPCTARAWRPRTVCRETSVEQGISSRKEKDDSGRQEETVRCSKAVSQAKQGQWVNWESIEKRKVKWRELWSMEASRIRFMLGATYDVLPTPQNLNQWVGEDAACPLCTCVCTLSHIMTGCKVSLSQGRYTWRHNQVLKCLAAAIEEKRVNVNSMAVNRENRGIKFVREGEKARGAGFRHNMGQLKVGGAWEMRADLNSHLVVPGEIASTRLRPDLLLWSEPEKVVYFIELTVPWEDRIEEANERKRAKYAELAADAEQNGRLMSAR

SEQ ID NO: 2372 - protein, 988 aa, Planiliza haematocheilus
MKSLRIHQGRKKCLAEGTQGPRIDSYFLRGALSQSVEVQRQELTHSSQDISTPNVEAGASTEADREVSQPKREKISSQKGRIKWPGAADIRQWEDINSDLVCVLGRLKGTAESKLEKMGDLIYDYGKERFGVAEKQKKQKGQVVRSRRQQEIDRLVQERRLLKRQWRKATVEEKEGIDCLQADVRKRLAALRRAENIRKNRKRKERARVAFYKDPFRFVKSLFSKEKNGSLTVPKEKLEEYLEEVHKDADRFRKLSLPSDIPPIGEIVSQCDDSPPRWKEVQEVVRRARASSAPGPNGVPYRLYKSAPDMLRFLWKLMKVVWKKQVIPKAWRRAGGIFVPKERDSLEISQFRPISLLNVEGKIFFSVVAQRLSSYLVKNGLVDTSVQKAGIPGFSGCLEHTSMIWHQIQSAKQEKRDLHVVFLDLANAFGSVPHSLLWEAFDFFRVPDSIKNLVKAYFLDIQLCFTTAEYTTAWQQLEVGIMAGCTISPLAFTMAMEVIIRASKWVVGGERLQGGLRLPPIRAYMDDMTTTTSTAPCTRRLLDKLNSNLQWARMKPTKSRSISIVKGKVVDKKFFINDEVIPTVLEKPVKSLGRWYDASLSDKAQFEGLRQEMIQGISSIDRSGLPGKLKSVAPTIKTGRKWKAKEAVQKAEAALKHRDIIGHVQQGRGGLGLCAGKPLWSKASAVERRKMIVEEVQRQEETVRCSKAVSQAKQGQWVNWESVEKRKVKWRELWSMEASRIRFMLGATYDVLPTPQNLNQWVGEDAACSLCTCVCTLSHILTGGKVSLSQGRYTWRHNPVLKCLAAAIEEKWVNVNYVAVNRENRCIKFVQEGEKARGAGFRHNTGQLRVGGAWEMRADLNSQLVVPGEIASTRLRPDLLLWSEPEKVVYFIELTVPWEDRVEEANERKRAKYAELAADAEQNGWKAYVRPVEVGCRGFVAKSVIALLSELGIRGRSQRTAVSNMSRAAERASDWLWVRRKHACWGAN

SEQ ID NO: 2373 - protein, 1167 aa, Daphnia sinensis
MVRRGLAHSTLPTFSPSRIEGDKIILKYPGKPTKCPRCEWTTLATNTRAMGSIHRHLETAHTLRLVKYWECGVCGFAGDGPTLKGHYQRLHSNPNPSPSIRFAGISSMDSSNRDSSDAVISLEEVTATEDEHAELSVVEIPAIEKSPGNVLSPANFTPSPILDIGREFANSFNTQNFSWLYELPPHEIVNPQILSEEILDPSPTPEILSFAPSQQSNRGRRRNSSEEQSQREDDFVSLWAPAFLSCETLNDLNDVLERCIADWLPKAQILQDPSPEQPRGNPDQRKRNQNRQMQRARRQIKKKAYEARKIQRLFNIYPRRAVREVLEDRSPSYDGTVQAAEEYLKRTYNRLRPSPQQCQSARELYDTCDWSQPSEDQMNFLNRAPTQQELEAKLRRAINTSPGVDGLEYRHLRAIDPNCILLETVCKMVWKLGIPNCWKTSRTVPIFKKGDTSDYSNFRPISLLPTIYKLFSGVISQRITEVASDLGWLSPEQKGFLPGVHGIQEHTQLLQTVVEETKTKRRHMCIAWLDMCNAFGSVPHAVLNELFTSLPIPEDLRRILVDIYSGNRMDFAVGKESIRIFPTAGVRQGDALSSPIFNLASEPLVRAGKSNINPGFLLFGSLVKTTAYADDIAVVTNSPSELQYILNVLSLTANTLGLQFNAGKCACLVFDKGKPSETQCRIGEQLIRCLGPDDQETYLGTPIGGKLRFRPPTDLIPNLDKIAASNLAPWQKLEIFRSHLLPSLSHHLASGRVLKDSLTQLDTECRKFLGLICNLPNHATVPFFYADRRVGGLGTCRLTDDADIWTIARAAQLLTCRDPTVRNICREQLHDTIRRGFRTEHPGVLPVGEYLSGSVDGGLYRLRYAEAGSNLWTLARQAAKRLGVRIDVSGDENLRIVADDVSVSPVKAVRGLRKVARQRYTRILLTDKSHQGVVANCLSLEGTSKDMARLVSCRTPLSFRDWRYLHRARLDILPLRGHSWFCSQEQDTSCRRCGKENETGYHVLNHCEEGLQLATKRHNTVQDLLETLLVKQGHDVTVNKAIPGQRLRPDVEFLLSGSRVMVDVVVCYDQPGSMENAYQRKIEKYSSLGRILPLVVGSLGSWNPRNEDIRSILGIDGRTWGAFRFKARLAAIQGSMEMVCAHFHHGATNPEDENLPLLHVETPFPVE

SEQ ID NO: 2374 - protein, 875 aa, Daphnia sinensis
MQRARRQIKKKAYEARKIQRLFNIYPRRAVREVLEDRSPSYDGTVQAAEEYLMRTYNRLRPSPQQCQSARELYDTCDWSQPSEDQMNFLNRAPTQQELEAKLRRAINTSPGVDGLEYRHLRAIDPNCILLETVCKMVWKLGIPNCWKTSRTVPIFKKGDTSDYSNFRPISLLPTIYKLFSGVISQRITEVASDLGWLSPEQKGFLPGVHGIQEHTQLLQTVVEETKTKRRHMCIAWLDMCNAFGSVPHAVLNELFTSLPIPEDLRRILVDIYSGNRMDFAVGKESIRIFPTAGVRQGDALSSPIFNLASEPLVRAGKSNINPGFLLFGSLVKTTAYADDIAVVTNSPSELQYILNVLSLTANTLGLQFNAGKCACLVFDKGKPSETQCRIGEQLIRCLGPDDQETYLGTPIGGKLRFRPPTDLIPNLDKIAASNLAPWQKLEIFRSHLLPSLSHHLASGRVLKDSLTQLDTECRKFLGLICNLPNHATVPFFYADRRVGGLGTCRLTDDADIWTIARAAQLLTCRDPTVRNICREQLHDTIRRGFRTEHPGVLPVGEYLSGSVDGGLYRLRYAEAGSNLWTLARQAAKRLGVRIDVSGDENLRIVADDVSVSPVKAVRGLRKVARQRYTRNLLTDKSHQGVVANCLSLEGTSKDMARLVSCRTPLSFRDWRYLHRARLDILPLRGHSWFCSQEQDTSCRRCGKENETGYHVLNHCEEGLQLATKRHNTVQDLLETLLVKQGHDVTVNKAIPGQRLRPDVEFLLSGSRVMVDVVVCYDQPGSMENAYQRKIEKYSSLGRILPLVVGSLGSWNPRNEDIRSILGIDGRTWGAFRFKARLAAIQGSMEMVCAHFHHGATNPEDENLPLLHVETPFPVE

SEQ ID NO: 2375 - protein, 1288 aa, Daphnia sinensis
MAEEGASSRHATRVRLHGTIIKIPVPLPNILKCGEKTCQGERGSGPWSGDRKRQLAETHIKERHSRRGVQYTTQYVCLGCKKEFSSFISAGRHARPCTESLSSSILRQSLELTIASAMDGSQGSPNPAHSSLPTFSPSRIEGDKIILKYPGKPTKCPRCEWTTLATNTRAMGSIHRHLETAHTLRLVKYWECGVCGFAGDGPTLKGHYQRLHSNPNPSPSIRFAGISSMDSSNRDSSDAVISLEEVTATEDEHAELSVVEIPAIEKSPGNVLSPANFTPSPILDIGREFTNSFNTQNFSWLYELPPHEIINPQILSEEILDPSPTPEILSFAPSQQSNRGRRRNSSEEQSQREDDFVSLWAPAFLSCETLNDLNDVLERCIADWLPKAQILQDPSPEQPRGNPDQRKRNQNRQMQRARRQIKKKAYEARKIQRLFNIYPRRAVREVLEDRSPSYDGTVQAAEEYLMRTYNRLRPSPQQCQSARELYDTCDWSQPSEDQMNFLNRAPTQQELEAKLRRAINTSPGVDGLEYRHLRAIDPNCILLETVCKMVWKLGIPNCWKTSRTVPIFKKGDTSDYSNFRPISLLPTIYKLFSGVISQRITEVASDLGWLSPEQKGFLPGVHGIQEHTQLLQTVVEETKTKRRHMCIAWLDMCNAFGSVPHAVLNELFTSLPIPEDLRRILVDIYSGNRMDFAVGKESIRIFPTAGVRQGDALSSPIFNLASEPLVRAGKSNINPGFLLFGSLVKTTAYADDIAVVTNSPSELQYILNVLSLTANTLGLQFNAGKCACLVFDKGKPSETQCRIGEQLIRCLGPDDQETYLGTPIGGKLRFRPPTDLIPNLDKIAASNLAPWQKLEIFRSHLLPSLSHHLASGRVLKDSLTQLDTECRKFLGLICNLPNHATVPFFYADRRVGGLGTCRLTDDADIWTIARAAQLLTCRDPTVRNICREQLHDTIRRGFRTEHPGVLPVGEYLSGSVDGGLYRLRYAEAGSNLWTLARQAAKRLGVRIDVSGDENLRIVADDVSVSPVKAVRGLRKVARQRYTRNLLTDKSHQGVVANCLSLEGTSKDMARLVSCRTPLSFRDWRYLHRARLDILPLRGHSWFCSQEQDTSCRRCGKENETGYHVLNHCEEGLQLATKRHNTVQDLLETLLVKQGHDVTVNKAIPGQRLRPDVEFLLSGSRVMVDVVVCYDQPGSMENAYQRKIEKYSSLGRILPLVVGSLGSWNPRNEDIRSILGIDGRTWGAFRFKARLAAIQGSMEMVCAHFHHGATNPEDENLPLLHVETPFPVE

SEQ ID NO: 2376 - protein, 1288 aa, Daphnia sinensis
MAEEGASSRHATRVRLHGTIIKIPVPLPNILKCGEKTCQGERGSGPWSGDRKRQLAEAHIKERHSRRGVQYTTQYVCLGCKKEFSSFISAGRHARPCTESLSSSILRQSLELTIASAMDGSQGSPNPAHSTLPTFSPSRIEGDKIILKYPGKPTKCPRCEWTTLATNTRAMCSIHRHLETAHTLRLVKYWECGVCGFAGDGPTLKGHYQRLHSNPNPSPSIRFAGISSMDSSNRDSSDAVISLEEVTATEDEHAELSVVEIPAIEKSPGNVLFSANFTPSPILDIGREFANSFNTQNFSWLYELPPHEIVNPQILSEEILDPSPTPEILSFAPSQQSNRGRRRNSSEEQSQREDDFVSLWAPAFLSCETLNDLNDVLERCIADWLPKAQILQDPSPEQPRGNPDQRKRNQNRQMQRARRQIKKKAYEARKIQRLFNIYPRRAVREVLEDRSPSYDGTVQAAEEYLKRTYNRLRPSPQQCQSARELYDTCDWSQPSEDQMNFLNRAPTQQELEAKLRRAINTSPGVDGLEYRHLRAIDPNCILLETVCKMVWKLGIPNCWKTSRTVPIFKKGDTSDYSNFRPISLLPTIYKLFSGVISQRITEVASDLGWLSPEQKGFLPGVHGIQEHTQLLQTVVEETKTKRRHMCIAWLDMCNAFGSVPHAVLNELFTSLPIPEDLRRILVDIYSGNRMDFAVGKESIRIFPTAGVRQGDALSSPIFNLASEPLVRAGKSNINPGFLLFGSLVKTTAYADDIAVVTNSPSELQYILNVLSLTANTLGLQFNAGKCACLVFDKGKPSETQCRIGEQLIRCLGPDDQETYLGTPIGGKLRFRPPTDLIPNLDKIAASNLAPWQKLEIFRSHLLPSLSHHLASGRVLKDSLTQLDTECRKFLGLICNLPNHATVPFFYADRRVGGLGTCRLTDDADIWTIARAAQLLTCRDPTVRNICREQLHDTIRRGFRTEHPGVLPVGEYLSGSVDGGLYRLRYAEAGSNLWTLARQAAKRLGVRIDVSGDENLRIVADDVSVSPVKAVRGLRKVARQRYTRILLTDKSHQGVVANCLSLEGTSKDMARLVSCRTPLSFRDWRYLHRARLDILPLRGHSWFCSQEQDTSCRRCGKENETGYHVLNHCEEGLQLATKRHNTVQDLLETLLVKQGHDVTVNKAIPGQRLRPDVEFLLSGSRVMVDVVVCYDQPGSMENAYQRKIEKYSSLGRILPLVVGSLGSWNPRNEDIRSILGIDGRTWGAFRFKARLAAIQGSMEMVCAHFHHGATNPEDENLPLLHVETPFPVE

SEQ ID NO: 2377 - protein, 875 aa, Daphnia sinensis
MQRARRQIKKKAYEARKIQRLFNIYPRRAVREVLEDRSPSYDGTVQAAEEYLKRTYNRLRPSPQQCQSARELYDTCDWSQPSEDQMNFLNRAPTQQELEAKLRRAINTSPGVDGLEYRHLRAIDPNCILLETVCKMVWKLGIPNCWKTSRTVPIFKKGDTSDYSNFRPISLLPTIYKLFSGVISQRITEVASDLGWLSPEQKGFLPGVHGIQEHTQLLQTVVEETKTKRRHMCIVWLDMCNAFGSVPHAVLNELFTSLPIPEDLRRILVDIYSGNRMDFAVGKESIRIFPTAGVRQGDALSSPIFNLASEPLVRAGKSNINPGFLLFGSLVKTTAYADDIAVVTNSPSELQYILNVLSLTANTLGLQFNAGKCACLVFDKGKPSETQCRIGEQLIRCLGPDDQETYLGTPIGGKLRFRPPTDLIPNLDKIAASNLAPWQKLEIFRSHLLPSLSHHLASGRVLKDSLTQLDTECRKFLGLICNLPNHATVPFFYADRRVGGLGTCRLTDDADIWTIARAAQLLTCRDPTVRNICREQLHDTIRRGFRTEHPGVLPVGEYLSGSVDGGLYRLRYAEAGSNLWTLARQAAKRLGVRIDVSGDENLRIVADDVSVSPVKAVRGLRKVARQRYTRNLLTDKSHQGVVANCLSLEGTSKDMARLVSCRTPLSFRDWRYLHRARLDILPLRGHSWFCSQEQDTSCRRCGMENETGYHVLNHCEEGLQLATKRHNTVQDLLETLLVKQGHDVTVNKAIPGQRLRPDVEFLLSGSRVMVDVVVCYDQPGSMENAYQRKIEKYSSLGRILPLVVGSLGSWNPRNEDIRSILGIDGRTWGAFRFKARLAAIQGSMEMVCAHFHHGATNPEDENLPLLHVETPFPVE

SEQ ID NO: 2378 - protein, 875 aa, Daphnia sinensis
MQKARRQIKKKAYEARKIQRLFNIYPRRAVREVLEDRSPSYDGTVQAAEEYLKRTYNRLRPSPQQCQSARELYDTCDWSQPSEDQMNFLNRAPTQQELQAKLRRATNTSPGVDGLEYRHLRAIDPNCILLETVCKMVWKLGIPNCWKTSRTVPIFKKGDSSDYSNFRPISLLPTIYKLFSGVISQRITEVASDLGWLSPEQKGFLPGVHGIQEHTQLLQTVVEETKTKRRHMSIAWLDMCNAFGSVPHAVLNELFTSLPIPEDLRRILVDIYSGNRMDFAVGKESIRIFPTAGVRQGDALSSPIFNLASEPIVRAGKSNINPGFLLFGSLVKTTAYADDIAVVASSPSELQNIFHVLSLTANTLGLQFNAGKCACLVFDKGKPSEAQCRIDEQLIRCLGPDDQETYLGTPIGGKLRFRPPTDLIPNLDKIAASNLAPWQKLEIFRSHLLPSLSHHLASGRVLKDSLTQLDTECRKFLGLICNLPNHATVPFFYADRRVGGLGTCRLTDDADIWTIARAAQLLTCRDPTVRNICREQLHDTIRRGFRTEHPGVLPVGEYLSGSVDGGLYRLRYAEAGSNLWTLARQAAKRLGVRIDVSGDENLRIVADDVSVSPVKAVRGLRKVARQRYTRNLLTDKSHQGVVANCLSLEGTSKDMARLVSCRTPLSFRDWRYLHRARLDILPLRGHSWFCSQEQDTSCRRCGKENETGYHVLNHCEEGLQLATKRHNTVQDLLETLLVEQGHDVTVNKAIPGQRLRPDVEFLLSGSRVMVDVVVCYDQPGSMENAYQRKIEKYSSLGRILPLVVGSLGSWNPRNEDIRSILGIDGRTWGAFRFKARLAAIQGSMEMVCAHFHHGATNPEDEDIPFSHVESPLPVD

SEQ ID NO: 2379 - protein, 1288 aa, Daphnia sinensis
MAEEGASSRNATRVRLHGTIIKIPVPLPNILKCGEKTCQGERGSGPWSGDRKRQLAETHIKERHSRRGVQYTTQYVCLGCKKEFSSFISAGRHARPCTESLSSSILRQSLELTIASAMDGSQGSPNPAHSSLPTFSPSRIEGDKIILKYPGKPTKCPRCEWTTLATNTRAMGSIHRHLETAHTLRLVKYWECGVCGFAGDGPTLKGHYQRLHSNPNPSPSIRFAGMSSMDGSNRDSSAAVISLEEVAATEDEREELSVVEIPAIEESPSNVLSPANFNDSPILDLRREFATSFSTQNFSWLYELPPQENINPQILSEEILDPSPNPEILSYVPSQQSNRGRRHNSSEEQSQRNDDFVSLWAPAFLSCETLNDLNDVLERCSADWLPKSQILQDPSPEQPRGNPDQRKRNQNRQMQRARRQIKKKAYEARKIQRLFNIYPRRAVREVLEDRSPSYDGTVQAAEEYLKRTYNRLRPSPQQCQSARELYDTCDWSQPSEDQMNFLNRAPTQQELQAKLRRATNTSPGVDGLEYRHLRAIDPNCILLETVCKMVWKLGIPNCWKTSRTVPIFKKGDSSDYSNFRPISLLPTIYKLFSGVISQRITEVASDLGWLSPEQKGFLPGVHGIQEHTQLLQTVVEETKTKRRHMSIAWLDMCNAFGSVPHAVLNELFTSLPIPEDLRRILVDIYSGNRMDFAVGKESIRIFPTAGVRQGDALSSPIFNLASEPIVRAGKSNINPGFLLFGSLVKNTAYADDIAVVANSPSELQNILNVLSLTANTLGLQFNAGKCACLVFDKGKPSEAQCRIGEQLIRCLGPDDQETYLGTPIGGKLRFRPPTDLIPNLDKIAASNLAPWQKLEIFRSHLLPSLSHHLASGRVLKDSLTQLDTECRKFLGLICNLPNHATVPFFYADRRVGGLGTCRLTDDADIWTIARAAQLLTCRDPTVRNICREQLNDTIRPGFRTEHPGVLPVGEYLSGSVDGGLYRLRYAEAGSNLWTLARQAAKRLGVRIDVSGDENLRIVADDVSVSPVKAVRGLRKVARQRYTRNLLTDKSHQGVVANCLSLEGTSKDMARLVSCRTPLSFRDWRYLHRARLDILPLRGHSWFCSQEQDTSCRRCGKENETGYHVLNHCEEGLQLATKRHNTVQDLLETLLVEQGHDVTVNKAIPGQRLRPDVEFLLSGSRVMVDVVVCYDQPGSMENAYQRKIEKYSSLGRILPLVVGSLGSWNPRNEDIRSILGIDGRTWGAFRFKARLAAIQGSMEMVCAHFHHGATNPEDEDIPFSHVESPLPVD

SEQ ID NO: 2380 - protein, 1288 aa, Daphnia sinensis
MAEEGASSRNATRVRLHGTIIKIPVPLSNILKCGEKTCQGERGGGPWSGDRKRQLAETHIKERHSRRGVQYTTQYVCLGCKKEFSSFISAGRHARPCTESLSSSILRQSLELTIASAMDGSQGSPNPADSSLPTFSPSRIEGDKIILKYPGKPTKCPRCEWTTLATNTRAMGSIHRHLETAHTLRLVKYWECGVCGFAGDGPTLKGHYQRLHSNPNPSPSIRFAGMSSMDGSNRDSSAAVISLEEVAATEDEREELSVVEIPAIEESPSNVLSPANFNDSPILDLRREFATSFSTQNFSWLYELPSQENINPQILSEEILDPSPNPEILSYVPSQQSNRGRRHNSSEEQSQRNDDFVSLWAPAFLSCETFNDLNDVLERCTADWLPKSQILQDPSPEQPRGNPDQRKRNQNRQMQRARRQIKKKAYEARKIQRLFNIYPRRAVREVLEDRSPSYDGTVQAAEEYLKRTYNRLRPSPQQCQSARELYDTCDWSQPSEDQMNFLNRAPTQQELQAKLRRATNTSPGVDGLEYRHLRAIDPNCILLETVCKMVWKLGIPNCWKTSRTVPIFKKGDTSDYSNFRPISLLPTIYKLFSGVISQRITEVASDLGWLSPEQKGFLPGVHGIQEHTQLLQTVVEETKTKRRHMSIAWLDMCNAFGSVPHAVLNELFTSLPIPEDLRRILVDIYSGNRMDFAVGKESIRIFPTAGVRQGDALSSPIFNLASEPIVRAGKSNINPGFLLFGSLVKTTAYADDIAVVANSPSELQNILNVLSLTANTLGLQFNAGKCACLVFDKGKPSEAQCRIGEQLIRCLGPDDQETYLGTPIGGKLRFRPPTDLIPKLDKIAASKFAPWQKLEIFRSHLLPSLSHHLASGRVLKDSLTQLDTECRKFLGLICNLPNHATVPFFYADRRVGGLGTCRLTDDADIWTIARAAQLLTCRDPTVRNICREQLHDTIRRGFRTEHPGVLPVGEYLSGSVDGGLYRLRYAEAGSNLWTLARQAAKRLGVRIDVSGDENLRIVADDVSVNPVKAVRGLRKVARQRYTRNLLTDKSHQGVVANCLSLEGTSKDMARLVSCRTPLSFRDWRYLHRARLDILPLRGHSWFCSQEQDTSCRRCGKENETGYHVLNHCEEGLQLATKRHNTVQDLLETLLVKQGHDVTVNKAIPGQRLRPDVEFLLSGSRVMVDVVVCYDQPGSMENAYQRKIEKYSSLGRILPLVVGSLGSWNPRNEDIRSILGIDGRTWGAFRFKARLAAIQGSMEMVCAHFHHGATNPEDEDIPFSHVESPLPVD

SEQ ID NO: 2381 - protein, 1063 aa, Daphnia sinensis
MSSMDGSNHDSSAAVISLEEVAATEDERDELSVVEIPAIEESPSNVLSPANFNDSPILDLRREFATSFSTQNFSWLYELPPQENINPQILSEEILDPSPNPEILSYVPSQQSNRGRRHNSSEEQSQKDDDFVSLWAPAFLSCETLNDLNDVLERCTADWLPKSQILQDPSPEQPQGNPDQRKRNQNRQMQRARRQIKKKAYEARKIQRLFNIYPRRAVREVLEDRSPSYDGTVQAAEEYLKRTYNRLRPSPQQCQSARELYDTCDWSQPSEDQMNFLNRAPTQQELQAKLRRATNTSPGVDGLEYRHLRAIDPNCILLETVCKMVWKLGIPNCWKTSRTVPIFKKGDTSDYSNFRPISLLPTIYKLFSGVISQRITEVASDLGWLSPEQKGFLPGVHGIQEHTQLLQTVVEETKTKRRHMSIAWLDMCNAFGSVPHAVLNELFTSLPIPEDLRRILVDIYSGNRIDFAVGKESIRIFPTAGVRQGDALSSPIFNLASEPIVRAGKSNINPGFLLFGSLVKTTAYADDIAVVANSPSELQNILNVLSLTANTLGLQFNAGKCACLVFDKGKPSEAQCRIGEQLIRCLGPDDQETYLGTPIGGKLRFRPPTDLIPNLDKIAASNLAPWQKLEIFRSHLLPSLSHHLASGRVLKDSLTQLDTECRKFLGLICNLPNHATVPFFYADRRVGGLGTCRLTDDADIWTIARAAQLLTCRDPTVRNICREQLHDTIRRGFRTEHPGVLPVGEYLSGSVDGGLYRLRYAEAGSNLWTLARQAAKRLGVRIDVSGDENLRIVADDVSVSPVKAVRGLRKVARQRYTRNLLTDKSHQGVVANCLSLEGTSKDMARLVSCRTPLSFRDWRYLHRARLDILPLRGHSWFCSQEQDTSCRRCGKENETGYHVLNHCEEGLQLATKRHNTVQDLLETLLVKQGHDVIVNKAIPGQRLRPDVEFLLSGSRVMVDVVVCYDQPGSMENAYQRKIEKYSSLGRILPLVVGSLGSWNPRNEDIRSILGIDGRTWGAFRFKARLAAIQGSMEMVCAHFHHGATNPEDEDIPFSHVESPLPVD

SEQ ID NO: 2382 - protein, 1288 aa, Daphnia sinensis
MAEEGASSRHATRVRLHGTIIKIPVPLPNILKCGEKTCQGERGSGPWSGDRKRQLAETHIKERHSRRGVQYTTQYVCLGCKKEFSSFISAGRHARPCTESLSSSFLRQSLELTIASAMYGSQGSPHPAHSSLPTFSPSRIEGDKIILKYPGKPTKCPRCEWTTLATNTRAMGSIHRHLETAHTLRLVKYWECGVCGFAGDGPTLKGHYQRLHSNPNPSPSIRFAGISSMDSSNRDSSDAVISLEEVTATEDEHAELSVVEIPAIEKSPGNVLSPANFTPSPILDIGREFANSFNTQNFSWLYELPPHEIINPQILSEEILDPSPTPEILSFAPSQQSNRGRRRNSSEEQSQREDDFVSLWAPAFLSCETSNDLNDVLERCIADWLPKAQILQDPSPEQPRGNPDQRKRNQNRQMQRARRQIKKKAYEARKIQRLFNIYPRRAVREVLEDRSPSYDGTVQAAEEYLKRTYNRLRPSPQQCQSARELYDTCDWSQPSEDQMNFLNRAPTQQELQAKLRRAINTSPGVDGLEYRHLRAIDPNCILLETVCKMVWKLGIPNCWKTSRTVPIFKKGDTSDYSNFRPISLLPTIYKLFSGVISQRITEVASDLGWLSPEQKGFLPGVHGIQEHTQLLQTVVEETKTKRRHMCIAWLDMCNAFGSVPHAVLNELFTSLPIPEDLRRILVDIYSGNRMDFAVGKESIRIFPTAGVRQGDALSSPIFNLASEPLVRAGKSNINPGFLLFGSLVKTTAYADDIAVVTNSPSELQYILNVLSLTANTLGLQFNAGKCACLVFDKGKPSETQCRIGEQLIRCLGPDDQETYLGTPIGGKLRFRPPTDLIPNLDKIAASNLAPWQKLEIFRSHLLPSLSHHLASGRVLKDSLTQLDTECRKFLGLICNLPNHATVPFFYADRRVGGLGTCRLTDDADIWTIARAAQLLTCRDPTVRNICREQLHDTIRRGFRTEHPGVLPVGEYLSGSVDGGLYRLRYAEAGSNLWTLARQAAKRLGVRIDVSGDENLRIVADDVSVSPVKAVRGLRKVARQRYTRNLLTDKSHQGVVANCLSLEGTSKDMARLVSCRTPLSFRDWRYLHRARLDILPLRGHSWFCSQEQDTSCRRCGKENETGYHVLNHCEEGLQLATKRHNTVQDLLETLLVKQGHDVTVNKAIPGQRLRPDVEFLLSGSRVMVDVVVCYDQPGSMENAYQRKIEKYSSLGRILPLVVGSLGSWNPRNEDIRSILGIDGRTWGAFRFKARLAAIQGSMEMVCAHFHHGATNPEDENLPLLHVETPFPVE

SEQ ID NO: 2383 - protein, 1171 aa, Daphnia sinensis
MDGSQGSPNPAHSSLPTFSPSRIEGDKIILKYPGKPTKCPRCEWTTLATNTRAMGSIHRHLETAHTLRLVKYWEYGVCGFAGDGPTLKGHYQRLHSNPNPSPSIRFAGMSSMDGSNRDSSAAVISLEEVAATEDEREELSVVEIPAIEESPSNVLSPANFNDSPILDLRREFATSFSTQNFSWLYELPPQENINPQILSEEILDPSPNPEILSYVPSQQSNRGRRHNSSEEQSQRNDDFVSLWAPAFLSCETLNDLNDVLERCSADWLPKSQILQDPSPEQPRGNPDQRKRNQNRQMQRARRQIKKKAYEARKIQRLFNIYPRRAVREVLEDRSPSYDGTVQAAEEYLKRTYNRLRPSPQQCQSARELYDTCDWSQPSEDQMNFLNRAPTQQELQAKLRRATNTSPWVDGLEYRHLRAIDPNCILLETVCKMVWKLGIPNCWKTSRTVPIFKKGDSSDYSNFRPISLLPTIYKLFSGVISQRITEVASDLGWLSPEQKGFLPGVHGIQEHTQLLQTVVEETKTKRRHMSIAWLDMCNAFGSVPHAVLNELFTSLPIPEDLRRILVDIYSGNRMDFAVGKESIRIFPTAGVRQGDALSSPIFNLASEPIVRAGKSNINPGFLLFGSLVKTTAYADDIAVVANSPSELQNILNVLSLTANTLGLQFNAGKCACLVFDKGKPSEAQCRIGEQLIRCLGPDDQETYLGTPIGGKLRFRPPTDLIPNLDKIAASNLAPWQKLEIFRSHLLPSLSHHLASGRVLKDSLTQLDTECRKFLGLICNLPNHATVPFFYADRRVGGLGTCRLTDDADIWTIARAAQLLTCRDPTVRNICREQLHDTIRRGFRTEHPGVLPVGEYLSGSVDGGLYRLRYAEAGSNLWTLARQAAKRLGVRIDVSGDENLRIVADDVSVSPVKAVRGLRKVARQRYTRNLLTDKSHQGVVANCLSLEGTSKDMARLVSCRTPLSFRDWRYLHRARLDILPLRGHSWFCSQEQDTSCRRCGKENETGYHVLNHCEEGLQLATKRHNTVQDLLETLLVKQGHDVTVNKAIPGQRLRPDVEFLLSGSRVMVDVVVCYDQPGSMENAYQRKIEKYSSLGRILPLVVGSLGSWNPRNEDIRSILGIDGRTWGAFRFKARLAAIQGSMEMVCAHFHHGATNPEDEDIPFSHVESPLPVD

SEQ ID NO: 2384 - protein, 1244 aa, Nothocercus julius
MLTNPSRSQAVHFVSIATQTGELSREVIRVPTAVSSEEVFHLTQSLTFYNSDFVSLDESIPESSHDCLKDLPEVYEVLEHARSPLMTGDKKALEDKVEDGGLNSPSVPTTAPPDVDSTILGTPGRTADMRTLVVKVPDEHPACPCCSIRTGKIEALIEHLNRNHDQQRVLYQCSRCGKTKEKYHTIACHFPQCQGAPAEPKEGAWEEPEKWQCEECGRQLKTKSSLWQHKKSVHPVTRNLKQLEMSPPKEKRMREMHNSSWTEEETALLIELEEQFKNMPYINKLIAEHFPLKSTNQICKKRRKLRRLALLRKAEQLQKGDRPVEKKKAEMVKKVYKNNVAEMMRVGTLPSAIAFEKVLENDEDLLETINVSGEELLTQVVGQVITAHVKQRRKCQLEAMPARKERKWMKRRAVRRGHYLRYQRLFQLDRKKLAGIILDKIEALKCPFPMNELYDLFRRKWEEVGTFLGLGSFQAAEKAENSAFKKLISPREVQKNMEEMNKWSSPGPDGLSLRDILRYDPQGSQLAEVFNLWLLAGKIPDRIKECRTIFIPKSTDPNKVEDMNNWQPITIGSVILRLFSRILTARLRRACPINSRQRGFITSPHCSENLKLLQVLIKHAKKDHKMLGVVFVNLANAFNSIHHQHILQVLQQKGVDGHIINIVKDLYSNSGTWLAVGGTCLEKVKILTGVKLGDPMSPLLFTLAVDPLLCKLEEKKDGFKYGNNSVSSLALADDLVLLSDSWGGMQRNIQVVEEFCHVTGLKVQAAMCHGFLISPSIDSYAINDCHPWKVEGAPLDMIEPGSFEEFLGVGVKPWVGLSRSELQEKLGTWVKNIGASPLKPLQKVEILKGYAIPRLLSAADHARVNASNLHSLDLAIRSAVKGWLHLPSSTCDAILYASTMDGGLGIMCLASQIPNIQAQRLQRIAHSSDNITRTIVLEEGIQEELRMTWIAAGGRADNVPSVWEEIPRVIPDALEGVETMSEWEVPTPRAVYPIPNQWRKRELENWAKLELQGCGIKNFENDIISNDWLVHYRSIPQWKILTAIQLRANVFPTREFLARGLDEGVPRGCRYCPAEWETCSHIIGYCPAVQEARLKRQKMLCGMLAKEAKRLGWVVYLEPNLRDSNSRLFKPDLLMVKGLHAKVVDVTICYESGLTSLSDAAAEKAQKHQHLEEQVRQMTRASEVEFRGFPVGARGKWYEGNDGLLAALGLSCHRQKTVARLFSRKALESSVDILHIFTRTNKHV

SEQ ID NO: 2385 - protein, 1080 aa, Propylea japonica
MARGGSPSHGPGGYPPSGPNQLDMEHNNKPRMKNESFPGRSTDRARPANHDVRVNQGTTSAQCTGDQTPVPSSTPQPQPGTSGFLICIAPNCSRGFPTAAGRGIHERRAHRDWYDQTQITEHIPVKERWTQEELGLMARKEATLHRQGVRFMNQGLLKYTSRTLESIKGQRRNEGYKRKVQEFIRMEEEQENERSEETSEEETSQETGNNTAQTHNNLFAYLVSAEPLQDQTFNSSRLNDICSRVRTLSKDQILLELAAYLRDTFPPEREIMNKIKHKKNLKHLSSKQKRKEQYARTQDMWKRNPGECTRRILEDRLEQDEEMPREVMEPFWRAVLTRNPNVTPNSLPRNDTLEQLWEPVSVEEVKHALPAKKTAPGPDAVSVKTLRRVPKSTLARIFTILMWLEKLPEQLCLSRTVLIPKKKGANQPGDFRPITMSSVIVRAFHKVLANRMREIKLDERQRAFRNAEGCAENITLLDMALRFHHNKHRKMFVAVLDMAKAFDSVSFKALWSVLRSKGLPESMRTYLKNVYQDSETIIQHGTWKSAKIHPTCGVKQGDPLSPILFNLLIDCMLKEISTGIGVDIEGTKLNILAFADDLVLMASTKEGLQILIDRVVDYLKRCGLAANAEKCATVSIVTIPNQQKTAVDQKRLFKIDNHTIPALKRTDEFKYLGTYFTADGIKAPDGLQSLQEKLNKMTSSPLKPQQRLWALRTVLIPSLMYNLAHNNVKFGYLRSLDKKIRLAVRTWLHLPKDCPNAYFHASIQDGGLGIPSLRWWAPLQRLLMLKRLTKNHFLNTQGINTYLTSEITTVEKRLRVNTGYTIQSAKQLNTLWANLLHSSVDGGPLVRSADVRGQHGWLGDPTRFLSGRYYVNMNKARINALPCKSRTTRGRNEDRSCRAGCGLPETSNHIIQNCHRTHGARIKRHNAIVNYLARNLQNQGYTVHLEPTFETSEGRRKPDVVAALGNSSVIIDAQILGEQADLQKRNQEKINKYKNNTSLIQNIQREYGTNNTLTLALTLSWRGIWSKTSAEDLLRLGAIRKKDLKIISTRVLVGSLTAWNWYNKMTNYRRGGGTRNGNRS

SEQ ID NO: 2386 - protein, 915 aa, Propylea japonica
MDARELGLMARKEATLHRQGVRFMNQELLKYTSRTLESIKGQRRNEGYKRKVQEFIRMEEEQENERSEETSVEETSQETGNNTAQTHNNLFAYLVSAEPLQDQTFNSSRLNDICSRVRTLSKDQILLELAAYLRDTFPPEKEITNKIKHKKNLKHLSRKQKRKEQYARTQDMWKRNPGECTRRILEDRLEQDEEMPREVMEPFWRAVLTRNPNVTPNSLPRNDTLEQLWEPVSVEEVKHALPAKKTAPGPDAVSVKTLRRVPKSTLARIFTILMWLEKLPEQLCLSRTVLIPKKKGANQPGDFRPITMSSVIVRAFHKVLANRMREIKLDERQRAFRNAEGCAENITLLDMALRFHHNKHRKMFVAVLDMAKAFDSVSFKALWSVLRSKGLPESMRTYLKNVYQDSETIIQHGTWKSAKIHPTCGVKQGDPLSPILFNLLIDCMLKEISTGIGVDIEGTKLNILAFADDLVLMASTKEGLQILIDRVVDYLKRCGLAANAEKCATVSIVTIPNQQKTAVDQKRLFKIDNHTIPALKRTDEFKYLGTYFTADGIKAPDSLQSLQEKLNKMTSSPLKPQQRLWALRTVLIPSLMYNLAHNNVKFGYLRSLDKKIRLAVRTWLHLPKDCPNAYFHASIQDGGLGIPSLRWWAPLQRLLMQKRFTMNYFLNTQGVNTYLTSEITTVEKRLRVNTGYTIQSAKQLNTLWANLLHSSVDGGPLVRSADVRSQHGWLGDPTRFLSGRDYVNMNKARINALPCKSRTTRGRNEDRSCRAGCGLPETSNHIIQNCHRTHGARIKRHNAIVNYLARNLQNQGYTVHLEPTFETSEGRRKPDVVAALGNSSVIIDAQILGEQADLQQRNQEKINKYKNNTSLIQNIQREYGTNNTLTLALTLSWRGIWSKTSAEDLLRLVPFGRKI

SEQ ID NO: 2387 - protein, 1073 aa, Propylea japonica
MAPGSLGYPPIDPSQLDMERNNTPRMMNYSGRSTDRANPAIDLQLSRGITPAQNTSDLTAGQNISPDDIPGPSNTFKCRAPNCQRYFSTAIGRGVHENRAHRDWYDREQVAQNRYVKERWTREELDLMARKEAELQRMGARFMNQELLKYVPRTLKAIKGQRRREEYKEKVREFERLAEELEEEEVVTVSDEEESDGEQEENDIDRTQQTTQDLKTYLLSAEPLRGQEFNASRLNGICSMIRSATEDQVLLEMAAYLRETFPSEKDVMKNKIKQKTSKEKSRKKERREEYARVQDMWKRNPGECTRRILEDRMDQEEEQPKRIMEPFWHTVMTKNTNVSPSLPRPDNILEHLWNPVSASELKTALPCRKTAPGPDGVSADTLRKVPRELLARIFTILMWLERLPEYLCLSRTVLIPKKKGAKKPGDFRPITMSSVITRAFHKVLANRLKIIELDKRQRAFRNANGCAENITLLDMALRFHHRKKRKMFVAILDMAKAFDSVSFPALWSTLRSKGLPDSMRNYIKSVYEKSMTIIQHGSWMSSKIHPTCGVKQGDPLSPILFNLLLDGMLRSISMAIGVDIEGTKLNILAFADDLVLMASSKEGLQSLIDRVFDYLELCGLGANASKCASISVVTIPNQQKTVTDASCTFKIKGLRIPTLKRTDKFNYLGSVFSADGVESPNELQSLQRKLDLLSRAPLKPQQKLWALRTVLIPGLIYGLVQGKVKFGYLRSIDKKIRKALRSWIHLPKDCPNAYFHSNIRDGGLGVPSLRWWAPLQRLRTLEHLRKNHFLNTQGITTYLTSEINDVVKRLQTNTGSTIRSAKQLDTFWSGMLYSSVDGGPLSKSSDVRGQHGWLGDPTRFLSGKDFVNCSKARINALPTISRTSRGRTNDRSCRGGCGVPETNNHVIQNCPRTHGARIKRHNAIAHYVARHLQNQDYMVELEPTFRTRDGLRKPDVVATLGSTSVILDAQILGEQVDLKQRNEQKINYYKNNSSLIEEIKKKYKTTNVLTTAITLSWRGLWPKESAESLLQLGAIRRKDLRVISTRVLIGSLTAWNIFNKSTTYRRRRAGGIR

SEQ ID NO: 2388 - protein, 1129 aa, Ancistrocerus nigricornis
MCHPHLLVVRVGQRLDLVLWCLPLDVLQPANGALAWRDLGSVGCWRAATPSALYLVGPKIQNRAITCRQTRTAGPTTSSSPHVLPSTSSGDTGLVPPSSSSCSVVPPEHQEGYACPQCGRSFTTKTGLGVHRHHAHKAVVNEEINIERVKRGWNQEELRLMAREEALATQRGVRFLNQHLLTVVPGRSLDAIKGARKKAMYREMVQAAIQDLAATESGSPPSSPSERVSSSSSPQSTGQAPPSSGESPTRSSGRWSALYGDLSSAIQRLAGIARQIRGWHSHDLVDIAELSLRGDDVRARIDQWLGAVFPPQPINNAARRQGLRIVNPGRKARRRFEYARVQSALRSNMSRTIRDILDGDGAKNVVPNVKTMSEHWGPFVSQASDPVPSPPRVAPKKDLAHLWLPVTCEEVTSVSVPLNSASGSDGVSPRQWRAVPASIKALLFNVVMTAGGFSPSATASRTVFIPKKVDSPTPADFRPISISSVVVRHLHKIFAERMRDSRIVDTRQRCFDDGCAENICVLASVIAEARRCRRQLHVASLDVAKAFDSVSHGAVEAALIRLGVPDGFRKYVSDLYACSSTMFEVRGERSGLYRVGRGVRQGDPLSPMLFCLVVDAVLGEMPPDVSFELGDSRISCIAYADDILLFATTKWGLQVALSALEGKANEQGLRFNASKCSVLSMVPAGRQKKIKIVTTPSFTLRNGAHLPQVSAIAEWRYLGVNFKPAGPKKVDGDLTGLLDSLTRAPLKPQQRLVALRGFLLPRVFHALVLGRVTLGKLRALDQQTRAAVRRWLRLPPDTASGFFHTSIRDGGLGIPSLATTVPGLMLERLERLEQSSSATVRAIAESQWVQNRIRWARNALTVDGDCLNTINRRKQWWARRLHSSVDGWELRECSSTDLSSWWVSAGCFGIPGRDFVQHVHVWANSLPTLVRTSRGVRRAERQIRCRAGCNVTETAAHVIQQCHRTHGGRIKRHDAVCNTLAAGLRTVGWTVHQEPTIETAAGRRKPDIVCARDGDVHVVDTQIVSGATSLDDAHERKLGYYRDNNTLVANVAEWHSVRSDRVHFSTCTLSWRGIWSSKSADWLRGMGLSKGLLRSISTRVLQGSHTNWTRWNRMTGTAGANPTPRVGVG

SEQ ID NO: 2389 - protein, 969 aa, Ancistrocerus nigricornis
MAREEALATQQGVRFLNQHLLTVVPGRSLDAIKGARRKAMYKDMVQAATENLAAVGPNSPLSPPSERMSSFSSSQSSGQTPVSPGESSTGSSRRWSALYGDLSGAIQRLTVVVTQIRGWNSHDLVNIAEEVLRGVDVRARIDQWLGSVFPPRPVGVMAQRRSLRIVNPGRRARRRQEYARVQRALRSNMSRTIRDILEGAGAANVVPSVKTMSEHWGPFVAQASDPVPTPPRVAPKEHLAQLWLPVTCEEVTSVSVPLNSASGLDDVSSRQWRAVPSSIKALLFNVVMAAGGFSPSALASRTVFIPKKVDTPAPSDFRPISISSVVVRHLHKIFAERMRDARVVDLRQRCFDDGCAENISVLAAVIAEARSQRRQLHVASLDVAKAFDSVSHGAVEAALIRLGVPDGFRKYIHSLYACSSTMFEVRGERSELFRVGRGVRQGDPLSPMLFCLVVDAVLGEMPPDVGFELGDCRVSCIAYADDILLFATTKWGLQTALCAVEDKAREQGLRLNAGKCSVLSMVPAGKQKKIKIITTPSFTLRSGAHLPQVSTTAEWRYLGINFRPAGPKKVDGDITDLLDNLTHAPLKPQQRLVALRGFLLPRVFHALVLGRVTLGKLRALDRQTRAAVRRWLRLPKDTASGFFHASTRDGGLGIPSLATTVPGLMLERFQRLGQSSSPTVQAAAESRWVQNRIRWARNALTTDGDCLSSTYRRKRWWAQRLHSSVDGWELRECPGTDLSSWWVKDGCFGIPGRDFVQYVHVWANSLPTLVRTSRGVRRVERQIRCRAGCNVTETAAHVIQQCHRTHGGRIKRHDAVCNTIAAGLRTAGWRVHQEPIIETAAGRRKPDAVCVRDGEVNVVDTQIVSGSTSLDDAHERKLGYYRDNNTLVARVAESHGVRADRVYFSSCTLSWRGIWSSKSADWLLGMGLSKGLLRSISTRVLQGSHTNWTRWNRMTGTAGPAASQREGIG

SEQ ID NO: 2390 - protein, 1061 aa, Ancistrocerus nigricornis
MPRTAGLTSSSSPHVMPSTSSGDTGLVPPSSSSCSVVPLEHQEGYACPQCGRSFTTKTGLGVHRHRAHPAVANEEINIERARRGWSQEELRLMAREEALATQRGVRFLNQHLLTVVPGRSLDAVKGARKKAVYREMVQAAIQDLAATEAGSTPSSPSESVSSSSSSQPSGQAPLSSGESPTRSSRRWSALYGDLSSAIQRLVVVVRQIRGWNSLDLVDVAELSLRGEDVRLRIDQWLAGVFPPQPINSAARRQNLRIVNPGRKARRRLEYARVQSALRSNMSRTIRDILDGGGAKNVVPNVKTMSEHWGPFVSQASDPVTPPPRVAPKEDLAHLWLPVTCEEVTGVSVPLNSASGPDGVSPRQWRAVPASIKALLFNVVMTAGGFSPSATASRTVFIPKKVDSPTPADFRPISISSVVVRHLHKIFAERMRDARIVDTRQRCFDDGCAENICVLASAIAEARRRRRQLHVASLDVAKAFDSVSHGAVEAALIRLGVPDGFRKYVSNIYACSSTIFEVRGERSGLYRVGRGVRQGDPLSPMLFCLVVDTVLGEMPPDVGFELGDSRISCIAYADDILLFATTKWGLQVALSALEDKAREQGLHFNAGKCSVLSMVPAGKQKKVKIVTTPSFTLRSGAHLPQVRVTAEWRYLGVDFKPAGPKKVDGDLTDLLDSLTRAPLKPQQRLVALRGFLLPRVFHALVLGRVTLGKLRALDRQTRAAVRRWLRLPPDTASGFFHAPIRGGGLGIPSLATTVPGLMLERLQRLEQSSSAAVRAVAESHWVQNRIHWARNALTVDGDCLDSINRRKRWWTQRLHSSVDGWELRECPSTDLSSWWVSAGCFGIPGRDFVQYVHVWANSLPTLVRTSRGVRRAGRQIRCRAGCNVTETAAHVIQQCHRTHGGRIKRHDAVCNTVAAGLRTVGWTVHREPIIETAVGRRKPDIVCARDGDVHVVDAQIVSGAAPLDDAHERKLGYYRDNDTLVARVAEWHSVRSDRVHFSTCTLSWRGIWSSKSAAWLLAMGLSKGLLRSISTRVLQGSHTNWTRWNRMTGTAGANPAPRVGVG

SEQ ID NO: 2391 - protein, 927 aa, Ancistrocerus nigricornis
MTLLRAIQDLAATEAGSTPSSPSESVSSSSSSQPSGQAPLSSGESPTRSSRRWSALYGDLSSAIQRLVVVVRQIRGWNSLDLVDVAELSLRGEDVRLRIDQWLAGVFPPQPINSAARRQNLRIVNPGRKARRRLEYARVQSALRSNMSRTIRDILDGGGAKNVVPNVKTMSEHWGPFVSQASDPVTPPPRVAPKEDLAHLWLPVTCEEVTGVSVPLNSASGPDGVSPRQWRAVPASIKALLFNVVMTAGGFSPSATASRTVFIPKKVDSPTPADFRPISISSVVVRHLHKIFAERMRDARIVDTRQRCFDDGCAENICVLASAIAEARRRRRQLHVASLDVAKAFDSVSHGAVEAALIRLGVPDGFRKYVSNIYACSSTIFEVRGERSGLYRVGRGVRQGDPLSPMLFCLVVDTVLGEMPPDVGFELGDSRISCIAYADDILLFATTKWGLQVALSALEDKAREQGLHFNAGKCSVLSMVPAGKQKKVKIVTTPSFTLRSGAHLPQVRVTAEWRYLGVDFKPAGPKKVDGDLTDLLDSLTRAPLKPQQRLVALRGFLLPRVFHALVLGRVTLGKLRALDRQTRAAVRRWLRLPPDTASGFFHAPIRGGGLGIPSLATTVPGLMLERLQRLEQSSSAAVRAVAESHWVQNRIHWARNALTVDGDCLDSINRRKRWWTQRLHSSVDGWELRECPSTDLSSWWVSAGCFGIPGRDFVQYVHVWANSLPTLVRTSRGVRRAGRQIRCRAGCNVTETAAHVIQQCHRTHGGRIKRHDAVCNTVAAGLRTVGWTVHREPIIETAVGRRKPDIVCARDGDVHVVDAQIVSGAAPLDDAHERKLGYYRDNDTLVARVAEWHSVRSDRVHFSTCTLSWRGIWSSKSAAWLLAMGLSKGLLRSISTRVLQGSHTNWTRWNRMTGTAGANPAPRVGVG

SEQ ID NO: 2392 - protein, 969 aa, Ancistrocerus nigricornis
MAREEALATQQGVRFLNQHLLTVVPGRSLDAIKGARRKAMYKDMVQAATENLAAVGPNSPLSPPSERMSSFSSSQSSGQTPVSPGESSTGSSRRWSALYGDLSGAIQRLTVVVTQIRGWNSHDLVNIAEEVLRGVDVRARIDQWLGSVFPPRPVGVMAQRRSLRIVNPGRRARRRQEYARVQRALRSNMSRTIRDILEGAGAANVVPSVKTMSEHWGPFVAQASDPVPTPPRVAPKEHLAQLWLPVTCEEVTSVSVPLNSASGLDDVSSRQWRAVPSSIKALLFNVVMAAGGFSPSALASRTVFIPKKVDTPTPSDFRPISISSVVVRHLHKIFAERMRDARVVDLRQRCFDDGCAENISVLAAVIAEARSQRRQLHVASLDVAKAFDSVSHGAVEAALIRLGVPDGFRKYIHSLYACSSTMFEVRGERSELFRVGRGVRQGDPLSPMLFCLVVDAVLGEMPPDVGFELGDCRVSCIAYADDILLFATTKWGLQTALCAVEDKAREQGLRLNAGKCSVLSMVPAGKQKKIKIITTPSFTLRSGAHLPQVSTTAEWRYLGINFRPAGPKKVDGDITDLLDNLTHAPLKPQQRLVALRGFLLPRVFHALVLGRVTLGKLRALDRQTRAAVRRWLRLPKDTASGFFHASTRDGGLGIPSLATTVPGLMLERFQRLGQSSSPTVQAAAESRWVQNRIRWARNALTTDGDCLSSTYRRKRWWAQRLHSSVDGWELRECPGTDLSSWWVKDGCFGIPGRDFVQYVHVWANSLPTLVRTSRGVRRVERQIRCRAGCNVTETAAHVIQQCHRTHGGRIKRHDAVCNTIAAGLRTAGWRVHQEPIIETAAGRRKPDAVCVRDGEVNVVDTQIVSGSTSLDDAHERKLGYYRDNNTLVARVAESHGVRADRVYFSSCTLSWRGIWSSKSADWLLGMGLSKGLLRSISTRVLQGSHTNWTRWNRMTGTAGPAASQREGIG

SEQ ID NO: 2393 - protein, 969 aa, Ancistrocerus nigricornis
MAREEALATQQGVRFLNQHLLTVVPGRSLDAIKGARRKAMYKDMVQAATEDLAAVGPNSPLSPPSERMSSFSSSQSSGQTPVSPGESSTGSSRRWSALYGDLSGAIQRLTVVVTQIRGWNSHDLVNIAEEVLRGVDVRARIDQWLGSVFPPRPVGVMAQRRSLRIVNPGRRARRRQEYARVQRALRSNMSRTIRDILEGAGAANVVPSVKTMSEHWGPFVAQASDPVPTPPRVAPKEHLAQLWLPVTCEEVTSVSVPLNSASGLDDVSSRQWRAVPSSIKALLFNVVMAAGGFSPSALASRTVFIPKKVDTPAPSDFRPISISSVVVRHLHKIFAERMRDARVVDLRQRCFDDGCAENISVLAAVIAEARSQRRQLHVASLDVAKAFDSVSHGAVEAALIRLGVPDGFRKYIHSLYACSSTMFEVRGERSELFRVGRGVRQGDPLSPMLFCLVVDAVLGEMPPDVGFELGDCRVSCIAYADDILLFATTKWGLQTALCAVEDKAREQGLRLNAGKCSVLSMVPAGKQKKIKIITTPSFTLRSGAHLPQVSTTAEWRYLGINFRPAGPKKVDGDITDLLDNLTHAPLKPQQRLVALRGFLLPRVFHALVLGRVTLGKLRALDRQTRAAVRRWLRLPKDTASGFFHASTRDGGLGIPSLATTVPSLMLERFQRLGQSSSPTVQAAAESRWVQNRIRWARNALTTDGDCLSSTYRRKRWWAQRLHSSVDGWELRECPGTDLSSWWVKDGCFGIPGRDFVQYVHVWANSLPTLVRTSRGVRRVERQIRCRAGCNVTETAAHVIQQCHRTHGGRIKRHDAVCNTIAAGLRTAGWRVHQEPIIETAAGRRKPDAVCVRDGEVNVVDTQIVSGSTSLDDAHERKLGYYRDNNTLVARVAESHGVRADRVYFSSCTLSWRGIWSSKSADWLLGMGLSKGLLRSISTRVLQGSHTNWTRWNRMTGTAGPAASQREGIG

SEQ ID NO: 2394 - protein, 902 aa, Ancistrocerus nigricornis
MSSFSSSQSSGQTPVSPGESSTGSSRRWSALYGDLSGAIQRLTVVVTQIRGWNSHDLVNIAEEVLRGVDVRARIDQWLGSVFPPRPVGVMAQRRSLRIVNPGRRARRRQEYARVQRALRSNMSRTIRDILEGAGAANVVPSVKTMSEHWGPFVAQASDPVPTPPRVAPKEHLAQLWLPVTCEEVTSVSVPLNSASGLDDVSSRQWRAVPSSIKALLFNVVMAAGGFSPSALASRTVFIPKKVDTPAPSDFRPISISSVVVRHLHKIFAERMRDARVVDLRQRCFDDGCAENISVLAAVIAEARSQRRQLHVASLDVAKAFDSVSHGAVEAALIRLGVPDGFRKYIHSLYACSSTMFEVRGERSELFRVGRGVRQGDPLSPMLFCLVVDAVLGEMPPDVGFELGDCRVSCIAYADDILLFATTKWGLQTALCAVEDKAREQGLRLNAGKCSVLSMVPAGKQKKIKIITTPSFTLRSGAHLPQVSTTAEWRYLGVNFRPAGPKKVDGDITDLLDNLTHAPLKPQQRLVALRGFLLPRVFHALVLGRVTLGKLRALDRQTRAAVRRWLRLPKDTASGFFHASTRDGGLGIPSLATTVPGLMLERFQRLGQSSSPTVQAAAESRWVQNRIRWARNALTTDGDCLSSTYRRKRWWAQRLHSSVDGWELRECPGTDLSSWWVKDGCFGIPGRDFVQYVHVWANSLPTLVRTSRGVRRVERQIRCRAGCNVTETAAHVIQQCHRTHGGRIKRHDAVCNTVAAGLRTAGWRVYQEPIIETAVGRRKPDVVCVRDGEVNVVDTQIVSGSTSLDDAHERKLGYYRDNNTLVARVAESHGVRTDRVYFSSCTLSWRGIWSSKSADWLLGMGLSKGLLRSISTRVLQGSHTNWTRWNRMTGTAGAAASQREGVG

SEQ ID NO: 2395 - protein, 969 aa, Ancistrocerus nigricornis
MAREEALATQRGVRFLNQHLLTVVPGRSLDAIKGARKKAMYREMVQAAIQDLAATEVGSPPSSPSERVSSSSSPQSTGQAPPSSGEPSTRSSGRWSALYGDLSSAIQRLAGIARQIRGWHSHDLVDIAELSLRGDDVRARIDQWLGAVFPPQPINNAARRQGLRIVNPGRKARRRFEYARVQSALRSNMSRTIRDILDGDGAKNVVPNVKTMSEHWGPFVSQASDPVPSPPRVAPKKDLAHLWLPVTCEEVTSVSVPLNSASGSDGVSPRQWRAVPASIKALLFNVVMTAGGFSPSATASRTVFIPKKVDSPTPADFRPISISSVVVRHLHKIFAERMRDSRIVDTRQRCFDDGCAENICVLASVIAEARRCRRQLHVASLDVAKAFDSVSHGAVEAALIRLGVPDGFRKYVSDLYACSSTMFEVRGERSGLYRVGRGVRQGDPLSPMLFCLVVDAVLGEMPPDVSFELGDSRISCIAYADDILLFATTKWGLQLALSALEGKANEQGLRFNASKCSVLSMVPAGRQKKIKIVTTPSFTLRNGAHLPQVSAIAEWRYLGVNFKPAGPKKVDGDLTGLLDSLTRAPLKPQQRLVALRGFLLPRVFHALVLGRVTLGKLRALDQQTRAAVRRWLRLPPDTASGFFHTSIRDGGLGIPSLATTVPGLMLERLERLEQSSSASVRAIAESQWVQNRIRWARNALTVDGDCLNTINRRKQWWARRLHSSVDGWELRECSGTDLSSWWVSAGCFGIPGRDFVQHVHVWANSLPTLVRTSRGVRRAERQIRCRAGCNVTETAAHVIQQCHRTHGGRIKRHDAVCNTLAAGLRTVGWTVHQEPTIETAAGRRKPDIVCARDGDVHVVDTQIVSGATSLDDAHERKLGYYRDNNTLVANVAEWHSVRSDRVHFSTCTLSWRGIWSSKSADWLLGMGLSKGLLRSISTRVLQGSHTNWTRWNRMTGTAGANPAPRVGVG

SEQ ID NO: 2396 - protein, 969 aa, Ancistrocerus nigricornis
MAREEALATQQGVRFLNQHLLTVVPGRSLDAIKGARRKAMYKDMVQAAIEDLAAVGPNSPLSPPSERMSSFSSSQSSGQTPVSPGESSTGSSRRWSALYGDLSGAIQRLTVVVTQIRGWNSHDLVNIAEEVLRGVDVRARIDQWLGSVFPPRPVGVMAQRRSLRIVNPGRRARRRQEYARVQRALRSNMSRTIRDILEGAGAANVVPSVKTMSEHWGPFVAQASDPVPTPPRVAPKEHLAQLWLPVTCEEVTSVSVPLNSASGLDDVSSRQWRAVPSSIKALLFNVVMAAGGFSPSALASRTVFIPKKVDTPAPSDFRPISISSVVVRHLHKIFAERMRDARVVDLRQRCFDDGCAENISVLAAVIAEARSQRRQLHVASLDVAKAFDSVSHGAVEAALIRLGVPDGFRKYIHSLYACSSTMFEVRGERSELFRVGRGVRQGDPLSPMLFCLVVDAVLGEMPPDVGFELGDCRVSCIAYADDILLFATTKWGLQTALCAVEDKAREQGLRLNAGKCSVLSMVPAGKQKKIKIITTPSFTLRSGAHLPQVSTTAEWRYLGVNFRPAGPKKVDGDITDLLDNLTHAPLKPQQRLVALRGFLLPRVFHALVLGRVTLGKLRALDRQTRAAVRRWLRLPKDTASGFFHASTRDGGLGIPSLATTVPGLMLERFQRLGQSSSPTVQAAAESRWVQNRIRWARNALTTDGDCLSSTYRRKRWWAQRLHSSVDGWELRECPGTDLSSWWVKDGCFGIPGRDFVQYVHVWANSLPTLVRTSRGVRRVERQIRCRAGCNVTETAAHVIQQCHRTHGGRIKRHDAVCNTVAAGLRTAGWRVYQEPIIETAVGRRKPDVVCVRDGEVNVVDTQIVSGSTSLDDAHERKLGYYRDNNTLVARVAESHGVRTDRVYFSSCTLSWRGIWSSKSADWLLGMGLSKGLLRSISTRVLQGSHTNWTRWNRMTGTAGAAASQREGVG

SEQ ID NO: 2397 - protein, 969 aa, Ancistrocerus nigricornis
MAREEALATQQGVRFLNQHLLTVVPGRSLDAIKGARRKAMYKDMVQAAIEDLAAVGPNSPLSPPSERMSSFSSSQSSGQTPVSPGESSTGSSRRWSALYGDLSGAIQRLTVVVTQIRGWNSHDLVNIAEEVLRGVDVRARIDQWLGSVFPPRPVGVMAQRRSLRVVNPGRRARRRQEYARVQRALRSNMSRTIRDILEGAGAANVVPSVKTMSEHWGPFVAQASDPVPTPPRVAPKEHLAQLWLPVTCEEVTSVSVPLNSASGLDDVSSRQWRAVPSSIKALLFNVVMAAGGFSPSALASRTVFIPKKVDTPAPSDFRPISISSVVVRHLHKIFAERMRDARVVDLRQRCFDDGCAENISVLAAVIAEARSQRRQLHVASLDVAKAFDSVSHGAVEAALSRLGVPDGFRKYIHSLYACSSTMFEVRGERSELFRVGRGVRQGDPLSPMLFCLVVDAVLGEMPPDVGFELGDCRVSCIAYADDILLFATTKWGLQTALCAVEDKAREQGLRLNAGKCSVLSMMPAGKQKKIKVITTPSFTLRSGAHLPQVSTTAEWRYLGVNFRPAGPKKVDGDITDLLDNLTHAPLKPQQRLVALRGFLLPRVFHALVLGRVTLGKLRALDRQTRAAVRRWLRLPKDTASGFFHASTRDGGLGIPSLATTVPGLMLERFQRLGQSSSPTVQAAAESRWVQNRIRWARNALTTDGDCLSSTYRRKRWWAQRLHSSVDGWELRECPGTDLSSWWVKDGCFGIPGRDFVQYVHVWANSLPTLVRTSRGVRRVERQIRCRAGCNVTETAAHVIQQCHRTHGGRIKRHDAVCNTVAAGLRTAGWRVYQEPIIETAVGRRKPDVVCVRDGEVNVVDTQIVSGSTSLDDAHERKLGYYRDNNTLVARVAESHGVRTDRVYFSSCTLSWRGIWSSKSADWLLAMGLSKGLLRSISTRVLQGSHTNWTRWNRMTGTAGPAASQREGVG

SEQ ID NO: 2398 - protein, 969 aa, Ancistrocerus nigricornis
MAREEALATQQGVRFLNQHLLTVVPGRSLDAIKGARRKAMYKDMVQAAIEDLAAVGPNSPLSPPSERMSSFSSSQSSGQTPVSPGESSTGSSRRWSALYGDLSGAIQRLTVVVTQIRGWNSHDLVNIAEEVLRGVDVRARIDQWLGSVFPPRPVGVMAQRRSLRVVNPGRRARRRQEYARVQRALRSNMSRTIRDILEGAGAANVVPSVKTMSEHWGPFVAQASDPVPTPPRVAPKEHLAQLWLPVTCEEVTSVSVPLNSASGLDDVSSRQWRAVPSSIKALLFNVVMAAGGFSPSALASRTVFIPKKVDTPAPSDFRPISISSVVVRHLHKIFAERMRDARVVDLRQRCFDDGCAENISVLAAVIAEARSQRRQLHVASLDVAKAFDSVSHGAVEAALSRLGVPDGFRKYIHSLYACSSTMFEVRGERSELFRVGRGVRQGDPLSPMLFCLVVDAVLGEMPPDVGFELGDCRVSCIAYADDILLFATTKWGLQTALCAVEDKAREQGLRLNAGKCSVLSMVPAGKQKKIKVITTPSFTLRSGAHLPQVSTTAEWRYLGVNFRPAGPKKVDGDITDLLDNLTHAPLKPQQRLVALRGFLLPRVFHALVLGRVTLGKLRALDRQTRAAVRRWLRLPKDTASGFFHASTRDGGLGIPSLATTVPGLMLERFQRLGQSSSPTVQAAAESRWVQNRIRWARNALTTDGDCLSSTYRRKRWWAQRLHSSVDGWELRECPGTDLSSWWVKDGCFGIPGRDFVQYVHVWANSLPTLVRTSRGVRRVERQIRCRAGCNVTETAAHVIQQCHRTHGGRIKRHDAVCNTVAAGLRTAGWRVYQEPIIETAVGRRKPDVVCVRDGEVNVVDTQIVSGSTSLDDAHERKLGYYRDNNTLVARVAESHGVRTDRVYFSSCTLSWRGIWSSKSADWLLAMGLSKGLLRSISTRVLQGSHTNWTRWNRMTGTAGPAASQREGVG

SEQ ID NO: 2399 - protein, 969 aa, Ancistrocerus nigricornis
MAREEALATQRGVRFLNQHLLTVVPGRSLDAIKGARKKAMYREMVQAAIQDLAATEVGSPPSSPSERVSSSSSPQSTGQAPPSSGEPSTRSSGRWSALYGDLSSAIQRLAGIARQIRGWHSHDLVDIAELSLRGDDVRARIDQWLGAVFPPQPINNAARRQGLRIVNPGRKARRRFEYARVQSALRSNMSRTIRDILDGDGAKNVVPNVKTMSEHWGPFVSQASDPVPSPPRVAPKKDLAHLWLPVTCEEVTSVSVPLNSASGSDGVSPRQWRAVPASIKALLFNVVMTAGGFSPSATASRTVFIPKKVDSPTPADFRPISISSVVVRHLHKIFAERMRDSRIVDTRQRCFDDGCAENICVLASVIAEARRCRRQLHVASLDVAKAFDSVSHGAVEAALIRLGVPDGFRKYVSDLYACSSTMFEVRGERSGLYRVGRGVRQGDPLSPMLFCLVVDAVLGEMPPDVSFELGDSRISCIAYADDILLFATTKWGLQVALSALEGKANEQGLRFNASKCSVLSMVPAGRQKKIKIVTTPSFTLRNGAHLPQVSAIAEWRYLGVNFKPAGPKKVDGDLTGLLDSLTRAPLKPQQRLVALRGFLLPRVFHALVLGRVTLGKLRALDQQTRAAVRRWLRLPPDTASGFFHTSIRDGGLGIPSLATTVPGLMLERLERLEQSSSASVRAIAESQWVQNRIRWARNALTVDGDCLNTINRRKQWWARRLHSSVDGWELRECSGTDLSSWWVSAGCFGIPGRDFVQHVHVWANSLPTLVRTSRGVRRAERQIRCRAGCNVTETAAHVIQQCHRTHGGRIKRHDAVCNTLAAGLRTVGWTVHQEPTIETAAGRRKPDIVCARDGDVHVVDTQIVSGATSLDDAHERKLGYYRDNNTLVANVAEWHSVRSDRVHFSTCTLSWRGIWSSKSADWLLGMGLSKGLLRSISTRVLQGSHTNWTRWNRMTGTAGANPAPRVGVG

SEQ ID NO: 2400 - protein, 969 aa, Ancistrocerus nigricornis
MAREEALATQRGVRFLNQHLLTVVPGRSLDAIKGARKKAMYREMVQAAIQDLAATEVGSPPSSPSERVSSSSSPQSTGQAPPSSGEPSTRSSGRWSALYGDLSSAIQRLAGIARQIRGWHSHDLVDIAELSLRGDDVRARIDQWLGAVFPPQPINNAARRQGLRIVNPGRKARRRFEYARVQSALRSNMSRTIRDILDGDGAKNVVPNVKTMSEHWGPFVSQASDPVPSPPRVAPKKDLAHLWLPVTCEEVTSVSVPLNSASGSDGVSPRQWRAVPASIKALLFNVVMTAGGFSPSATASRTVFIPKKVDSPTPADFRPISISSVVVRHLHKIFAERMRDSRIVDTRQRCFDDGCAENICVLASVIAEARRCRRQLHVASLDVAKAFDSVSHGAVEAALIRLGVPDGFRKYVSDLYACSSTMFEVRGERSGLYRVGRGVRQGDPLSPMLFCLVVDAVLGEMPPDVSFELGDSRISCIAYADDILLFATTKWGLQVALSALEGKANEQGLRFNASKCSVLSMVPAGRQKKIKIVTTPSFTLRNGAHLPQVSAIAEWRYLGVNFKPAGPKKVDGDLTGLLDSLTRAPLKPQQRLVALRGFLLPRVFHALVLGRVTLGKLRALDQQTRAAVRRWLRLPPDTASGFFHTSIRDGGLGIPSLATTVPGLMLERLECLEQSSSASVRAIAESQWVQNRIRWARNALTVDGDCLNTINRRKQWWARRLHSSVDGWELRECSGTDLSSWWVSAGCFGIPGRDFVQHVHVWANSLPTLVRTSRGVRRAERQIRCRAGCNVTETAAHVIQQCHRTHGGRIKRHDAVCNTLAAGLRTVGWTVHQEPTIETAAGRRKPDIVCARDGDVHVVDTQIVSGATSLDDAHERKLGYYRDNNTLVANVAEWHSVRSDRVHFSTCTLSWRGIWSSKSADWLLGMGLSKGLLRSISTRVLQGSHTNWTRWNRMTGTAGANPAPRVGVG

SEQ ID NO: 2401 - protein, 969 aa, Ancistrocerus nigricornis
MAREEALATQQGVRFLNQHLLTVVPGRSLDAIKGARRKAMYKDMVQAATEDLAAVGPNSPLSPPSERMSSFSSSQSSGQTPVSPGESSTGSSRRWSALYGDLSGAIQRLTVVVTQIRGWNSHDLVNIAEEVLRGVDVRARIDQWLGSVFPPRPVGVMAQRRSLRIVNPGRRARRRQEYARVQRALRSNMSRTIRDILEGAGAANVVPSVKTMSEHWGPFVAQASDPVPTPPRVAPKEHLAQLWLPVTCEEVTSVSVPLNSASGLDDVSSRQWRAVPSSIKALLFNVVMAAGGFSPSALASRTVFIPKKVDTPAPSDFRPISISSVVVRHLHKIFAERMRDARVVDLRQRCFDDGCAENISVLAAVIAEARSQRRQLHVASLDVAKAFDSVSHGAVEAALIRLGVPDGFRKYIHSLYACSSTMFEVRGERSELFRVGRGVRQGDPLSPMLFCLVVDAVLGEMPPDVGFELGDCRVSCIAYADDILLFATTKWGLQTALCAVEDKAREQGLRLNAGKCSVLSMVPAGKQKKIKIITTPSFTLRSGAHLPQVSTTAEWRYLGVNFRPAGPKKVDGDITDLLDNLTHAPLKPQQRLVALRGFLLPRVFHALVLGRVTLGKLRALDRQTRAAVRRWLRLPKDTASGFFHASTRDGGLGIPSLATTVPGLMLERFQRLGQSSSPTVQAAAESRWVQNRIRWARNALTTDGDCLSSTYRRKRWWAQRLHSSVDGWELRECPGTDLSSWWVKDGCFGIPGRDFVQYVHVWANSLPTLVRTSRGVRRVERQIRCRAGCNVTETAAHVIQQCHRTHGGRIKRHDAVCNTVAAGLRTAGWRVYQEPIIETAVGRRKPDVVCVRDGEVNVVDTQIVSGSTSLDDAHERKLGYYRDNNTLVARVAESHGVRTDRVYFSSCTLSWRGIWSSKSADWLLGMGLSKGLLRSISTRVLQGSHTNWTRWNRMTGTAGAAASQREGVG

SEQ ID NO: 2402 - protein, 969 aa, Ancistrocerus nigricornis
MAREEALATQRGVRFLNQHLLTVVPGRSLDAIKGARKKAMYREMVQAAIQDLAATEVGSPPSSPSERVSSSSSPQSTGQAPPSSGEPSTRSSGRWSALYGDLSSAIQRLAGIARQIRGWHSHDLVGIAELSLRGDDVRARIDQWLGAVFPPQPINNAARRQGLRIVNPGRKARRRFEYARVQSALRSNMSRTIRDILDGDGAKNVVPNVKTMSEHWGPFVSQASDPVPSPPRVAPKKDLAHLWLPVTCEEVTSVSVPLNSASGSDGVSPRQWRAVPASIKALLFNVVMTAGGFSPSATASRTVFIPKKVDSPTPADFRPISISSVVVRHLHKIFAERMRDSRIVDTRQRCFDDGCAENICVLASVIAEARRCRRQLHVASLDVAKAFDSVSHGAVEAALIRLGVPDGFRKYVSDLYACSSTMFEVRGERSGLYRVGRGVRQGDPLSPMLFCLVVDAVLGEMPPDVSFELGDSRISCIAYADDILLFATTKWGLQLALSALEGKANEQGLRFNASKCSVLSMVPAGRQKKIKIVTTPSFTLRNGAHLPQVSAIAEWRYLGVNFKPAGPKKVDGDLTGLLDSLTRAPLKPQQRLVALRGFLLPRVFHALVLGRVTLGKLRALDQQTRAAVRRWLRLPPDTASGFFHTSIRDGGLGIPSLATTVPGLMLERLERLEQSSSASVRAIAESQWVQNRIRWARNALTVDGDCLNTINRRKQWWARRLHSSVDGWELRECSGTDLSSWWVSAGCFGIPGRDFVQHVHVWANSLPTLVRTSRGVRRAERQIRCRAGCNVTETAAHVIQQCHRTHGGRIKRHDAVCNTLAAGLRTVGWTVHQEPTIETAAGRRKPDIVCARDGDVHVVDTQIVSGATSLDDAHERKLGYYRDNNTLVANVAEWHSVRSDRVHFSTCTLSWRGIWSSKSADRLLGMGLSKGLLRSISTRVLQGSHTNWTRWNRMTGTAGANPAPRVGVG

SEQ ID NO: 2403 - protein, 1061 aa, Ancistrocerus nigricornis
MPRTAGLTSSSSPHVMPSTSSGDTGLVPPSSSSCSVVPLEHQEGYACPQCGRSFTTKTGLGVHRHRAHPAVANEEINIERARRGWSQEELRLMAREEALATQRGVRFLNQHLLTVVPGRSLDAVKGARKKAVYREMVQAAIQDLAATEAGSTPSSPSESVSSSSSSQPSGQAPLSSGESPTRSSRRWSALYGDLSSAIQRLVVVVRQIRGWNSLDLVDVAELSLRGEDVRLRIDQWLAGVFPPQPINSAARRQNLRIVNPGRKARRRLEYARVQSALRSNMSRTIRDILDGGGVKNVVPNVKTMSEHWGPFVSQASVPVTPPPRVAPKEDLAHLWLPVTCEEVTGVSVPLNSASGPDGVSPRQWRAVPASIKALLFNVVMTAGGFSPSATASRTVFIPKKVDSPTPADFRPISISSVVVRHLHKIFAERMRDARIVDTRQRCFDDGCAENICVLASAIAEARRRRRQLHVASLDVAKAFDSVSHGAVEAALIRLGVPDGFRKYVSNIYACSSTIFEVRGERSGLYRVGRGVRQGDPLSPMLFCLVVDTVLGEMPPDVGFELGDSRISCIAYADDILLFATTKWGLQVALSALEDKASEQGLHFNAGKCSVLSMVPASKQKKVKIVTTPSFTLRSGAHLPQVRVTAEWRYLGVDFKPAGPKKVDGDLTDLLDSLTRAPLKPQQRLVALRGFLLPRVFHALVLGRVTLGKLRALDRQTRAAVRRWLRLPPDTASGFFHAPIRGGGLGIPSLATTVPGLMLERLQRLEQSSSAAVRAVAESHWVQNRIHWARNALTVDGDCLDSINRRKRWWTQRLHSSVDGWELRECPSTDLSSWWVSAGCFGIPGRDFVQYVHVWANSLPTLVRTSRGVRRAGRQIRCRAGCNVTETAAHVIQQCHRTHGGRIKRHDAVCNTVAAGLRTVGWTVHREPIIETAVGRRKPDIVCARDGDVHVVDAQIVSGAAPLDDAHERKLGYYRDNDTLVARVAEWHSVRSDRVHFSTCTLSWRGIWSSKSAAWLLAMGLSKGLLRSISTRVLQGSHTNWTRWNRMTGTAGTNPAPRVGVG

SEQ ID NO: 2404 - protein, 1092 aa, Ancistrocerus nigricornis
MCAGKHAKKKKKKKKKKIVGPKIQNRAITCRQTRTAGPTTSSSPHVLPSTSSGDTGLVPPSSSSCSVVPPEHQEGYACPQCGRSFTTKTGLGVHRHHAHKAVVNEEINIERVKRGWNQEELRLMAREEALATQRGVRFLNQHLLTVVPGRSLDAIKGARKKAMYREMVQAAIQDLAATESGSPPSSPSERVSSSSSPQSTGQAPPSSGESPTRSSGRWSALYGDLSSAIQRLAGIARQIRGWHSHDLVDIAELSLRGDDVRARIDQWLGAVFPPQPINNAARRQGLRIVNPGRKARRRFEYARVQSALRSNMSRTIRDILDGDGAKNVVPNVKTMSEHWGPFVSQASDPVPSPPRVAPKKDLAHLWLPVTCEEVTSVSVPLNSASGSDGVSPRQWRAVPASIKALLFNVVMTAGGFSPSATASRTVFIPKKVDSPTPADFRPISISSVVVRHLHKIFAERMRDSRIVDTRQRCFDDGCAENICVLASVIAEARRCRRQLHVASLDVAKAFDSVSHGAVEAALIRLGVPDGFRKYVSDLYACSSTMFEVRGERSGLYRVGRGVRQGDPLSPMLFCLVVDAVLGEMPPDVSFELGDSRISCIAYADDILLFATTKWGLQVALSALEGKANEQGLRFNASKCSVLSMVPAGRQKKIKIVTTPSFTLRNGAHLPQVSAIAEWRYLGVNFKPAGPKKVDGDLTGLLDSLTRAPLKPQQRLVALRGFLLPRVFHALVLGRVTLGKLRALDQQTRAAVRRWLRLPPDTASGFFHTSIRDGGLGIPSLATTVPGLMLERLERLEQSSSASVRAIAESQWVQNRIRWARNALTVDGDCLNTINRRKQWWARRLHSSVDGWELRECSSTDLSSWWVSAGCFGIPGRDFVQHVHVWANSLPTLVRTSRGVRRAERQIRCRAGCNVTETAAHVIQQCHRTHGGRIKRHDAVCNTLAAGLRTVGWTVHQEPTIETAAGRRKPDIVCARDGDVHVVDTQIVSGATSLDDAHERKLGYYRDNNTLVANVAEWHSVRSDRVHFSTCTLSWRGIWSSKSADWLRGMGLSKGLLRSISTRVLQGSHTNWTRWNRMTGTAGANPTPRVGVG

SEQ ID NO: 2405 - protein, 969 aa, Ancistrocerus nigricornis
MAREEALATQQGVRFLNQHLLTVVPGRSLDAIKGARRKAMYKDMVQAATEDLAAVGPNSPLSPPSERMSSFSSSQSSGQTPVSPGESSTGSSRRWSALYGDLSGAIQRLTVVVTQIRGWNSHDLVNIAEEVLRGVDVRARIDQWLGSVFPPRPVGVMAQRRSLRIVNPGRRARRRQEYARVQRALRSNMSRTIRDILEGAGAANVVPSVKTMSEHWGPFVAQASDPVPTPPRVAPKEHLAQLWLPVTCEEVTSVSVPLNSASGLDDVSSRQWRAVPSSIKALLFNVVMAAGGFSPSALASRTVFIPKKVDTPAPSDFRPISISSVVVRHLHKIFAERMRDARVVDLRQRCFDDGCAENISVLAAVIAEARSQRRQLHVASLDVAKAFDSVSHGAVEAALIRLGVPDGFRKYIHSLYACSSTMFEVRGERSELFRVGRGVRQGDPLSPMLFCLVVDAVLGEMPPDVGFELGDCRVSCIAYADDILLFATTKWGLQTALCAVEDKAREQGLRLNAGKCSVLSMVPAGKQKKIKVITTPSFTLRSGAHLPQVSTTAEWRYLGVNFRPAGPKKVDGDITDLLDNLTHAPLKPQQRLVALRGFLLPRVFHALVLGRVTLGKLRALDRQTRAAVRRWLRLPKDTASGFFHASTRDGGLGIPSLATTVPGLMLERFQRLGQSSSPTVQAAAESRWVQNRIRWARNALTTDGDCLSSTYRRKRWWAQRLHSSVDGWELRECPGTDLSSWWVKDGCFGIPGRDFVQYVHVWANSLPTLVRTSRGVRRVERQIRCRAGCNVTETAAHVIQQCHRTHGGRIKRHDAVCNTVAAGLRTAGWRVYQEPIIETAVGRRKPDVVCVRDGEVNVVDTQIVSGSTSLDDAHERKLGYYRDNNTLVARVAESHGVRTDRVYFSSCTLSWRGIWSSKSADWLLGMGLSKGLLRSISTRVLQGSHTNWTRWNRMTGTAGAAASQREGVG

SEQ ID NO: 2406 - protein, 1226 aa, Lasioglossum lativentre
MDNTSNNNDASDTQLPGPGSCVADSSALEGTTGEDMDLNTDNETVISAAITIRVPLQENGMLCPICIKDNLQISCEKLRDLTLHFDKHHLVQTFIWECRDCGKSFDKPHGWSCHYCKCKGAVRVEAKPFQCEGCDMSFSSIRGLSTHERLVHPAIRNEKRKQALVRPLECPAVADGRSDRGVWSAEETNKLIELDARFRLHASTNKEISKFLTSKTAKQISDKRGSLRKKGVIKDPESIPREDMVVELDEVESAETNPNGLVEEFQDISDQPESVNPQAIPRQEDLNSEAHDPNAEDTDWRKTMTTAIESISINDAPPSIKNLHKKLKNIWLKHKDDIDKLKLEIDSYVSDTLVTFLLGSDEATDSNMPAGKNARNNNKKKKNNNETCNNNQNNNNNNNNISNTNNNNIRNNNNNNNKNRRFRNKTRINNSNNRKKFRYARCQDLYKECPKKLADIIVKGDHTFIDPPRPPPIASEVKELYTNLWETNGPVLQDKTLMRQPISISNILYPILPAEVDIRIKKMNNKTAGGPDNIQKKHLKTQGITTVLAMLYNILCFVNHYPTAWNQNRTTLIPKVGSDLEKVENWRPITISSALSRIFSSIIDGRLRGVIVQNLRQKGFTTENGCKYNTMILNEAIKRSKYLDGGVFTILDVSKAFDTLPHSVLEPSLQRKGIPDQVINLIRSMYANCVTSIKARDKISVQVRLLRGVKQGDPLSPLLFNLGMEHLLEMIEEETEGIPINEDTKVPILAFADDIVILGNDQKEAQKQLNMVTQYLSELGMKLSAKKCQTFQIVAAKDTWYVKDPELKAGIETVPKVDPDEVFKYLGAKMGPWKGLHQGIIIPDIVAIIKRVRKLALKPQQKIELIITYILPRFIYGLLIHPPADCTLKLLDSEIRQQIKDILHLVPSTATGFFYAPKKSGGLGLPRFEHIVKLAILKNAVKMKIAVDPAVTGVINEKTEASFKKMANSLRINWPATLEDIEKAKMRLKVDHIKQWSDLPSQGQGVQDFAKNRIGNCWLREGYLLKPSRFIDAIRLRTNTFGTRVVLARTKKDIDTTCRRCKCQPETLGHILGLCIHTKSLRIKRHDEIKILLADILAHNNEVSIEPQMTVGGNSYKPDLIIKNEERTLIVDVTVRYEHREYLQAAHDEKVEKYKACAEDIKRRYTNHTCKVLPIVVGSRGAIPEHTLQNLKTLGIKKNDIKTIALIALRSSIEMANIFIDYDEVT

SEQ ID NO: 2407 - protein, 895 aa, Lasioglossum morio
MSHKEDIGKLKLEIDSYVSDILVTFLLGSDEATDSNIPAGKNTRNNNNNNNKKKNNNDTCNNNQNNNNNISNNNNNNIRNNNNNNNKNRRIRNKTRINNSNNRKKFRYARCQDLFKECPKKLADIIIKGDHTFIDPPRPPPIASEVKELYTNLWETNGPVLQDKTFMRQPISISDILYPILAGEVDIRIKKMNNKTAGGPDNIQKRHLKTQGITTVLAMLYNILCFVNHYPTAWNQNRTTLIPKVGSDLEKVENWRPITISSALSRIFSSIIDGRLRGVIVQNLRQKGFTTENGCKYNTMILNEAIKRSKYFNGGVFTILDVSKAFDTLPHSVLEPSLRRKGIPDQVINLIRSMYTDCVTSIKARNKISVQVRLRRGVKQGDPLSPLLFNLGMEHLLEMIEEETEGIPINEDTKVPILAFADDIVILGNDQTEAQKQLNMVTQYLNDLGMKLSAKKCQTFQIVVKKDTWYVKDPELKAGIETVPKVDPDEIFKYLGSKMGPWKGLHQGIIIPDIVAIIKRVRKLALKPQQKIELIITYILPRFIYGLLIHPPADCTLKLLDSEIRQQIKDILHLVPSTATGFFYAPKKSGGLGLPRFEHIVKLAILKNAVKMKTAVDPAVTGVINEKAEASFKKIANSLRINWPATMEDVEKAKMRLKGDHIKQWSDLPSQGQGVQDFAKDRIGNCWLREGYLLKPSRFIDAIRLRTNTFGTRVVLARTKKDIDTTCRRCKCQPETLGHILGLCIHTKALRIKRHDEIKILLADKLARNNEVSIEPQMTVGENSYKPDLIIKNEERAFIVDVTVRYEHREYLQAAHDEKVEKYKACAEDIKRRFTSYTCKVLPIVVGSRGAIPEHTLQNLKILGIKKNDIKTIALIALRSSIEMANIFIDYDEVT

SEQ ID NO: 2408 - protein, 1227 aa, Lasioglossum morio
MDNTANNNNDASDTQLPGPGSGVADLSALEGTTGEDMALNTDNETDVTAAITIRVPLQDNGMLCPICIKDNLQISCEKLRDLTLHFDKHHLVQTFIWECRNCGKSFDKPHGWSCHYCKCKGPIRLEAKPFKCEACDMSFSSIRGLSTHERQVHPAIRNEKRKQAQVRPLERSAVTDGRFDRGVWSAEEVNKLIELDARFRLHAYPNKEIAKFLTNKSTKQISDKRCLLRKKGLIKDPESIQREDVVAELDEVENAETNPDSLVEDSQDISDQPESVNSQVDPRQEGLSSEAHDPNAEDTDWRKTMITAIESININDAPPNVKNLHKKLKNIWMSHKEDIGKLKLEIDSYVSDILVTFLLGSDEATDSNIPAGKNTRNNNNNNNKKKNNNDTCNNNQNNNNNISNNNNNNIRNNNNNNNKNRRIRNKTRINNSNNRKKFRYARCQDLFKECPKKLADIIIKGDHTFIDPPRPPPIASEVKELYTNLWETNGPVLQDKTFMRQPISISDILYPILAGEVDIRIKKMNNKTAGGPDNIQKRHLKTQGITTVLAMLYNILCFVNHYPTAWNQNRTTLIPKVGSDLEKVENWRPITISSALSRIFSSIIDGRLRGVIVQNLRQKGFTTENGCKYNTMILNEAIKRSKYFNGGVFTILDVSKAFDTLPHSVLEPSLRRKGIPDQVINLIRSMYTDCVTSIKARNKISVQVRLRRGVKQGDPLSPLLFNLGMEHLLEMIEEETEGIPINEDTKVPILAFADDIVILGNDQTEAQKQLNMVTQYLNDLGMKLSAKKCQTFQIVVKKDTWYVKDPELKAGIETVPKVDPDEIFKYLGSKMGPWKGLHQGIIIPDIVAIIKRVRKLALKPQQKIELIITYILPRFIYGLLIHPPADCTLKLLDSEIRQQIKDILHLVPSTATGFFYAPKKSGGLGLPRFEHIVKLAILKNAVKMKTAVDPAVTGVINEKAEASFKKIANSLRINWPATMEDVEKAKMRLKGDHIKQWSDLPSQGQGVQDFAKDRIGNCWLREGYLLKPSRFIDAIRLRTNTFGTRVVLARTKKDIDTTCRRCKCQPETLGHILGLCIHTKALRIKRHDEIKILLADKLARNNEVSIEPQMTVGENSYKPDLIIKNEERAFIVDVTVRYEHREYLQAAHDEKVEKYKACAEDIKRRFTSYTCKVLPIVVGSRGAIPEHTLQNLKILGIKKNDIKTIALIALRSSIEMANIFIDYDEVT

SEQ ID NO: 2409 - protein, 1226 aa, Lasioglossum lativentre
MDNTSNNNDASDTQLPGPGSCVADSSALEGTTGEDMDLNTDNETVISAAITIRVPLQENGMLCPICIKDNLQISCEKLRDLTLHFDKHHLVQTFIWECRDCGKSFDKPHGWSCHYCKCKGAVRVEAKPFQCEGCDMSFSSIRGLSTHERLVHPAIRNEKRKQALVRPLECPAVADGRSDRGVWSAEETNKLIELDARFRLHASTNKEISKFLTSKTAKQISDKRGSLRKKGVIKDPESIPREDMVVELDEVESAETNPNGLVEEFQDISDQPESVNPQAIPRQEDLNSEAHDPNAEDTDWRKTMTTAIESISINDAPPSIKNLHKKLKNIWLKHKDDIDKLKLEIDSYVSDTLVTFLLGSDEATDSNMPAGKNARNNNKKKKNNNETCNNNQNNNNNNNNISNTNNNNIRNNNNNNNQNRRFRNKTRINNSNNRKKFRYARCQDLYKECPKKLADIIVKGDHTFIDPPRPPPIASEVKELYTNLWETNGPVLQDKTLMRQPISISNILYPILPAEVDIRIKKMNNKTAGGPDNIQKKHLKTQGITTVLAMLYNILCFVNHYPTAWNQNRTTLIPKVGSDLEKVENWRPITISSALSRIFSSIIDGRLRGVIVQNLRQKGFTTENGCKYNTMILNEAIKRSKYLDGGVFTILDVSKAFDTLPHSVLEPSLQRKGIPDQVINLIRSMYANCVTSIKARDKISVQVRLLRGVKQGDPLSPLLFNLGMEHLLEMIEEETEGIPINEDTKVPILAFADDIVILGNDQKEAQKQLNMVTQYLSELGMKLSAKKCQTFQIVAAKDTWYVKDPELKAGIETVPKVDPDEVFKYLGAKMGPWKGLHQGIIIPDIVAIIKRVRKLALKPQQKIELIITYILPRFIYGLLIHPPADCTLKLLDSEIRQQIKDILHLVPSTATGFFYAPKKSGGLGLPRFEHIVKLAILKNAVKMKIAVDPAVTGVINEKTEASFKKMANSLRINWPATLEDIEKAKMRLKVDHIKQWSDLPSQGQGVQDFAKNRIGNCWLREGYLLKPSRFIDAIRLRTNTFGTRVVLARTKKDIDTTCRRCKCQPETLGHILGLCIHTKSLRIKRHDEIKILLADILAHNNEVSIEPQMTVGGNSYKPDLIIKNEERTLIVDVTVRYEHREYLQAAHDEKVEKYKACAEDIKRRYTNHTCKVLPIVVGSRGAIPEHTLQNFKTLGIKKNDIKTIALIALRSSIEMANIFIDYDEVT

SEQ ID NO: 2410 - protein, 820 aa, Limonius californicus
MFENNRKKFFRNMDNKNTQQMIKHPPKKEHIEQFWSKLWSNPIEHHKEAAWIKDEEKKTKQIKEMEAIEITTKDVENAIKKSNSWKAPGPEKVQNYWLKAFSSVYKKTALLFTELINEPQKTPDFLTEGMTYLLPKDEDTTNPSKYRPITCLPTLYKVLTSIITCKLNQHLEGQKIIFEEQKGCRRNSKGCKEQLIVDSTIMKQAQIKQRNLYTTYIDYRKAYDSVPHSWLIHVLNTYKIHPVLVNFLETIMKTWKTSLMIQTEAQAITSDLISIRRGIFQGDSLSALWFCIALNPLSRMLNNTKYGYYIKSATRNHRINHLLYMDDLKLYGAANHQLNALINITEMFSKDIAMSFGIDKCRTNSVEKGLYKQHDGYKTEDQYIDAMKENETYKYLGCLQSNHIEHNTMKNIIKHKYKERVENVLKKRLSGRNIVEAINTYAIPVVTYSFGTTQWSITELEELNRLTRMAFNKHRAHHVHSSTQRFTLPRNEGGRGVVDIKNAWAQEIKNMRQYFYSKENHSNLHATIIAADKNYTPLNLSSKDDPVESKCTTNLEKMQKWETKELHGKHAYQLNKPEIDKKGSNMWLTCRSGIFAETEGFIFSIQDQVVNTRNYSKYIIKNNIPSDKCRQCNTTTETIDHIICGCSVLAPTDYTYRHDNVGNIIHQELAYKYHLIDKLEHTYKYTPETVLEDENTKLYWNRQIITDKHIAHNKPDITLTDKTTRQTYLIEISVPLSNNLIAKHQNKIEKYKPLAEEIRVMWKQTNVYIIPIIVSATGIIPKSLHEQLKRLNLSSYIYTKIQKSVLLNTTSIVRKFMQQT

SEQ ID NO: 2411 - protein, 1093 aa, Bradysia coprophila
MEKQIKTMSEKSLNDGQGGSGINNISDLIKGQKSQYEKFNPTDKRWPCPFCFSKSKTKIQCIIHIKKEHLNIFKADKKLLAEFAYSDNVNPQSKESENESRTNLKKCIYCPEELSQKQYAGDKGLKIHYSRKHKGILETMPCEPSDSSIAQSQVPVPQKPNGTIECDFCPGKFFQIPNGIKIHKASCKGTKANVEISSNLDEFLDLLTTYKMETKVVKRIPNGARKCVAQKLTSVINSCVEDNSVLSWKNLFLFPYRILSVAEKKKKNEKTSLTSKIKKNVLNDNQHPVLSKSRKRNNQSLSKYVESKVFDGDIRGAIRILASDDNQLEYDLAIFNELKLKHGFEPPMDKDAQPDQDQIVAEVTAEETSKSIYSFRNGSVGGIDSLRPQHLKDLLSISIGSTEDNVLTSLTNLSNLMLAGKVNVNFLPVIYGASLIALSKKDGGIRPIAIGCTYRRLVSKLACRDIADDLSSILRPKQIGFSVKGGCEAAVHATRIFVECNDGAELIIKIDVRNAFNSVLRKVMLQKVKEKFPRIYPYVYQCYANHSNLFFGDWKIDSATGCQQGDPLGPPLFCLVINECIQELVSELNVWYLDDGTLGGRGENVIEDLTRIKHKFSLLGLELNSSKCEIYFLPNLSEQRKTEISSQVNSILPGVKILSDNKLTLLGAPLTANAVQPVIEKKMKMFSSFIERLNVLEPHVALFLLQHCLWIPKFTYLLRCCDLFKFTHYLKIMDNELKKSLEEILNIELSGNSILQCFLPIKYGGLGIRLLSDIALPAFISSFNSSSGLINEILPESIIINYNDFDCALNLWKSLHPIADVPVNGNLQELWDLPFIHETVESVSNTDSKTRARILAITQKESGGWLQALPSPHLGTLLDLDSLRIIAGIRLGAHICHPYTCICGYPVDSFGTHGLSCIKKKGTFFRHILLNDLILKALVTACFPSILEPPGLIRKDNKRPDGMTITPWMNGKSLVWDATCVDTIAHSYIDMSSKNAGAAANFACSKKEHLYEEIMKNYHFLPFAVETFGTFSEPAKSFVNKLGPILNSKSGSVHAKSFFIQKISLAIQRGNVAAITGTIPQNSKINEIFYLNG

SEQ ID NO: 2412 - protein, 1238 aa, Acropora yongei
MAEINQLQIRALRQGGRLKWTKEMNSDLLKCKRRAKEMANSNDPPRYSDGQKRGYMSIMKELWDQSGYSGLNISAQNLRNQAAYVSKSLGNVAETIREDILARNKEQIEDRSERPVMEESFIQGNNYQCNINSESQEQHLHTQSDLPTLSRDGPTPLNNEVTKIIKAARPILASVITNPGDFNNRVLDTRTRKRPTIGDITNINGAIDVLMKENNGSSNTIDPAQDPFVYLWLANCVLYSVVIALFMIKGWRKKRDLRAGKTKLEERQRELYETEAGAIRKNISIAKAEIERLRANRKMSKKGKKNRGKLLQELKNLSVAELISYMDREKSRLRKLKKGFWRSKKLEEAKQLNRKFLLDPKSVYSNFGKMLENQANSDRPVYIKEVLDAEQSNNKFKNIEEASSFWRVLWEGNNERNAQVNSNTKADWVEEVREVMKELVPELPTKAFQLDTKDARKIISKKKNWSAPGPDGITNFWWKKAHRLQEGVARSFQATVHQAEFPLWFTGGKTNLIPKQGEFKSENHRPITCLNTQYKWYTSCLLGQANRHLKEHGLMQGDQRGAKEKCSGTVDNLLIDRMVLQDAQRGRRNLSMAWVDVAKAYDSVDHHWLIDMFNLHRFPSWYSEVMQKLSTSWSTRIMAKTENGLETSDTIQFNKGLPQGDALCPLLFTLCLNPIAWKLRAAEGYKLTKPMSQKVTHLLYVDDLKVYASSENKLQRMMENVKDGMECIGLKWNEKKCAVMHVKRGSLVSDGDSMKIDGLKPINCLGEDSHYKFLGVRESVKQEDGLVLELAAKEFLRRVSVIWSSPLYDHAKVVASNQYALPALTYLMWTQTWPLAELQQIDRDTRKIISGSGGNHPKGSIAALYLTRNNGGRGLKSVEEEYKNIKIKAAVKLYENTDPSMTTVREFEEKSMKSGRHSFVKDAQRFAEERKLHLQLDNLEPALIKEDGELIIGSKVKACLDTTRQRQYQEKVEQEKWQGKLIKNRWDDNNLDRDGCFAWLHHWKTAPTHTVAGLQELYQQLLPTKVYHHRKTGMSGNADERCRMCGKTSESVGHILAGCSAIAQTQYLARHNKALKILFFEMLRSLNLISTTAPWYSQAQPKPMYENDRVIAYWDVPLFADTTHVKANRIDARIIDKERKEVKLLEMSCPWVENREEKAIEKTSKYGPLRWELQQRHPDYKITQYNIIIDVLGGYSQDLTKTLKQLVGNKYRSVAAQMQKSVVTSSLHIARSFKVLAH

SEQ ID NO: 2413 - protein, 885 aa, Acropora yongei
MMIIIIIIIIYSNFGKMLENQANSDRPVYIKEVLDAEQSNNKFKNIEEASSFWRVLWEGNNERNAQVNSNTKADWVEEVREVMKELVPELPTKAFQLDTKDARKIISKKKNWSAPGPDGITNFWWKKAHRLQEGVARSFQATVHQAEFPLWFTGGKTNLIPKQGEFKSENHRPITCLNTQYKWYTSCLLGQANRHLKEHGLMQGDQRGAKEKCSGTVDNLLIDRMVLQDAQRGRRNLSMAWVDVAKAYDSVDHHWLIDMFNLHRFPSWYSEVMQKLSTSWSTRIMAKTENGLETSDTIQFNKGLPQGDALCPLLFTLCLNPIAWKLRAAEGYKLTKPMSQKVTHLLYVDDLKVYASSENKLQRMMENVKDGMECIGLKWNEKKCAVMHVKRGSLVSDGDSMKIDGLKPINCLGEDSHYKFLGVRESVKQEDGLVLELAAKEFLRRVSVIWSSPLYDHAKVVASNQYALPALTYLMWTQTWPLAELQQIDRDTRKIISGSGGNHPKGSIAALYLTRNNGGRGLKSVEEEYKNIKIKAAVKLYENTDPSMTTVREFEEKSMKSGRHSFVKDAQRFAEERKLHLQLDNLEPALIKEDGELIIGSKVKACLDTTRQRQYQEKVEQEKWQGKLIKNRWDDNNLDRDGCFAWLHHWKTAPTHTVAGLQELYQQLLPTKVYHHRKTGMSGNADERCRMCGKTSESVGHILAGCSAIAQTQYLARHNKALKILFFEMLRSLNLISTTAPWYSQAQPKPMYENDRVIAYWDVPLFADTTHVKANRIDATIIDKERKEVKLLEMSCPWVENRKEKAIEKTSKYGPLRWELQQRHPDYKITQYNIIIDVLGGYSQDLTKTLRQLVGNKYRSVAAQMQKSVVTSSLHIARSFKVLAH

SEQ ID NO: 2414 - protein, 1238 aa, Acropora tenuis
MAEINQLQIRALRQGGRLKWTKEMNSDLLKCKRRAKEMANSNDPPRYSDGQKRGYMSIMKELWDQSGYSGLNISAQNLRNQAAYVSKSLGNVAETIREDILARNKEQIEDRSERPVMEESFIQGNNYQCNINSESQEQHLHTQSDLPTLSRDGPTPLNNEVTKIIKAARPILASVITNPGDFNNRVLDTRTRKRPTIGDITNINGAIDVLMKENNGSSNTIDPAQDPFVYLWLANCVLYSVVIALFMIKGWRKKRDLRAGKTKLEERQRELYETEAGAIRKNISIAKAEIERLRANRKMSKKGKKNREKLLQELKNLSVAELISYMDREKSRLRKLKKGFWRSKKLEEAKQLNRKFLLDPKSVYSNFGKMLENQANSDRPVYIKEVLDAEQSNNKFKNIEEASSFWRVLWEGNNERNAQVNSNTKADWVEEVREVMKELVPELPTKGFQLDTKDARKIISKKKNWSAPGPDGITNFWWKKAHRLQEGVARSFQATVHQAEFPLWFTGGKTNLIPKQGEFKSENHRPITCLNTQYKWYTSCLLGQANRHLKEHGLMQGDQRGAKEKCSGTVDNLLIDRMVLQDAQRGRRNLSMAWVDVAKAYDSVDHHWLIDMFNLHRFPSWYSEVMQKLSTSWSTRIMAKTENGLETSDTIQFNKGLPQGDALCPLLFTLCLNPIAWKLRAAEGYKLTKPMSQKVTHLLYVDDLKVYASSENKLQRMMENVKDGMECIGLKWNEKKCAVMHVKRGSLVSDGDSMKIDGLKPINCLGEDSHYKFLGVRESVKQEDGLVLELAAKEFLRRVSVIWSSPLYDHAKVVASNQYALPALTYLMWTQTWPLAELQQIDRDTRKIISGSGGNHPKGSIAALYLTRNNGGRGLKSVEEEYKNIKIKAAVKLYENTDPSMTTVREFEEKSMKSGRHSFVKDAQRFAEERKLHLQLDNLEPALIKEDGELIIGSKVKACLDTTRQRQYQEKVEQEKWQGKLIKNRWDDNNLDRDGCFAWLHHWKTAPTHTVAGLQELYQQLLPTKVYHHRKTGMSGNADERCRMCGKTSESVGHILAGCSAIAQTQYLARHNKALKILFFEMLRSLNLISTTAPWYSQAQPKPMYENDRVIAYWDVPLFADTTHVKANRIDARIIDKERKEVKLLEMSCPWVENREEKAIEKTSKYGPLRWELQQRHPDYKITQYNIIIDVLGGYSQDLTKTLKQLVGNKYRSVAAQMQKSVVTSSLHIARSFKVLAH

SEQ ID NO: 2415 - protein, 1238 aa, Acropora tenuis
MAEINQLQIRALRQGGRLKWTKEMNSDLLKCKRRAKEMANSNDPPRYSDGQKRGYMSIMKELWDQSGYSGLDISAQNLRNQAAYVSKSLGNVAETIREDILARNKEQIEDRSERPVMEESFIQGNNYQCNINSESQEQHLHTQSDLPTLSRDGPTPLNNEVTKIIKAARPILASVITNPGDFNNRVLDTRTRKRPTIGDITNINGAIDVLMKENNGSSNTIDPAQDPFVYLWLANCVLYSVVIALFMIKGWRKKRDLRAGKTKLEERQRELYETEAGAIRKNISIAKAEIERLRANRKMSKKGKKNREKLLQELKNLSVAELISYMDREKSRLRKLKKGFWRSKKLEEAKQLNRKFLLDPKSVYSNFGKMLENQANSDRPVYIKEVLDAEQSNNKFKNIEEASSFWRVLWEGNNERNAQVNSNTKADWVEEVREVMKELVPELPTKGFQLDTKDARKIISKKKNWSAPGPDGITNFWWKKAHRLQEGVARSFQATVHQAEFPLWFTGGKTNLIPKQGEFKSENHRPITCLNTQYKWYTSCLLGQANRHLKEHGLMQGDQRGAKEKCSGTVDNLLIDRMVLQDAQRGRRNLSMAWVDVAKAYDSVDHDWLIDMFNLHRFPSWYSEVMQKLSTSWSTRIMAKTENGLETSDTIQFNKGLPQGDALCPLLFTLCLNPIAWKLRAAEGYKLTKPMSQKVTHLLYVDDLKVYASSENKLQRMMENVKDGMECIGLKWNEKKCAVMHVKRGSLVSDGDSMKIDGLKPINCLGEDSHYKFLGVRESVKQEDGLVLELAAKEFLRRVSVIWSSPLYDHAKVVASNQYALPALTYLMWTQTWPLAELQQIDRDTRKIISGSGGNHPKGSIAALYLTRNNGGRGLKSVEEEYKNIKIKAAVKLYENTDPSMTTVREFEEKSMKSGRHSFVKDAQRFAEERKLHLQLDNLEPALIKEDGELIIGSKVKACLDTTRQRQYQEKVEQEKWQGKLIKNRWDDNNLDRDGCFAWLHHWKTAPTHTVAGLQELYQQLLPTKVYHHRKTGMSGNADERCRMCGKTSESVGHILAGCSAIAQTQYLARHNKALKILFFEMLRSLNLISTTAPWYSQAQPKPMYENDRVIAYWDVPLFADTTHVKANRIDARIIDKERKEVKLLEMSCPWVENREEKAIEKTSKYGPLRWELQQRHPDYKITQYNIIIDVLGGYSQDLTKTLKQLVGNKYRSVAAQMQKSVVTSSLHIARSFKVLAH

SEQ ID NO: 2416 - protein, 1117 aa, Acropora muricata
MGRREGSRIKWTEEMNDVLLQCKSKAVKLAKSDNQPRSKNGRKIGYMSLMKDMWDELGYGHLALSSQNLRDKAAALERTVGNVSRNIVRNVGRADRTRSERGNEENAEIVAVESSDQNANELRRRESANLNTESTQDPVEEIVNTLTTPEKELFERSSQLLASVNASEGDYSNRAIDTRSKQTPTKSDLKTITKVINGLVAQIKVVPGENPFGYLWLANCVLYSVVVTFLVSKGWKKDPKDKATRRAHENDSWRNKFLEIVGEVRKKLSIATAELSRTKENRTLTKRGKKNRSLLQKECRSLSASSLVSYIEKQKSLLRKLKVSFGRKKRQEDAKVLNRQFKEDPGQVYATITMMAEEDPDNARPKSKVARNEDQTSASKGVFSDIVEDEGFWRRLWEERGTGDENAEWLKEIELAISQRVPLPTVGTWTLETNEAVKVILKKRNWSAPGPDRVVNYRWKRACTLHEGVASAFKTITSSSCEYPKWFTEGKTRLIPKQGDFTSENQRPLTCLNTSYKWFTLCILGPMDKHLKVYDSMEKQQRGAKAGCSGTTDNLQIDRTVTLDYHRHKRNLSVAWVDVRKAYDSVHHRWLNKIMLVHRFPVWICEVVRKLCAAWNTRIVANTKVGNETSPVISFNRGLPQGDALCPRLFTLCPTEGYRLSSPVGSKVTNLLYIDDLKVFAASHAKLNIVLKMTKEAMEDIGLQWNPKNCNVLNVGRGVPVDIPEGFKSGETLIDSLKEDTTYRFLGAPERLLQEEKLALQCTSKTYLQRLSVIWSSPLSDTNRVQASYQLAMPVLSYLMWSQHWCLTDIDRQARKIVCESGGKHPLGLKATVYLPRALGGRGMRSVEEEYKMTKIKSAIKLYSNEDPTMRLVRAFEENAIHQGHQSLVKEAREFAEELGFTLDLSFPHPKSRDNTDGADVPTDKIKRHLKKAAIEQRKTEVKEKKWQGKLLAARWEEDQLNQWGCFAWLKNWDTAPTHTIAGMLELYEQLKVSYARKTQTNRPNDTLCRLCGKTAESISHVLASCSALAQNKYLARHNAALKVLFWEMLRELQLSDTVPPWYLPAVPKPIYESPKAQAYWDIPVFAVSEQVKQNRVDARFIEHEKKKVLAVEMSCP

SEQ ID NO: 2417 - protein, 1219 aa, Acropora florida
MDGGMNDALLQCKSKAVKLAKGDNPPRSENGRKIGYMSLMKNMRDELGYGYLALSSQNLGDKAAALERTVGNVSRNIVRNVGRADGTRSERGNEENAEIVAVESSDQNANELRRRESANLHTESTQDPVEEIVNTLTTPEKELFERSSQLLASVNASEGDYSNRAIDTRIKQTPTKSDLKTINKVTNGLVVQNKVVPGENPFAYLWLANCVLYSVVVTFLVSKGWKKDPKDKATRRAHENASWRNKFLEIVGEVRKKLSIATAELSRIKENRKLTKRGKKNHSLLQKDCRSLSASSLVSYIEKQKSLLRKLKVSFGRKRRQEEAKVLNRQFKEDPGRVYATITMMAEEDPDNARPKYKVARNEDQTSASKGVFSDIVEAEGFWRRLWEERGTGDENAEWLKEIELAISQRVPLPTVGTWTLETNEAVKVILKKRNWSAPGPDRVVNYWWKRACTLHEGVASAFKTITSSSCEYPKWFTEGKTRLIPKQGDFTSENQRPITCLNTSYKWFTSCVLGPMDKHLKVYDLMEKQQRGAKAGCSGTTDNLQIDRTVTLDCHRHKRNLSVAWVDVRKAYDSVDHRWLNKIMLVHRFPVWICEVVRKLCAAWNTRIVANTKVGNETSPVISFNRGLPQGDALCPRLFTLCLNPVAWKLCSTEGYRLSRPVGSKVTNLLYIDDLKVFAASQAKLNIVLKMTKEAMEDIGLQWNPKKCNVLNVRRGVPVDIPEGFKSGETLIDSLKEDTTYRFLGAPERLLQEEKLALQCTSKTYLQRLSVIWSSPLSDTNRVQASNQLAMPVLSYLMWSQHWCLTDLRDIDRQARKIVCESGGKHPLGLKATVYLPRALGGRGMRSVEEEYKMTKIKSAIKLYSNEDPTMRLVRAFEENAIHQGHQSLVKEAREFAEELGFTLDLSFPHPKCRDNTDGADVPRDKIKRHLKKAAIEQRKTEVKEKKWQGKLLAARWEEDQLNQRGCFAWLKNWDTAPTHTIAGMLELYEQLTPTKVYYARKTQTNRPNDTLCRLCGKTAESIPHVLASCSALAQNKYLARHNAALKVLFWEMLRELQLSDTVPPWYSPAVPKPIYESPKAQAYWDIPVFAVSEQIKQNRVDARFIDHEKKKVLAVEMSCPWTENREKKQEEKTIKYGPLRWELKQRFPGYDIRQYNIIIDVLGGWSTEVDEAMRELFGAREGEILLRMQSRHLAHPKHCPHTESDVLRIEQSELSHF

SEQ ID NO: 2418 - protein, 1088 aa, Montipora cactus
MNDALLQCKSKAVKLTNGDTPPRSENGRKIGYMSLMKDMWDKLGYGHLALSSQNLRDKAAALERTVGNVSRDIVRNVGRADGTRSERGNEENAEIVAVESSDQNANELRRRESANLHTGSTQDQVEEIVNTLTTPEKELFERSSQLFASVNTSEGDYSNRAIDTRIKQRPTQSDLKTINKVINGLVEQNKVVPGENPFAYLWLANCVLYSVVVTFLVLKGWKKDPKDKTTRRAHENDSWRNKFLEVVGEVRKKLSIATAELSRIKENRKLTKRGKKNRSLLQKECRSLSASSLVSYIEKQKSLLRKLKVSFGRKRRQEEAKVLNRQFKEDPGRVYATITMMAEEDPDNARPKYKVARNEDQTSASKGVFSDIVEAEGFWRRLWEERGTGDENAEWLKEIELAISQRVPSPTVGAWTLDTNEAVKVILKKRNWSAPGPDRVVNYWWKRACTLHEGVASAFKTITSSSCAYPKWFTEGKTRLIPKQGDFTSENQRPITCLNTSYKWFTSCVLGPMDQHLKVYDLMEKQQRGAKAGCSGTTDNLLIDRTVTLDCHRHKRNLSVAWVDVRKAYDSVDHRWLNKIMLVHRFPVWICEVVRKLCAAWNTRIVANTKVGNETSHVISFNRGLPQGDALCPRLFTLCLNPVAWKLRSTEGYRLSRPVGSKVTNLLYIDDLKVFAASQAKLNIVLKMTKEAMEDIGLQWNPKKCNVLNVRRGVPVDIPEGFKSGETVIDSLKEDTTYRFLGAPERLLQEEKLALHCTSKTYLQRLSVIWSSPLSDTNRVQASNQLAMPVLSYLMWSQHWCLTDLRDIDRQARKIVCESGGKHPLGLKATVYLLRALGGRGMRSVEEEYKMTKIKSAIKLYSNEDSTMSLVRAFEENAAHQGHQSLVIEARMFAEELGFTLDLSFPHPKCRDNTDGADVPRDKIKKHLKKAAMEQRKTEVKEKRWQGKLLAARWEEDQLNQRGCYAWLKNWDTAPTHTIAGMLELYEQLTPTKVYHARKTQTNHPNDTLCRLCGKTAESIPHVLASCSALAQNKYVARHNAALKVLFWEMLRELQLSDTVPPWYSPAVPKPIYESPEAQAYWDIPVFE

SEQ ID NO: 2419 - protein, 988 aa, Acropora muricata
MMIWKKDPKDKATRRTHENDSWRNKFLEIVGEVRKKLSIATAELSRIKENRKLTKRGKKNRSLLQKECRSLSASSLVSYIEKQKSLLRKLKVSFGRKRRQEEAKVLNRQFKEDPGRVYATITMMAEEDPDNARPKYKVARNEDQTSASKGVFSDIVEAEGFWRRLWEERGTGDENAEWLKEIELAISQRVPLPTVGTWTLETNEAVKVILKKRNWSAPGPDRVVNYWWKRACTLHEGVASAFKTITSSSCEYPKWFTEGKTRLIPKQGDFTSENQRPITCLNTSYKWFTSCVLGPMDKHLKVYDLMEKQQRGAKAGCSGTTDNLQIDRTVTLDCHRHKRNLSVAWVDVRKAYDSVDHRWLNKIMLVHRFPVWICEVVRKLCAAWNTRIVANTKVGNETSPVISFNRGLPQGDALCPRLFTLCLNPVAWKLCSTEGYRLSRPVGSKVTNLLYIDDLKVFAASQAKLNIVLKMTKEAMEDIGLQWNPKKCNVLNVRRGVPVDIPEGFKSGETLIDSLKEDTTYRFLGAPERLLQEEKLALQCTSKTYLQRLSVIWSSPLSDTNRVQASNQLAMPVLLYLMWSQHWCLTDLRDIDRQARKIVCESGGKHPLGLKATVYLPRALGGRGMRSVEEEYKMTKIKSAIKLYSNEDPTMRLVRAFEENAIHQGHQSLVKEAREFAEELGFTLDLSFPHPKCRDNTDGADVPTDKIKRHLKKAAIEQRKTEVKEKKWQGKLLAARWEEDQLNQRGCFAWLKNWDTAPTHTIAGMLELYEQLTPTKVYYARKTQTNRPNDTLCRLCGKTAESIPHVLASCSAQAQNKYLARHNAALKVLFWEMLRELQLSDTVPPWYSPAVPKPIYESPKAQAYWDIPVFAVSEQVKQNRVDARFIDHEKKKVLAVEMSCPWTENREKKQEEKTIKYGPLRWELKQQFPGYDIRQYNIIIDVLGGWSTEVDEAMRELFGARGGEILLRMQRAVISHTLNIARTLKVMS

SEQ ID NO: 2420 - protein, 866 aa, Acropora echinata
MMAEEDPDNARPKYKVARNEDQTSASKGVFSDIVEAEGFWRRLWEERGTGDENAEWLKEIELAISQRVPLPTVGTWTLETNEAVKVILKKRNWSAPGPDRVVNYWWKRACTLHEGVASAFKTITSSSCEYPKWFTEGKTRLIPKQGDFTSENQRPITCLNTSYKWFTSCVLGPMDKHLKVYDLMEKQQRGAKAGCSGTTDNLQIDRTVTLDCHRHKRNLSVAWVDVRKAYDSVDHRWLNKIMLVHRFPVWICEVVRKLCAAWNTRIVANTKVGNETSPVISFNRGLPQGDALCPRLFTLCLNPVAWKLCSTEGYRLSRPVGSKVTNLLYIDDLKVFAASQAKLNIVLKMTKEAMEDIGLQWNPKKCNVLNVRRGVPVDIPEGFKSGETLIDSLREDTTYRFLGAPERLLQEEKLALQCSSKTYLQRLSVIWSSPLSDTNRVQASNQLAMPVLSYLMWSQHWCLTDLRDIDRQARKIVCESGGKHPLGLKATVYLPRALGGRGMRSVEEEYKMTKIKSAIKLYSNEDPTMRLVRAFEENAIHQGHQSLVKEAREFAEELGFTLDLSFPHPKCRDNTDGADVPTDKIKRHLKKAAIEQRKTEVKEKKWQGKLLAARWEEDQLNQRGCFAWLKNWDTAPTHTIAGMLELYEQLTPTKVYYARKTQTNRPNDTLCRLCGKTAESIPHVLASCSALAQNKYLARHNAALKVLFWEMLRELQLSDTVPPWYSPAVPKPIYESPKAQAYWDIPVFAVSEQVKQNRVDARFIDHEKKKVLAVEMSCPWTENREKKQEEKTIKYGPLRWELKQQFPGYDIRQYNIIIDVLGGWSTEVDEAMRELFGARGGEILLRMQRAVISHTLNIARTLKVMS

SEQ ID NO: 2421 - protein, 866 aa, Acropora microphthalma
MMAEEDPDNARPKYKVARNEDQTSASKGVFSDIVEAEGFWRRLWEERGTGDENAEWLKEIELAISQRVNLPTVGTWTLETDEAVKVILKKRNWSAPGPDRVVNYWWKRACTLHEGVASAFKTITSSSCEYPKWFTEGKTRLIPKQGDFTSENQRPITCLNTSYKWFTSCVLGPMDKHLKVYDLMEKQQRGAKAGCSGTTDNLQIDRTVTLDCHRHKRNLSVAWVDVRKAYNSVDHRWLNKIMLVHRFPVWICEVVRKLCAAWNTRIVANTKVGNETSTVISFNRGLPQGDALCPRLFTLCLNPVAWKLCSTEGYRLSRPVGSKVTNLLYIDDLKVFAASQAKLNIVLKMTKEAMEDIGLQWNPKKCNVLNVRRGVPVDIPEGFKSGETLIDSLKEDTTYRFLGAPERLLQEEKLALQCTSKTYLQRLSVIWSSPLSDTNRVQASNQLAMPVLSYLMWSQHWCLTDLRDIDRQARKIVCESGGKHPLGLKATVYLPRALGGRGMRSVEEEYKMTKIKSAIKLYSNEDPTMRLVRAFEENAIHQGHQSLVKEAREFAEELGFTLDLSFPHPKCRDNTDGADVPTDKIKRHLKKAAIEQRKTEVKEKKWQGKLLAARWEEDQLNQRGCFAWLKNWDTAPTHTIAGMLELYEQLTPTKVYYARKTQTNRPNDTLCRLCGKTAESIPHVLASCSALAQNKYLARHNAALKVLFWEMLRELQLSDTVPPWYSPAVPKPIYESPKAQAYWDIPVFAVSEQVKQNRVDARFIDHEKKKVRAVEMSCQWTENREKKQEEKTIKYGPLRWELKQQFPGYDIRQYNIIIDVLGGWSTEVDEAMRELFGARGGEILLRMQRTVISHTLNIARTLKVMS

SEQ ID NO: 2422 - protein, 1167 aa, Acropora acuminata
MWDELGYEHLALSSQNLRDKAAALERTVGNVSRNIVRNVGRADGTRSERGNEENAEIVAVESSDQNANELRRRESANLHTESTLDPVEEIVNTLTTPEKELFERSSQLLASVNASEGDYSNRAIDTRIKQTPSKSDLKTINKVINGLVAQNKVVPGENPFAYLWLANCVLYSVVVTFLVSKGWKKDPKDKATRRAHENDSWRNKFLEIVGEVRKTLSIATAELSRIKENRKLTKRGKKNRSLLLKECRSLSASSLVSYIEKQKSLLRKLKVSFGRKRRQEEAKVLNRQFKEDPGRVYATITMMAEEDPANARPKYKVARNEDQTSASKGVFSDIVKAEGFWGRLWEERGTGDENAEWLKEIELAISQRVPLPTVGTWTLETNEAVKVILKKRNWSAPGPDRVVNYWWKRACTLHEGVASAFKTITSSSCEYPKWFTEGKTRLILKQGDFTSENQRPITCLNTSYKWFTSCVLGPMDKHLKVYDLMEKQQRGAKAGCSGTTDNLQIDRTVTLDCHRHKRNLSVAWVDVRKAYDSVDHRWLNKIMLVDRFPVWICEVVRKLCAAWNTRIVANTKVGNETSPVISFNRGLPQGDRLCPRLFTLCLNPVAWKLCSTEGYRLSRPVGSKVTNLLYIDDLKVFAASQAKLNIVLKMTKEAMEDIGLQWNPKKCNVLNVRRGVPVDIPEGFKSGETLIDSLKKDTTYRFLGAPERLLQEEKLALQCTSKTYLQRLSVIWSSPLSDTNRVQASNQLAMPVLSYLMWSQHWCETDLRDIDRQARKIVCESGGKHPLGLKATVYLPRALGGRGMRSVEEEYKMTKIESAIKLYSNEDPTMRLVRAFEENAIHQGHQPLVKEATEFAEELGFTFDLSFPHPKCRDNTDGADVPTDKIKGHLKKAAIEQRKTEVKEKKWQGKLLAARWEEDQLNQRCCFAWLKNWDTAPTHTIAGMLALYEQLTPTKVYYARKTQTNRPNDTLCRLCGKTAESIPHVLASCSALAQNKYLARHNAALKVLFWEMLRELQLSDTVPPWYSPAVPKPIYESPKAQAYWDIPVFAVSEQVKQNRVDARFIDHEKKKVLAVEMSCPWTENREKKQEEKTIKYGPLRWELKQQFPGYDIRQYNIIIDVLGGWSTEVDEAVRELFGARGGEILLRMQRAVISHTLNIARTLKVMS

SEQ ID NO: 2423 - protein, 1219 aa, Acropora muricata
MGRREGSRIKWTEEMNDALLQCKSKAVKLVKGDNPPRSENGRKIGYMSLMKDMWDELGYGHLALSSQNLRDKAAALERTVGNVSRNIVRNVGRADGTRPERGNEENAEIVAVESSDQNANELRRRESANLHTESTQDPVEEIVNTLTTPEKELFERSSQLLASVNASEGDYSNRAIDTRIKQTPTKSDLKTINKVINGLVAQNKVVPGENPFAYLWLANCVLYSVVVTFLVSKGWKKDPKDKATRRAHENDSWRNKFLEIVGEVRKKLSIATAELSRIKENRKLTKRGKKNRSLLQKECRSLSASSLVSYIEKQKSLLRKLKVSFGRKRRQEEAKVLNRQFKEDPGRVYATITMMAEEDPDNARPKYKAARNEDQTSASKGVFSDIVEAEGFWRRLWEERGTGDENAEWLKEIELAISQRVPLPTVGTWTLETNEAVKVILKKRNWSAPGPDRVVNYWWKQARTLHEGVASAFKTITSSSCEYPKWFTEGKTRLIPKQGDFTSENQRPITCLNTSYKWFTSCVLGPMDKHLKVYDLMEKQQRGAKAGCSGTTDNLQIDRTVTLDCHRHKRNLSVAWVDVRKAYDSVDHRWLNKIMLVHRFPVWICEVVRKLCAAWNTRIVANTKVGNETSPVISFNRGLPQGDALCPRLFTLCLNPVAWKLCSTEGYRLSRPVGSKVTNLLYIDDLKVFAASQAKLNIVLKMTKEAMEDIGLQWNPKKCNVLNVRRGVPVDIPEGFKSGETLIDSLREDTTYRFLGAPERLLQEEKLALQCSSKTYLQRLSVIWSSPLSDTNRVQASNQLAMPVLSYLMWSQHWCLTDLRDIDRQARKIVCESGGKHPLGLKATVYLPRALGGRGMRSVEEEYKMTKIKSAIKLYSNEDPTMRLVRAFEENAIHQGHQSLVKEAREFAEELGFTLDLSFPHPKCRDNTDGADVPTDKIKRHLKKAAIEQRKTEVKEKKWQGKLLAARWEEDQLNQRGCFAWLKNWDTAPTHTIAGMLELYEQLTPTKVYYARKTQTNRPNDTLCRLCGKTAESIPHVLASCSALAQNKYLARHNAALKVLFWEMLRELQLSNTVLPWYSPAVPKLIYESPKAQAYWDIPVFAVSEQVKQNRVDARFIDHEKKKVLAVEMSCPWTENREKKQEEKTIKYGPLRWELKQQFPGYDIRQYNIIIDVLGGWSPEVDEAMRELFGARGGEILLRMQRAVISHTLNIARTLKVMS

SEQ ID NO: 2424 - protein, 1314 aa, Montipora cactus
MIMIMIMIMIMTMTTTTTTTMTMTMTMTMTMTMTMTMTMTMTMTMTMTMTMTMAMAMAMAMAMAMAMAMAMAMAMMMMMMMMIIIIIINNNAGISMGRREGSRIKWTEEMNDALLQCKSKAVKLTKGDNPPRSENGRKIGYMSLMKDMWDKLGYGHLALSSQNLRDKAAALERTVGNVSRDSVRNVGRADGTRSERGNEENAEIVAVESSDQNANELRRRESANLHTGSTQDQVEEIVNTLTTPEKELFERSSQLFASVNTSEGDYSNRAIDTRIKQRPTQSHLKTINKVINGLVEQNKVVPGENPFAYLWLANCVLYSVVVTFLVLKGWKKDPKDKTTRHAHENDSWRNKFLEVVGEVRKKLSIATAELSRIKENRKLTKRGKKNRSLLKKECRSLSASSLVSYIEKQKSLLRKLKVSFGRKRRQEEAKVLNRQFKEDPGRVYATITMMAEEDPDNARPKYKVAQNEDQTSASKGVFSDIVEAEGFWRRLWEERGTGDENAEWLKEIELAISQRVPSPTVGAWTLDTNEAVKVILKKRNWSAPGPDRVVNYWWKRACTLHEGVASAFKTITSSSCAYPKWFTEGKTRLIPKQGDFTSENQRPITCLNTSYKWFTSCVLGPMDQHLKVYDLMEKQQRGAKAGCSGTTDNLLIDRTVTLDCHRHKRNLSVAWVDVRKAYDSVDHRWLNKIMLVHRFPVWICEVVRKLCAAWNTRIVANTKVGNETSHVISFNRGLPQGDALCPRLFTLCLNPVAWKLRSTEGYRLSRPVGSKVTNLLYIDDSKVFAASQAKLNIVLKMTKEAMEDIGLQWNPKKCNVLNVRRGVPVDIPEGFKSGETVIDSLKEDTTYRFLGAPERLLQEEKLALHCTSKTYLQRLSVIWSSPLSDTNRVQASNQLAMPVLSYLMWSQHWCLTDLRDIDRKARKIVCESGGKHPLGLKATVYLPRALGGRGMRSVEEEYKMTKIKSAIKLYSNEDSTMSLVRAFEENAAHQGHQSLVKEARMFAEELGFTLDLSFPHPKCRDNTDGADVPRDKIKRHLKKAAMEQRKTEVKEKRWQGKLLEARWEEDQLNQRGCFAWLKNWDTAPTHTIAGMLELYEQLTPTKVYHARKTQTNHPNDTLCRLCGKTAESIPHVLAGCSALAQNKYVARHNAALKVLFWEMLRELQLSDTVPPWYSPAVPKPIYESPETQAYWDIPVFAVSEQVKQNRVDARFIDHEKKKVLAVEMSCPWTENREKKQEEKTIKYGPLRWELKQQFPGYDIQQYNIIIDVLGGWSTEVDEAMRELFWARGGEILLRMQRAVISHTLNIARTLKVMS

SEQ ID NO: 2425 - protein, 1219 aa, Acropora echinata
MGRREGSRIKWTEEMNDALLQCKSKAVKLAKGDNPPRSENGRKIGYMSLMKDMWDELGYGHLALSSQNLRDKAAALERTVGNVSRNIVRNVGRADGTRSERGNEENAEIVAVESSDQNANELRRRESANLHTESTQDPVEEIVNTLTTPEKELFERSSQLLASVNASEGDYSNRAIDTRIKQTPTKSDLKTINKVINGLVAQNKVVPGENPFAYLWLANCVLYSVVVTFLVSKGWKKDPKDKATRRAHENDSWRNKFLEIVGEVRKKLSIATAELSRIKENRKLTKRGKKNRSLLQKECRSLSASSLVSYIEKQKSLLRKLKVSFGRKRRQEEAKVLNRQFKEDPGRVYATITMMAEEDPDNARPKYKVARNEDQTSASKGVFSDIVEAEGFWRRLWEERGTGDENAEWLKEIELAISQRVPLPTVGTWTLETNEAVKVILKKRNWSAPGPDRVVNYWWKRACTLHEGVASAFKTITSSSCEYPKWFTEGKTRLIPKQGDFTSENQRPITCLNTSYKWFTSCVLGPMDKHLKVYDLMEKQQRGAKAGCSGTTDNLQIDRTVTLDCHRHKRNLSVAWVDVRKAYDSVDHRWLNKIMLVHRFPVWICEVVRKLCAAWNTRIVANTKVGNETSPVISFNRGLPQGDALCPRLFTLCLNPVAWKLCSTEGYRLSRPVGSKVTNLLYIDDLKVFAASQAKLNIVLKMTKEAMEDIGLQWNPKKCIVLNVRRGVPVDIPEGFKSGETLIDSLREDTTYRFLGAPERLLQEEKLALQCSSKTYLQRLSVIWSSPLSDTNRVQVSNQLAMPVLSYLMWSQHWCLTDLRDIDRQARKIVCESGGKHPLGLKATVYLPRALGGRGMRSVEEEYKMTKIKSAIKLYSNEDPTMRLVRAFEENAIHQGHQSLVKEAREFAEELGFTLDLSFPHPKCRDNTDGADVPTDKIKRHLKKAAIEQRKTEVKEKKWQGKLLAARWEEDQLNQRGCFAWLKNWDTAPTHTIAGMLELYEQLTPTKVYYARKTQTNRPNDTLCRLCGKTAESIPHVLASCSALAQNKYLARHNAALKVLFWEMLRELQLSDTVPPWYSPAVPKPIYESPKAQAYWDIPVFAVSEQVKQNRVDARFIDHEKKKVLAVEMSCPWTENREKKQEEKTIKYGPLRWELKQQFPGYDIRQYNIIIDVLGGWSTEVDEAMRELFGARGGEILLRMQRAVISHTLNIARTLKVMS

SEQ ID NO: 2426 - protein, 866 aa, Acropora millepora
MMAEEDPDNARPKYKVARNEDQTSASKGVFSDIVEAEGFWRRLWEERGTGDENAEWLKEIELAISQRVPLPTVGTWTLETNEAVKVILKKRNWSAPGPDRVVNYWWKRACTLHEGVASAFKTITSSSCEYPKWFTEGKTRLIPKQGDFTSENQRPITCLNTSYKWFTSCVLGPMDKHLKVYDLMEKQQRGAKAGCSGTTDNLQIDRTVTLDCHRHKRNLSVAWVDVRKAYDSVDHRWLNKIMLVHRFPVWICEVVRKLCAAWNTRIVANTKVGNETSPVISFNRGLPQGDALCPRLFTLCLNPVAWKLCSTEGYRLSRPVGSKVTNLLYIDDLKVFAASQAKLNIVLKMTKEAMEDIGLQWNPKKCNVLNVRRGVPVDIPEGFKSGETLIDSLKEDTTYRFLGAPERLLQEEKLALQCTSKTYLQRLSVIWSSPLSDTNRVQASNQLAMPVLSYLMWSQHWCLTDLRDIDRQARKIVCESGGKHPLGLKAIVYLPRALGGRGMRSVEEEYKMTKIKSAIKLYSNEDPTMRLVRAFEENAIHQGHQSLVKEAREFAEELGFTLDLSFPHPKCRDNTDGADVPTDKIKRHLKKAAIEQRKTEVKEKKWQGKLLAARWEEDQLNQRGCFAWLKNWDTAPTHTIAGMLELYEQLTPTKVYYARKTQTNRPNDTLCRLCGKTAESIPHVLASCSALAQNKYLARHNAALKVLFWEMLRELQLSDTVPPWYSPAVPKPIYESPKAQAYWDIPVFAVREQVKQNRVDARFIDHEKKKVLAVEMSCPWTENREKKQEEKTIKYGPLRWELKQQFPGYDIRQYNIIIDVLGGWSTEVDEAMRELFGARGGEILLRMQRAVILHTLNIARTLKVMS

SEQ ID NO: 2427 - protein, 1086 aa, Acropora microphthalma
MLHIENNNNNNNNNNNNKELFERSSQLFASVNASEGDYSNRALDTRIKQTPTKSDLKTINKVINGLVAQNKVVPGENPFAYLWLANCVLYSVVVTFLVSKGWKKDPKDKATRRAHENDSWRNKFLEIVGEVRKKLSIATAELSRIKENRKLTKRGKKNRSLLQKECRSLSASSLVSYIEKQKSLLRKLKVSFGRKRRQEEAKVLNRQFKEDPGRVYATITMMAEEDPDNARPKYKVARNEDQTSASKGVFSDIVEAEGFWRRLWEERGTGDENAEWLKEIELAISQRVPLPTVGTWTLETNEAVKVILKKRNWSAPGPDRVVNYWWKRACTLHEGVASAFKTITSSSCEYPKWFTEGKTRLIPKQGDFTSENQRPITCLNTSYKWFTSCVLGPMDKHLKVYDLMEKQQRGAKAGCSGTTDNLQIDRTVTLDCHRHKRNLSVAWVDVRKAYDSVDHRWLNKIMLVHRFPVWICEVVRKLCAAWNTRIVANTKVGNETSPVISFNRGLPQGDALCPRLFTLCLNPVAWKLCSTEGYRLSRPVGSKVTNLLYIDDLKVFAASQAKLNIVLKMTKEAMEDIGLQWNPKKCNVLNVRRGVPVDIPEGFKSGETLIDSLKEDTTYRFLGAPERLLQEEKLALQCTSKTYLQRLSVIWSSPLSDTNRVQASNQLAMPVLSYLMWSQHWCLTDLRDIDRQARKIVCESGGKHPLGLKATVYLPRALGGRGMRSVEEEYKMTKIKSAIKLYSNEDPTMRLVRAFEENAIHQGHQSLVKEAREFAEELGFTLDLSFPHPKCRDNTDGADVPTDKIKRHLKKAAIEQRKTEVKEKKWQGKLLAARWEEDQLNQRGCFAWLKNWDTAPTHTIAGMLELYEQLTPTKVYYARKTQTNRPNDTLCRLCGKTAESIPHVLGSCSALAQNKYLARHNAALKVLFWEMLRELQLSDTVPPWYSPTVPKPIYESPKAQAYWDIPVIAVSEQVKQNRVDARFIDHVEKKVLAVEMSCPWTENREKKQEEKTIKYGPLRWELKQQFPGYDIRQYNIIIDVLGGWSTEVDEAMRELFGARGGESLLRMQRAVISHTLNIAHTLKVMS

SEQ ID NO: 2428 - protein, 1219 aa, Acropora millepora
MGRREGSRIKWTEEMNDVLLQCKSKAVKLAKGDNPPRSENGRKIGYMSLMKDMWDELGYGHLALSSQNLRDKAAALERTVGNVSRNIVRNVGRADGTRSERGNEENAEIVAVESSDQNANELRRRESANLHTESTQDPVEEIVNTLTTPEKELFERSSQLLASVNASEGDYSNRAIDTRIKQTPTKSDLKTINKVINGLVAQNKVVPGENPFAYLWLANCVLYSVVVTFLVSKGWKKDPKDKATRRAHENDSWRNKFLEIVGEVRKKLSIATAELSRIKENRKLTKRGKKNRSLLQKECRSLSASSLVSYIEKQKSLLRKLKVSFGRKRRQEEAKVLNRQFKEDPGRVYATITMMAEEDPDNARPKYKVARNEDQTSASKGVFSDIVEDEGFWRRLWEERGTGDENAEWLKEIELAISQRVPLPTVGTWTLETNEAVKVILKKRNWSAPGPDRVVNYRWKRACTLHEGVASAFKTITSSSCEYPKWFTEGKTRLIPKQGDFTSENQRPITCLNTSYKWFTSCILGPMDKHLKVYDLMEKQQRGAKAGCSGTTDNLQIDRTVTLDYHKHKRNLSVAWVDVRKAYDSVHHRWLNKIMLVHRFPVWICEVVRKLCAACNTRIVANTKVGNETSPVISFNRGLPQGDALWPRLFTLCLNPVAWKLCSTEGYRLSRPVGSKVTNLLYIDDLKVFAASQAKLNIVLKMTKEAMEDIGLQWNSKKCNVLNVRRGVPVDIPEGFKSGETLIDSLKEDTTYRFLGAPERLLQEEKLALQCTSKTYLQRLSVIWSSPLSDTNRVQASNQLAMPVLSYLMWSQHWCLTDLRDIDRQARKIVCESGGKHPLGLKAIVYLPRALGGRGMRSVEEEYKMTKIKSAIKLYSNEDPTMRLVRAFEENAIHQGHQSLVKEAREFAEELGFTLDLSFPHPKCRDNTDGADVPTDKIKRHLKKAAIEQRKTEVKEKKWQGKLLAARWEEDQLNQRGCFAWLKNWDTAPTHTIAGMLELYEQLTPTKVYYARKTQTNRPNDTLCRLCGKTAESIPHVLASCSALAQNKYLARHNAALKVLFWEMLRELQLSDTVPPWYSPAVPKPIYESPKAQAYWDIPVFAVSEQVKQNRVDARFIDHEKKKVLAVEMSCPWTENREKKQEEKTIKYGPLRWELKQQFPGYDIRQYNIIIDVLGGWSTEVDEAMRELFGARGGEILLRMQRAVISHTLNIARTLKVMS

SEQ ID NO: 2429 - protein, 1219 aa, Acropora echinata
MGRRAGSRIKWTEEMNDVLLQCKSKAVKLANGDNPPRSENGRKIGYMSLMKDMWDELGYGHLALSSQNLRDKAAALERTVGNVSRNIMRNVGRADGTRSERGNEENAEIVAVESSDQNANELRRRESANLHTESTQDPVEEIVNTLTTPEKELFERPSQLLASVNASEGDYSNRAIDTRIKQTPTKSDLKTINKVINGLVAQNKVVPGENPFAYLWLANCVLYSVVVTFLVSKGWKKDPKDKATRRTHKIDSWRNKFLEIVGEVRKKLSIATAELSRIKENRKLTKRGKKNRSLLQKECRSLSASSLVSYIEKQKSLLRKLKVIFGRKRRQEEAKVLNRQFKEDPGRVYATITMMAEEDPDNARPKYKVAWNEDQTSPSKGVFSDIVEAEGFWRRLWEERGTGDENAEWLKEIELAISQRVPLPTVGTWTLETNEAVKVILKKRNWSAPGPDRVVNYWWKRACTLHEGVASALKTITSSSCEYPQWFTEGKTRLIPKQGDFTSENQRPITCLNTSYKWFTSCVLGPMDKHLKVYDLMEKQQRGAKAGCSGTTDNLQIDRTVTLDCHRHKCNLSVAWVDVRKAYDSVDHRWLNKIMLVHRFPVWICKVVRKLCAAWNTRIVTNTKVGNETSPVINFNRGLPQGDALCPRLFTLCLNPVAWKLCSTESYRLSRPVGSKVTNLLYIDDMKVFAASQAKLNIVLKMTKEAMEDIGLQWNPKKCNVLNVRRGVPVDIPGGFKSGETLIDSLKEDTTYRCLGAPERLLQEENLALQCTSKTYLQRLSVIWSSPLSDTNRVQASNQLAMPVLSYLMWSQHWCLTDLRDIDRQARKIVCESGGKHPLGLKATVYLPRALGGRGMRSVEEEYKMTKIKSAIKLYSNEDPTMRLVRAFEENAIHQGHQSLVKEAREFAEELGFTLDLSFPHPKCRDNTDGADVPTDKIKRHLKKAAIEQRKTEVKKKKWQGKLLAARWEEDQLNQRGCFAWLKNWDTRPTHTIAGMLELYEQLTPAKVYYARKTQTNRPNDTLCRLCGKTAESIPHVLASCSALAQNKYLARHNAALKVLFWEMLRELQLSDTVPPWYSPTVPKPIYESPKAQAYWDIPVFAVSEQVKQNRVDARFIDHKKKKVLAVEMSCPWTENREKKQEEKTIKYGPLRWELKQQFPGYDIRQYNIIIDLLGGWSTEVDGAMRELFGARGGEILLRMQRAVISHTLNIARTLKVMS

SEQ ID NO: 2430 - protein, 1219 aa, Acropora hyacinthus
MGRREGSRIKWTEEMNDALLQCKSKAVKLAKGDNPPRSENGRKIGYMSLMKDMWDELGYGHLALSSQNLRDKAAALERTVGNVSRNIVRNVGRADGTRSERGNEENAEIVAVESSDQNANELRGRESANLHTESTQDPVEEIVNTLTTPEKELFERSSQLLASVNTSEGDYSNRAIDTRSKQTPTKSDLKTITKVINDLVAQIKVVTGENPFAYLWLANCVLYSVVVTFLVSKGWKKDPKDKATRRTHENDSWRNKFLEIVGEVRKKLSIATAELSRIKENRKLTKRGKKNRSLLQKECRSLSASSLVSYIEKQKSLLRKLKVSFGRKRRQEEAKVLNRQFKEDPGRVYATITMMAEEDPDNARPKYKVARNEDQTSASKGVFSDIVEAEGFWRRLWEERGTGDENAEWLKEIELAISQRVPLPTVGTWTLETNEAVKVILKKRNWSAPGPDRVVNYWWKRACTLHEGVASAFKTITSSSCEYPKWFTEGKTRLIPKQGDFTSENQRPITCLNTSYKWFTSCVLGPMDKHLKVYDLMEKQQRGAKAGCSGTTDNLQIDRTVTLDCHRHKRNLSVAWVDVRKAYDSVDHRWLNKIMLVHRFPVWICEVVRKLCAAWNTRIVANTKVGNETSPVISFNRGLPQGDALCPRLFTLCLNPVAWKLCSTEGYRLSRPVGSKVTNLLYIDDLKVFAASQAKLNIVLKMTKEAMEDIGLQWNPKKCNVLNVRRGVPVDIPEGFKSGETLIDSLKEDTTYRFLGAPERLLQEEKLALQCTSKTYLQRLSVIWSSPLSDTNRVQASNQLAMPVLSYLMWSQHWCLTDLRDIDRQARKIMCESGGKHLLELKATVNLPRALGGRGMRSVQEEYKMTKIKSAIKLYSNDDPTMRLVRAFEENAIHQGHQSLVKEAREFAEELGFTLDLSFPHPKCRDNTDGADVPTDKIKRHLKKAAIEQRKTEVKEKKWQGKLLAARWEEDQLNQRGCFAWLKNWDTAPTHTIAGMLELYEQLTPTKVYYARKTQTNRPNDTLCRLCGKTAESIPHVLASCSALAQNKYLARHNAALKVLFWEMLRELQLSNTVLPWYSPAVPKPIYESPKAQAYWNIPVFAVSEQVKQNRVDARFIGHEKKKVLAVEMSCPWTENREKKQEEKTIKYGPLRWELKQQFPGYDIRQYNIIIDVLGGWSPEVDEAMRELFGARGGEILLRMQRAVISHTLNIARTLKVMF

SEQ ID NO: 2431 - protein, 1219 aa, Acropora muricata
MGRREGSRIKWTEEMNVVLLQCKSKAVKLAKGDNPPWSENGRKIGYMSLMKDMWDELGYGHLALSSQNLRDKAAALERTVGNVSRNIVRNVARADGTRSERGNKENAEIVAVESSDQNANELRRRESANLHTESTQDPVEEIVNTLTTPEKELFERSSQLLASVNASEGDYSNRAIDTRIKQTPTKSDLKTINKVINGLVAQNKVVPGENPFAYLWLANCVLYSVVVTFLVSKGWKKDPKDKATRRTHENDSWRNKFLEIVGEVRKKLSIATAELNRIKENRKLTKRGKKNRSLLQKECRSLSASSLVSYIEKQKSLLRKLKVSFGRKRRQEEAKVLNRQFKEDPGRVYATITMMAEEDPDNTRPKYKVAQNEDQTSASKGVFSDIVESEGFWRRLWEERGTGDENAEWLKEIELAISQRVPLPTVGTWTLETNEAVKVILKKRNWSAPGPDRVVNYWWKRACTLHEGVASAFKTITSSSCEYPKWFTEGKTRLIPKQGDFTSENQRPITCLNTSYKWFTSCVLGPMDKHLKVYDLMEKQQRGAKAGCSGTTDNLQIDRAVTLDCHRHKRNLSVAWVDVRKAYDSVDHRWLNKIMLVHRFPVWICEVVRKLCAAWNTRIVTNTKVGNETSPVISFNRGLPQGDALCPRLFTLCLNPVAWKLCSTEGYRLLRPVGSKVTNLLYIDDLKVFAASQAKLNIVLKMTKEAMEDIGLQWNPKKCNVLNVRRGVPVDIPEGFKSGETLIDSLKEDTTYRFLGAPERLLQEEKLALQCTSKTYLQRLSVIWSSPLSDTNRVQASNQLAMPVLSYLMWSQHWCLTDLRDIDRQARKIVCESGGKHPLGLKATVYLPRALGGRGMRSVEEEYKMTKIKSAIKLYSNEDPTMRLVRAFEENAIHQGHQSLVKEAREFAEELGFTLDLSFPHPKCRDNTDGADVPTDKIKRHLKKAAIEQRKTEVKEKKWQGKLLAARWEEDQLNQRGCFAWLKNWDTAPTHTIAGMLELYEQLTPTKVYYARKTQTNRPNDTLCRLCGKTAESIPHVLASCSALAQNKYLARHNAALKVLFWEMLRELQLSDTVPPWYSPAVPKPIYESPKAQAYWDIPVFAVSEQVKQNRMDARFIDHEKKKVLAVEMSCPWTENREKKQEEKTIKYGPLRWELKQQFPGYDIQQYNIIIDVLGGWSTEVDEAMRELFGARGGEILLRMQRAVISHTLNIARTLKVMS

SEQ ID NO: 2432 - protein, 866 aa, Acropora cytherea
MMAEEDPDNARPKYKVARNEDQTSASKGLFSGIVEAEGFWRRLWEERGTGDENAEWLKEIELAISQRVPLPTVGTWTLETNEAVKIILKKRNWSAPGPDRVVNYWWKRACTLHEGVAFAFKTITSSSCESPMWFTEGKTRLIPKQGDFTSENQRPITCLNTSYKWFTSCVLGPMDKHLKVYDLMEKQQRGAKAGCSGTTDNLQIDRTVTLDCHRHKRNLSVAWVDVRKAYDSVDHKWLNKIMLVHRFPVWICEVVRKLCAAWNTRIVANTKVGNETSPVISFNRGLPQGDALCPRLFTLCLNPVAWKLCSTEGYRLSRPVGSKVTNLLYIDDLKVFAASQAKLNIVLKMTKEAMEDIGLQWNPKKCNVLNVRRGVPVDIPEGFKSGETLIDSLKEDTTYRFLGAPERLLQEEKLALQCTSKTYLQRLSVIWSSPLSDTNRVQASNQLAMPVLSYLMWSQHWCLTDLRDIDRQARKIVCESGGKHPLGLKATVYLPRALGGRGMRSVEEEYKMTKIKSAIKLYSNEDPTMRLVRAFEENAIHQGHQSLVKEAREFAEELGFTLDLSFPHPKCRDNTDGADVPTDKIKRHLKKAAIEQRKTEVKEKKWQGKLLAARWEEDQLNQRGCFAWLKNWDTAPTHTIAGMLELYEQLTPTKVYYARKTQTNRPNDTLCRLCGKTAESIPHVLASCSALAQNKYLARHNAALKVLFWEMLRELQLSDTVPPWYSPAVPKPIYESPKAQAYWDIPVFAVSEQVKQNRVDARFIDHEKKKVLAVEMSCPWTENREKKQEEKTIKYGPLRWELKQQFPGYDIRQYNIIIDVLGGWSTEVDEAMRELFGARGGEILLRMQRAVISHTLNIARTLKVMS

SEQ ID NO: 2433 - protein, 866 aa, Acropora nasuta
MMAEEDPDNARPKYKVARNEDQTSASKGVFSDVVEAEEFWRRLWEERETGDENAEWLKEIELAISQRVPLPTVGTWTLETNEAVKVILKKRNWSAPGPDRVVNYWWKRACTLHEGVASAFKTITSSSCEYPKGFTEGKTRLIPKQGDFTSENQRPITCLNTSYKWFTSCVLGPMDKHLKVYDLMGKQQRGAKAGCRGTTDNLQIDRTVTLDCHRHKRNLSVAWVDVRKAYDSVDHRRFNKIMLVHRFPVWICEVVRKLCAAWNTRIVANTKVGNETSPVISFNRGLPQGDALCPRLFTLCLNPVAWKLCSPEGYRLSRPVGSKVTNLLYIDDLKVFAASQAKLNIVLKMTKEAMEDIGLQWNPKKCNVLNVRRGVPVDIPEGFKSGETLIDSLREDTTYRFLGAPERLLQEEKLALQCSSKTYLQRLSVIWSSPLSDTNRVQASNQLAMPVLSYLMWSQHWWLTDLRDIDRQARKIVCESGGKHPLGLKVTVYLPRALGGRGMRSVEEEYKMTKIKSAIKLYSNEDPTMRLVRAFEENAIHQGHQSLVKEAREFAEELGFTLDLSFPHPKCHDNTHGADVPTDKIKRHLKKAAIEQRKTEVKEKKWQGKLLAARWEEDQLNQRGCFAWLKNWDTAPTHTIAGMLELYEQLTPTKVYYARKTQTNRPNDTLCRLCGKTAESIPHVLASCSALAQNKYLSRHNATLKVLFWEMLRELQLSDTVSPWYSPAIPKPIYESPKAQAYWDIPVFAVSEQVKQNRVDARFIDHEKKKVLAVEMSCPWTENREKKQEEKTIKYGPLRWELKQQFPGYDIRQYNIIIDVLGGWSTEVDEAMKELFGARGGEILLRMQRAVISHTLNIARTLKVMS

SEQ ID NO: 2434 - protein, 1219 aa, Montipora efflorescens
MGRREGSRIKWTEEMNDALLQCKSKAVKLTKGDNPPRSENGRKIGYMSLMKDMWDKLGYGHLALSSQNLRDKAAALERTVGNVSRDIVRNVGRADGTRSERGNEENAEIVAVESSDQNANELRRRESANLHTGSTQDQVEEIVNTLTTPEKELFERSSQLFASVNTSEGDYSNRAIDTRIKQRPTQSDLKTINKVINGLVEQNKVVPGENPFAYLWLANCVLYSVVVTFLVLKGWKKDPKDKTTRRAHENDGWRNKFLEVVGEVRKKLSIATAELSRIKENRKLTKRGKKNRSLLQKECRSLSASSLVSYIEKQKSLLRKLKVSFGRKRRQEEAKVLNRQFKEDPGRVYATITMMAEEDPDNARPKYKVARNEDQTSASKGVFSDIVEAEGFWRRLWEERGTGDENAEWLKEIELAISQRVPSPTVGAWTLDTNEAVKVILKKRNWSAPGPDRVVNYWWKRACTLHEGVASAFKTITSSSCAYPKWFTEGKTRLIPKQGDFTSENQRPITCLNTSYKWFTSCVLGPMDQHLKVYDLMEKQQRGAKAGCSGTTDNLLIDRTVTLDCHRHKRNLSVAWVDVRKAYDSVDHRWLNKIMLVHRFPVWICEVVRKLCAAWNTRIVANTKVGNETSHVISFNRGLPQGDALCPRLFTLCLNPVAWKLRSTEGYRLSRPVGSKVTNLLYIDDLKVFTASQAKLNIVLKMTKEAMEDIGLQWNPKKCNVLNVRRGVPVDIPEGFKSGETVIDSLKEDTTYRFLGAPERLLQEEKLALHCTSKTYLQRLSVIWSSPLSDTNRVQASNQLAMPVLSYLMWSQHWCLTDLRDIDRKARKIVCENGGKHPLGLKATVYLPRALGGRGMRSVEEEYKMTKIKSAIKLYSNEDSTMSLVRAFEENAAHQGHQSLVKEARMFAEELGFTLDLSFPHPKCRDNTDGADVPRDKIKRHLKKAAMEQRKTEVKEKRWQGKLLAARWEEDQLNQRGCFAWLKNWDTAPTHTIAGMLELYEQLTPTKVYHARKTQTNHPNDTLCRLCGKTAESIPHVLAGCSALAQNKYVARHNAALKVLFWEMLRELQLSDTVPPWYSPAVPKPIYESPETQAYWDIPVFAVSEQVKQNRVDARFIDHEKKKVLAVEMSCPWTENREKKQEEKTIKYGPLRWELKQQFPGYDIQQYNIIIDVLGGWSTEVDEAMRELFGARGGEILLRMQRAVISHTLNIARTLKVMS

SEQ ID NO: 2435 - protein, 1219 aa, Acropora millepora
MGRREGSRIKWTEEMNDVLLQCKSKAVKLAKGDNPPRSENGRKIGYMSLMKDMWDELGYGHLALSSQNLRDKAAALERTVGNVSRNIVRNVGRADGTRSERGNEENAEIVAVESSDQNANELRRRESANLHTESTQDPVEEIVNTLTTPEKELFERSSQLLASVNASEGDYSNRAIDTRIKQTPTKSDLKTINKVINGLVAQNKVVPGENPFAYLWLANCVLYSVVVTFLVSKGWKKDPKDKATRRAHENDSWRNKFLEIVGEVRKKLSIATAELSRIKENRKLTKRGKKNRSLLQKECRSLSASSLVSYIEKQKSLLRKLKVSFGRKRRQEEAKVLNRQFKEDPGRVYATITMMAEEDPDNAWPKYKAARNEDQTSASKGVFSDIAEAEGFWRRLWEERGTGDENAEWLKEIELAISQRVPLPTVGTWTLETNEAVKVILKKRNWSAPGPDRVVNYWWKRACTLHEGVASAFKTITSSSCEYPKWFTEGKTRLIPKQGDFTSENQRPITCLNTSYKWFTSCVLGPMDKHLKVYDLMEKQQRGAKAGCSGTTDNLQIDRTVTLDCHRHKRNLSVAWVDVRKAYDSVDHRWLNKIMLVHRFPVWICEVVRKLCAAWNTRIVANTKVGNETSPVISFNRGLPQGDALCPRLFTLCLNPVAWKLCSTEGYRLSRPVGSKVTNLLYIDDLKVFAASQAKLNIVLKMTKEAMEDIGLQWNPKKCNVLNVRRGVPVDIPEGFKSGETLIDSLKEDTTYRFLGAPERLLQEEKLALQCTSKTYLQRLSVIWSSPLSDTNRVQASNQLAMPVLSYLMWSQHWCLTDLRDIDRQARKIVCESGGKHPLGLKAIVYLPRALGGRGMRSVEEEYKMTKIKSAIKLYSNEDPTMRLVRAFEENAIHQGHQSLVKEAREFAEELGFTLDLSFPHPKCRDNTDGADVPTDKIKRHLKKAAIEQRKTEVKEKKWQGKLLAARWEEDQLNQRGCFAWLKNWDTAPTHTIAGMLELYEQLTPTKVYYARKTQTNRPNDTLCRLCGKTAESIPHVLASCSALAQNKYLARHNAALKVLFWEMLRELQLSDTVPPWYSPAVPKPIYESPKAQAYWDIPVFAVSEQVKQNRVDARFIDHEKKKVLAVEMSCPWTENREKKQEEKTIKYGPLRWELKQQFPGYDIRQYNIIIDVLGGWSTEVDEAMRELFGARGGEILLRMQRAVISHTLNIARTLKVMS

SEQ ID NO: 2436 - protein, 1039 aa, Acropora selago
MLMSCEGERAQICIQKTQDPVEEIVNTLTTPEKELFERSSQLLASVNASEGDYFNRAIDTRIKQTPTKSDLKTINKVINGLMAQSKVVPGENPFAYLWLANCVLYSVVVTFLVSKGWKKDPKDKATRRTHENDSWRNKFLEIVGEVRKKLSIATAELSRMKENRKLTKRGKKNRFLLQKECRSLSASSLVSYIEKQKSLLRKLKVSFGRKRRQEEAKVLNCQFKEDPGRVYATITMIAEEDPDNARPKYKVARNEDQTSASKGMFSDIVKAEGFWRRLWEERRTGDENAEWLKEIELAISQRVPLPTFGTRTLETDEAVKVILKKRNWSAPVPDRVVNYRWKRACTLHAGVASAFKTITSSSWEYPKWFTEGKTRLIPKQGDFTSENQRPITCLNTSYKWFTSCVLGPMDKHLKVYGLMEKQQRGAKAGCSGTTDNLQIDRTVTLDCHRHKRHLSVAWVDVRKAYDSVDHRWLNKIMLVHRFPVWICEVVRKLCVAWNTRIVANTKVSNETSPVISFNRGLPQGDALCPRLFTLCLNPVAWKLCSTEGYRLSRPVGSKVTNLLYIHDLKVFAASQAKLNIVLKMTKEAMEDIGLQWNPKKCNVLNVRRGVPVDIPEGFKSGETLIDSLKEDTTYRFLGALERLLQEEKLALQCTSKTYLQRLSVIWSSPLSDTNRVQASNQLAMPVLSYLMWYQHWCLTDLRDIDRQARKIVCESGGKHPLGLKATVYLPRALGGRGMRSVEEEYKMTKIKSAIKLYSNEDPTMRLVRAFEENAIHRGHQSLVKEAREFAEELGFTLDLSFPHPKCRDNTDGADVPRDKIKRHLKKAAIEQRKTEVKEKKWQGKLLAARWEEDQLNQRGCFAWLKNWDTAPTHTIAGMLELYEQLTPTKVYYARKTQTNRPNDTLCRLCGKTAESIPHVLASCSALAQNKYLARHNAALKVLFWEMLRELQLSDTVPPWYSPAVPKPIYESPKAQAYWDIPVFAVSEQVKQNRVDARFIDHEKKKLLAVEMSCQRKEARREDHQVWPPPLGTQTAVPRI

SEQ ID NO: 2437 - protein, 1219 aa, Acropora millepora
MGRREGSRIKWTEEMNDALLQCKSKAVKLAKDDNPPRSENGRKIGYMSLMKDMWDELGYGHLALSSQNLRDKAAALERTVGNVSRNIVRNVGRADGTRSERGNEENAEIVAVESSDQNANELRGRESANLHTERTQDPVEEIVNTLTTPEKELFERSSQLLASVNASEGDYSNRAIDTRIKQTATKSDLKTINKVINGLVAQNKVVPGENPFAYLWLANCVLYSVVVTFLVSKGWKKDPKDKATRRAHENDSWRNKFLEIVGEVRKKLSIATAELSRIKENRKLTKRGKKNRSLLQKECRSLSASSLVSYIEKQKSLLRKLKVSFGRKRRQEEAKVLNRQFKEDPGRVYATITMMAEEDPDNARPKYKVARNEDQTSASKGVFSDIVEAEGFWRRLWEERGTGDENAEWLKEIELAISQRVPLPTVGTWTLETNEAVKVILKKRNWSAPGPDRVVNYWWKRACTLHEGVASAFKTITSSSCEYPKWFTEGKTRLIPKQGDFTSENQRPITCLNTSYKWFTSCVLGPMDKHLKVYDLMEKQQRGAKAGCSGTTDNLQIDRTVTLDCHRHKRNLSVAWVDVRKAYDSVDHRWLNKIMLVHRFPVWICEVVRKLCAAWNTRIVANTKVGNETSPVISFNRGLPQGDALCPRLFTLCLNPVAWKLCSTEGYRLSRPVGSKVTNLLYIDDLKVFAASQAKLNIVLKMTKEAMEDIGLQWNPKKCNVLNVRRGVPVDIPEGFKSGETLIDSLKEDTTYRFLGAPERLLQEEKLALQCTSKTYLQRLSVIWSSPLSDTNRVQASNQLAMPVLSYLMWSQHWCLTDLRDIDRQARKIVCESGGKHPLGLKATVYLPRALGGRGMRSVEEEYKMTKIKSAIKLYSNEDPTMRLVRAFEENAIHQGHQSLVKEAREFAEELGFTLDLSFPHPKCRDNTDGADVPTDKIKRHLKKAAIEQRKTEVKEKKWQGKLLAARWEEDQLNQRGCFAWLKNWDTAPTHTIAGMLELYEQLTPTKVYYARKTQTNRPNDTLCRLCGKTAESIPHVLASCSALAQNKYLARHNAALKVLFWEMLRELQLSDTVPPWYSPAVPKPIYESPKAQAYWDIPVFAVSEQVKQNRVDARFIDHEKKKVLAVEMSCPWTENREKKQEEKTIKYGPLRWELKQQFPGYDIRQYNIIIDVLGGWSTEVDEAMRELFGARGGEILLRMQRAVISHTLNIARTLKVMS

SEQ ID NO: 2438 - protein, 1170 aa, Acropora selago
MGERLEQEEIKGTNNNITTSNYNDNNNNNNNNNNNRNIVRNVGRADGTRSERGNEENTEIVAFESSDQNANELRSRESANLHTESIQDPVEEIGNTLTTPEKELFERSSQLLASVNASEGDYSNRAIDTRIKQTPTKSDLKTINKVINGLVAQDKVVPGENPFAYLWLANCVLYSVVVTFLVSKGWKKDPKDKATRRAHENDSWRNKFLEIVGEVRKKLSIATAELSRIKENRKLTKRGKKNRSLLQKECRSLSASSLVSYIEKQKSLLRKLKVSFGRKRRQEEAKVLNRQFKEDPGRVYATITMMAEEDPDNARPKYKVARNEDQTSASKGVFSDIVEAEGFWRRLWEERGTGDENAEWLKEIELAISQRVPLPTVGTWTLETNEAVKVILKKRNWSAPGPDRVVNYWWKRACTLHEGVASAFKTITSSSCEYPKWFTEGKTRLIPKQGDFTSENQRPITCLNTSYKWFTSCVLGPMDKHLKVYDLMEKQQRGAKAGCSGTTDNLQIDRTVTLDCHRHKRNLSVAWVDVRKAYDSVDHRWLNKIMLVHRFPVWICEVVRKLCAAWNTRIVANTKVGNETSPVISFNRGLPQGDALCPRLFTLCLNPVAWKLCSTEGYRLSRPVGSKVTNLLYIDDLKVFAASQAKLNIVLKMTKEAMEDIGLQWNPKKCNVLNVRRGVPVDIPEGFKSGETLIDSLKEDTTYRFLGAPERLLQEEKLALQCTSKTYLQRLSVIWSSPLSDTNRVQASNQLAMPVLSYLMWSQHWCLTDLRDIDRQARKIVCESGGKHPLGLKATVYLPRALGGRGMRSVEEEYKMTKIKSAIKLYSNEDPTMRLVRAFEENAIHQGHQSLVKEAREFAEELGFTLDLSFPHPKCRDNTDGADVPTDKIKRHLKKAAIEQRKTEVKEKKWQGKLLAARWEEDQLNQRGCFAWLKNWDTAPTHTIAGMLELYEQLTPTKVYYARKTQTNRPNDTLCRLCGKTAESIPHVLASCSALAQNKYLARHNAALKVLFWEMLRELQLSDTVPPWYSPAVPKPIYESPKAQAYWDIPVFAVSEQVKQNRVDARFIDHEKKKVLAVEMSCPWTENREKKQEEKTIKYGPLRWELKQQFPGYDIRQYNIIIDVLGGWSTEVDEAMRELFGARGGEILLRMQRAVISHTLNIARTLKVMS

SEQ ID NO: 2439 - protein, 1173 aa, Acropora acuminata
MSLMKDMWDDLGYGHLALSSQNLRDKAAALERTVGNVSRNIVRNVGRADGTRSERGNEENAEIVAVESSDQNANELRRRESANLHTESTQDPVEEIVNTLTTPEKELFERSSQLLASVNASEGDYSNRAIDTRIKQTPTKSDLKTINKVINGLVAQNKVVPGENPFAYLWLANCVLYSVVVTFLVSKGWKKDPKDKATRRAHENDSWRNKFLEIVGEVRKKLSIATAELSRIKENRKLTKRGKKNRSLLQKECRSLSASSLVSYIEKQKSLLRKLKVSFGRKRRQEEAKVLNRQFKEDPGRVYATITMMAEEDPDNARPKYKVARNEDQTSASKGVFSDIVEAEGFWRRLWEERGTGDENAEWLKEIELAISQRVPLPTVGTWTLETNEAVKVILKKRNWSAPGPDRVVNYWWKRACTLHEGVASAFKTITSSSCEYPKWFTEGKTRLIPKQGDFTSENQRPITCLNTSYKWFTSCVLGPMDKHLKVYDLMEKQQRGAKAGCSGTTDNLQIDRTVTLDCHRHKRNLSVAWVDVRKAYDSVDHRWLNKIMLVHRFPVWICEVVRKLCAAWNTRIVANTKVGNETSPVISFNRGLPQGDALCPRLFTLCLNPVAWKLCSTEGYRLSRPVGSKVTNLLYIDDLKVFAASQAKLNIVLKMTKEAMEDIGLQWNPKKCNVLNVRRGVPVDIPEGFKSGETLIDSLKEDTTYRFLGAPERLLQEEKLALQCTSKTYLQRLSVIWSSPLSDNNRVQASNQLAMPVLSYLMWSQHWCLTDLRDIDRQARKIVCESGGKHPLGLKATVYLPRALGGRGMRSVEEEYKMTKIKSAIKLYSNEDPTMRLVRAFEENAIHQGHQSLVKEAREFAEELGFTLDLSFPHPKCRDNTDGADVPTDKIKRHLKKAAIEQRKTEVKEKKWQGKLLAARWEEDQLNQRGCFAWLKNWDTAPTHTIAGMLELYEQLTPTKVYYARKTQTNRPNDTLCRLCGKTAESIPHVLASCSALAQNKYLARHNAALKVLFWEMLRELQLSDTVPPWYSPAVPKPIYESPKAQAYWDIPVFAVSEQVKQNRVDARFIDHEKKKVLAVEMSCPWTENREKKQEEKTIKYGPLRWELKQQFPGYDIRQYNIIIDVLGGWSTEVDEAMRELFGARGGEILLRMQRAVISHTLNIARTLKVMS

SEQ ID NO: 2440 - protein, 866 aa, Acropora muricata
MMAEEDPDNARPKYKVARNEDQTSASKGVFSDIVEAEGFWRRLWEERGTGDENAEWLKEIELAISQRVPLPTVGTWTLETNEAVKVILKKRNWSAPGPDRVVNYWWKRACTLHEGVASAFKTITSSSCEYPKWFTEGKTRLIPKQGDFTSENQRPITCLNTSYKWFTSCVLGPMDKHLKVYDLMEKQQRGAKAGCSGTTDNLQIDRTVTLDCHRHKRNLSVAWVDVRKAYDSVDHRWLNKIMLVHRFPVWICEVVRKLCAAWNTRIVANTKVGNETSPVISFNRGLPQGDALCPRLFTLCLNPVAWKLCSTEGYRLSRPVGSKVTNLLYIDDLKVFAASQAKLNIVLKMTKEAMEDIGLQWNPKKCNVLNVRRGVPVDIPEGFKSGETLIDSLKEDTTYRFLGAPERLLQEEKLALQCTSKTYLQRLSVIWSSPLSDTNRVQASNQLAMPVLSYLMWSQHWCLTDLRDIDRQARKIVCESGGKHPLGLKATVYLPRALGGRGMRSVEEEYKMTKIKSAIKLYSNEDPTMRLVRAFEENAIHQGHQSLVKEAREFAEELGFTLDLSFPHPKCRDNTDGADVPTDKIKRHLKKAAIEQRKTEVKEKKWQGKLLAARWEEDQLNQRGCFAWLKNWDTAPTHTIAGMLELYEQLTPTKVYYARKTQTNRPNDTLCRLCGKTAESIPHVLASCSALAQNKYLARHNAALKVLFWEMLRELQLSDTVPPWYSPAVPKPIYESPKAQAYWDIPVFAVSEQVKQNRVDARFIDHEKKKVLAVEMSCPWTENREKKQEEKTIKYGPLHWELKQQFPGYDIRQYNIIIDVLGGWSTEVDEAMRELFGARGGEILLRMQRAVILHTLNIARTLKVMS

SEQ ID NO: 2441 - protein, 1209 aa, Acropora awi
MDGRMNDALLQCKSKAVKLAKGDNPPRSENDRKIGYMSLMKNMRDELGYGHLALSSQNLGDKAAALERTVGNVSRNIVRNVGRADGTRSERGNEENAEIVAVESSDQNANELRRRESANLHTESTQDPVEEIVNTLTTPEKELFERSSQLLASVNASEGDYSNRAIDTRIKQTPTKSDLKTINKVINGLVAQNKVVPGENPFAYLWLANCVLYSVVVTFLVSKGWKKDPKDKATRRAHENASWRNKFLEIVGEVRKKLSIATAELSRIKENRKLTKRGKKNHSLLQKDCRSLSASSLVSYIEKQKSLLRKLKVSFGRNRRQEEAKVLNRQFKEDPGRVYATITMMAEEDPDNARPKYKVARNEDQTSASKGVFSDIVEAEGFWRRLWEERGTGDENAEWLKEIELAISQRVPLPTVGTWTLETNEAVKVILKKRNWSAPGPDRVVNYWWKRACTLHEGVASAFKTITSSSCEYPKWFTEGKTRLIPKQGDFTSENQRPITCLNTSYKWFTSCVMGPMDKHLKVYDLMGKQQRGAKAGCSGTTDNLQIDRTVTLDCHRHKRNLSVAWVDVRKAYDSVDHRWLNKIMLVHRFPVWICEVVRKLCAAWNTRIVANTKVGNETFPVISFNRGLPQGDALYPRLFTLCLNPVAWKLCSTEGYRLSRPVRSKVTNLLYIDDLKVFAASQAKLNIVLKMPKEAMEDIGLQWNPKKCNVLNVRRGVPVDIPEGFKSGETLIDSLREDTTYRFLGAPERLLQEEKLALQCSSKTYLQRLSVIWSSPLSDTNRVQASNQLAMPVLSYLMWSQHWCLTDLPDINRQARKIVCESGGKHPLGLKATVYLPRALGGRGMRSVEEEYKMTKIKSAIKLYSNEDPTMRLVRAFEENAIHQGHQSLVKEAREFAEELGFTLDLSFPHPKCRDNTDGADVPTDKIKMHLKKATIEQRKTEVKEKKWQGKLLAARWEEDQLNLRGCFAWLKNWDTAPTHTIAGMLEIYEQLTPTKVYYARKTQTNRPNDTLCRLCGKTAESIPHVLASCSALAQNKYLARHNAALKVLFWEMLRELQLSDTVPPWYSPAVPKPIYESPKAQAYWDIPVFAVSEQVKQNRVDARFIDHEKKKVLAVEMSCPWTENREKKQEEKTIKYGPLRWELKQQFPGYDIRQYNIIIDVLGGWSTEVDEAMRELFGARGGEILLRMQRAVISHTLNIARTLKVMS

SEQ ID NO: 2442 - protein, 1148 aa, Dinoponera quadriceps
MNQIQLQNASDTGGPGPGLPVAELPAADEGTNDDDQAMSTDNENDKLIEIIVPLQDNITHCEVCARKNVQIGFLNLKDLVYHYKDQHNTFDINLRCINCGKIFPGLKNWHGHRPKCKGAVTQVEKAFKCLECKDTFDTQIGLSQHERHVHPKLRNAKRRAEAERPHGLSGRRAYVWSKEETDKLSTLMNRFKNARYPNKELQVFFPDKTLKQISDKRRELQAKQIPKEIPVVDISDEEEVLQDQQENNQIAPESFTGERIIQEWRKTVIEYMYSVEAPPTSKLSDIIIALKKNLKDNANNKNVLFSTIDKLIDQDLVPRMLKVTEVKGKNQIKNDKKKSNRVRNKTDRNNKNHNQRKRFGYARCQELFNKCPKKLAESAISGNFSFMDVRQEPPMSDEVKELYTKLWGQKGPENILVPALRAQLDIRKVIGPITIEEVKNRTIKIKKNSAAGCDGIKKCHISCTGMAELLTVLYNILLVEGHLPNSWKKNRTTLIPKPNKDPTDVKNWRPITIGSMLNRVFSAIIDTKLRSFVKQHVRQKGFASEDGCKINISILKEAIAEMKTNEGGIVTVLDITKAFDTIPHSMINLGLKNKGVPIHIINLIQNMYHHSKTSIKAAGNQYVEVELKRGVKQGDPLSPLLFNLAIEPMIEQIDRETRGVLVNGKPLSILAFADDVVLLAHNTAEAQRQLDKANLYLQNIGMSLSVPKCATFQIVQKNKTWYMKDPKLNIQGSEIENIEPEMAVKYLGTKLFPWKLLEKGSEVREIVQTIRNVKRFYLKPQQKIELIQTHILPHFIYNLIINAPPRGTLQLLDTEIRQHVKEILHLPLSTANGFFYTAKNDGGLGLLKFQNVIQLAVVRNNIRMRESEDQVSRNIALKNGNSEKVDKYCRDLRIPKPDNLADINKAKSVLRDREISSWEDLRSQGHGVRYYRGDKIGNRWLTDTGLLKASRYIDAIKLRTNTFGTRVVLSRTRPNTDTTCRRCRLATETLGHILGLCIHTKKARIKRHNDIRDFIANKLSKAKTVFIEPTINEIGELKKPDLVVKSGNQIQIVDVTIRYEKGDYLKEAAKEKLNKYKDTAELIRIKTGCSESVVIPIVIGSRGVVPTDTRTALRTLGLSSNDMLTISLMAFRSSIEIANAFIDYDMAI

SEQ ID NO: 2443 - protein, 1227 aa, Girardia tigrina
MVFKLLQILQHQTAVGGVSLIEKYGGPDERLFQKNQIDCGPFVCAYAANLCYGFPLTEVDIFATRLHSQSLVLLSDEPAKFIGGAGPHHNYDAALAAAILEFNDSHIASFAFSKIDCKRAYTLHPTLGKAMCDRNIQHIVHNLSLPHIANKTLLFIPVFLFSSRWVLFYVNFVDKTVSVLDPCLEHPDPRLAPLLENVGEIISKLTLLQNPLVVLSSVSRAHQSTNRPQDSGPLVCGYMEKLLSDLSPNGIKIAQIRKEATRIQQEFAFRPEPPACAESSIPRNATLPIRVLQAQNILREMMDSDVDDCLRIFTQHVYNIRQKSPKKLYKGIRTSPKSPRSTAAIYKKSPAKAFRNLTQHNVADCTPKIEHISEYYGRKSVPNPVSANLDQLLFKSAEAFDFRPISTQEIKEILKSKDDTAPGRSNITYKDLSYCDPQSACVSYLLSIICEQKRIPEAWRDYETLLIAKPMKQGHYHLVDSWRPIALLDCIYKIMTTALCNQLQSWILENELLHPFQKSIGPFNGCTEHNFVVRAIIDKYTKQMKSQVHFLFLDIADAFGTISVETILYLLDRMGASAGTTNMIREIYRNCSTTLTCGNERTPQIPIRVGVRQGCPLSMLLFNIGINPILMAIEQCLAAGVFIANRQVKCLAYADDIVLMAQTIDWLQRAADIATEVGDILGLKFRPSKCAVMSCPTPKKIPVKLYGETVSTINPTDGFVYLGTQASNIQYATPHTLFHDLIEDLEKIVKSDLLPWQKTHAYMTFLHSRLVYAFRNYNIPVLDLHDTSTSLDMRVRTLLKNILGLPPNASNPYLYAPKISGGVGMRSTFDEYLIQSIAGAYYLLGCSDRTTTNIAQWSLRRAASDSPNESNMSSLSEALHWINSGNVQSGSTNWWSKVRYSIARLRALHQIDVQFRENEHGLALSITQNYQGENFTSVLLNKQHRKDVCHILHNFVDQSWGKQWKDQGSAGRFATALEDSRLSNTMLYNGDLSVGSWYFLHRVNTYTLPVNGRPGFSSRICRRCGASDETIPHVFCLCFHTESFWNYRHNAVLHFVASQIRQNLDCKVYVDTECQFTTSSLRPDLQIHFPQQNRLILADIKCPYEKDDNIERVHEANVFHYTDLAKDIIAANPGIKVTITTILVGVPGTWPSQSTKALQLIGLKKHTIATIARHCIRSNVDWSLAQWKFHKGGVLPELNNLYRIPLDQNLVVEENCVDSTILDCIPD

SEQ ID NO: 2444 - protein, 1006 aa, Nothobranchius furzeri
MSQAWCLTSFIINININNNNNNNNNNNNNNNNKIIKNLISLANRAIQNIKQDYSKPMDLTSINEICYAAATVITDLSCAKKIKKQGKRKQPKWKTDIEKDILKNRKNLSLLTEMEKGNITNKRKKRQMKKRYDIQDTTDIVEAKEKLKQQIQAKAQRIRRYEKRSKHFRHNHVFKVDPKKFYRELDKKQIEIKELPSLEKVEEFWSNVWEKQKNHNETAQWIKEEAGRLKSRPVQEWTNISKTEVILALKKANNWKSPGEDKVHNFWLKHLEVIHEDLAREYTEIIKTPIKSPTWLTQGLTYLLPKTNDTKNPKNYRPITCLPTMYKILTSIITERTYTFLDNNNMLPPEQKGCKRGSYGSKDQLLINKMILEDSKGKKKNLSTAWIDYRKAFDSVPHSWIIKVMELHRISPTLITFMKTSMESWRTTMMLTYDERSIKTRPIKVRCGIFQGDSLSPLLFCLCLAPLSTMLNNSEHGYEVQGKKINHLFYMDDLKTYAKNDNQQEGLLQIVKLFSDDICMQFGLDKCAKATFKKGKLTSTSNIQLDQETVIMELNQEDTYKYLGVNEGDGIQHATMKEKVKKEYYRRVRLVIKSELNAANKIKAINILAVPTVTYSFNIINWQLKEVKKLDTKTRKLLTSERMHHPKADVERMYLPRQIGGRGLTQLEMAYKTTTMALKTYLETTDDALLILVCQHEARKKLYSVTKEAIRYAQELNIPEVARIEKETVTSFAKRTRREAKKWAQKRMRETWEEKPMHGQYPLRVKKADVEQDHTHQWLRSAGLKAETEGLLIAAQDQSLSTRLYHHKIMKDGTDPMCRMCSQYEETIDHIVSGCPTLARTEYIHRHDRAASYIHWKICKHFHLPAADKWYEHQPPTVTENNNIAVLWDMPINTDREIMANRPDIVIKNKEEKTCLMIDMTIPSEKNVTTKELEKLSKYKDLEIEVTRMWGMKTTTIPVVVGALGLIKKGLEKRTKQIPGNPTVQEIQKIVLLGSAHIIRRTLSIN

SEQ ID NO: 2445 - protein, 1081 aa, Nothobranchius furzeri
MDPNKLSNVRRDIIKQKRLTDAEVEAIRRKVRQTVEENENTVEDGRHEEQEDKIRNEEDQPQQQEVDGVTDEGTNRTYEEHTDFEKVRDSIPQKWMEVKLQGLENRDKLPKIYSNKNIKNLISLANRAIQDIKQDYSKPMDLTSINEICYAAATGITDLNCTKKIKKQGKRKQPKWKTDIENDILKKRKDLSLLTEIEKGNITKKRKQRQMKNRYDIQDTTDIVGAKEKLKQQIEAKAQRIRRYEKRSKHFRHNHVFKVDPKKFYRELCKKQIEIKELPSLEKVEGFWGNVWEKLKNHNEAAQWIKEEAERLKSRPVQEWTSISKTEVILALKKANNWKSPGEGKVHNFWLKHLEVIHEDLAREYTEIIKTPIKSPTWLTQGLTYLLPKTNDTKNPKNYRPITCLLTMYKILTSIITERTYTFLDNNMLPPEQKGCKRGSYGSKDQLLINKMILEESKGKKKNLSTAWIDYRKAFDSIPHSWIIKIMELHRISPTLITFMRTTMMLTYEEESIKTRPIKVRCGIFQGDSLSPLLICLCLAPLSTMLNKSEHGYEVQGKKINHLFYMDDLKTYAKNDNQQEGLLQIVKLFSDDICMQFGLDKCAKATFKKGKLTSTSNIQLDQETVIMELNQEDTYKYLGVNEGDGIQHATMKVKVKKEYYRRVRLVIKSELNAANTIKAINILAVPTVTYSFNTINWQLKEVKKLDNKTRKLLTSERMHHPKADVERMYLPRQIGGRGLTQLEMAYKTTTMALKTYLETTDDAQLILVCQHEARKKLYSVTKEAIRYAQELNIPDVARKEKETVTSFAKRTKREAKKWSQKRTRETWEEKPMHGQYPLRVKKADTEQDHTHQWLRSAGLRAETEGLLIAAQDQSLSMRSYHHKIIKDGTDPMCRMCSQYEETIDHILSGCPTLARTEYIHRHDRAASYIHWKICKHFHLPAADKWYEHQPPTVTENNNITVLWDMPINTDREIMANRPDIIIKNKEEKTCLMIDMTIPSEKNVTTKELKKLSKYKDLEIEVTRMWGMKITTIPVVEGALGLIKKGLEKRTKQIPGNPTVQEIQKIVLLGSAHIIRRTLSIN

SEQ ID NO: 2446 - protein, 1207 aa, Nothobranchius furzeri
MMSQTIRKSYRIARRAGQQGARQSAGDQADGEKCATGTNATHPQASVDQLSEVFLQPAAHDVKLTTNENESKRKKWTREEYKQVMEAYITAQLKPSGESNTKQTFTLWRNANPTSRPNMDPNKLSNVRRDIIKQKRLTDAEVEAIRRKVRHTVEGNENTVEDGRPEEQEDKIRNEEDQPQQQEVDGMTELGTNRTYEEHTDVEKVRDSILQKWMEVKHQGLENRDKLPKIYSNKNIKNLISLANRAIQNIKQDYSKPMDLTSINEICYAAATVITDLSCAKKIKKQGKRKQPKWKTDIEKDILKNRKNLSLLTEMEKGNITNKRKKRQMKKRYDIQDTTDIVEAKEKLKQQIQAKAQRIRRYEKRSKHFRHNHVFKVDPKKFYRELDKKQIEIKELPSLEKVEEFWSNVWEKQKNHNETAQWIKEEAGRLKSRPVQEWTNISKTEVILALKKANNWKSPGEDKVHNFWLKHLEVIHEDLAREYTEIIKTPIKSPTWLTQGLTYLLPKTNDTKNPKNYRPITCLPTMYKILTSIITERTYTFLDNNNMLPPEQKGCKRGSYGSKDQLLINKMILEDSKGKKKNLSTAWIDYRKAFDSVPHSWIIKVMELHRISPTLITFMKTSMESWRTTMMLTYDERSIKTRPIKVRCGIFQGDSLSPLLFCLCLAPLSTMLNNSEHGYEVQGKKINHLFYMDDLKTYAKNDNQQEGLLQIVKLFSDDICMQFGLDKCAKVTFKKGKLTSTSNIQLDQETVIMELNQEDTYKYLGVNEGDGIQHATMKEKVKKEYYRRVRLVIKSELNAANKIKAINILAVPTVTYSFNIINWQLKEVKKLDTKTRKLLTSERMHHPKADVERMYLPRQIGGRGLTQLEMAYKTTTMALKTYLETTDDALLILVCQHEARKKLYSVTKEAIRYAQELNIPEVARIEKETVTSFAKRTRREAKKWAQKRMRETWEEKPMHGQYPLRVKKADVEQDHTHQWLRSAGLKAETEGLLIAAQDQSLSTRSYHHKIIKDGTDPMCRMCSQYEETIDHIVSGCPTLARTEYIHRHDRAASYIHWKICKHFHLPAADKWYEHQPPTVTENNNIAVLWDMPINTDREIMANRPDIVIKNKEEKTCLMIDMTIPSEKNVTTKELEKLSKYKDLEIEVTRMWGMKTTTIPVVVGALGLIKKGLEKRTKQIPGNPTVQEIQKIVLLGSAHIIRRTLSIN

SEQ ID NO: 2447 - protein, 1131 aa, Amphiprion ocellaris
MMSDNTKKPYRIARHVGQQGARPPARNQAGIEKCTTGTNSTHPQAPEDQLPEENLQQASQDVQPITNKDKRSKWTREEYKQVMEAYITAQLKPSNESNTKQTYEIWRSANPTTRLNMDPNKLANVRRDIIRKKRLADVELEAIKRKVRETLKEDEGSNLDKPHQENDGSAKEEANESQQTEMITIRKDKEPENNASLEMKDDILRKWNELKHLDMKDRVLLPKINNDRKAKSLIQLANRALEDIKESSAEQVDLTSINQLCYAAATVITEMKGTKQKKEKPRKRKQPKWKEDIAKEIQKKRRDLSMLIEMENGTLIKQRKNREIKKRYNIKNKEDIAEAKEKVKQQIQAKGQRIRRYEKRSKQFRQNKLFTTDAKKFYRELGKSQVQVKEPPTLDKMEEFWSKIWEDEKHHNETAEWIKKEEERWKDQQQQEWGEIKESEVALALKKASNWKSPGVDRVPNFWIKHLGVMHEDTAREYTEIIKTPEKNPQWLTQGLTYLIPKNNDTKNPKNYRPITCLPTTYKILTSIITERIYTFLEENNMLPPEQKGCKRGSYGCKDQLLINKMVLEDSKKKKKNLSTAWVDYRKAFDSVPHSWILKAMEIYRISPIVIRFMQTSMGFWQTTMKLTYEEGSIDTRPINVRSGIFQGDSLSPLLFCLCLAPLSTMLNSTGHGYEIQGKKITYLFYMDDLKTFPKNDSQQEALLQTVKTFSDDIRMQFGLDKCAKATFKAGKLTATSDLQLDKNTIIKELDQENAYKYLGVNEGDEIQHAKMKEKIRKDYYRRVRLVIKSELNAANKIKAINTLAVPVVTDSFNIINWKLTEVKRLDTKTRKLLTMERMHHPKADVERLYLQRKIGGRGLTQLEMSYKVTTIGLNSYLEKIEDALLKLVYQHERSKKLYSITKEARKFAQELALPEVIKKDCESVTKFAKRTKQEGKNQALKKMMEKWEEKPIHGQYPNRVKKPDVEQDQTHQWLRSSGLKAETEGMLISAQDQSLATRSYHHRIIKDGTDPKCRICNKYEETIDHIVSGCPLLAKKEYIQRHDKAASYIHWKICKHYHLLGLSRLTGFTITTIINRYSSHFSQPRLSVEKPRERCDARSVSCAEWRVEREWLLVLCARSCLIGITEFTHR

SEQ ID NO: 2448 - protein, 1201 aa, Alatina alata
MQNKSVRKSYRIARRAGQQGARHSAGNQAGDEKCTTGTNSTHPQMPAEQLPELILQPAAQDVQSVPTTSKRNKWTREEYKQVMEAYITAQLKPSSESNTKQTYLIWRNANPTSRLNIDANKLANVRRDIVKNKRLSDAEIENIRKKIRETLKSTEDNQFEDQPNETEPMNENKMDVIRDDEADNNSNEEQRDNFAELRECVMRKWEELKYQDMNDREKLPKVINDKKTKHLIKQANAVLEDIKKSQREEMDLTSLNHLCYAVATVVTEKTGTEHQKKPRKRKQPKWKADIEKDIQRKRGDLALLTEIENDSLFNHRKLYLVKKRYAIKKKDDIPEAKEKLKQQIQAKAQRIRRYEKRSKHFRQNKLFKIDTKKFYRELGKNQIEVKEPPTLFEIEEFWSKIWEDEKTHNVTAEWIKKEEERTSSQAQQEWSDIQTSEVTLALKKASNWKSPGVDKITNFWLKHLGALHEELAKEYTEIVKTPMKSPHWLTQGLTYLLPKTDETSNPKNYRPITCLPTMYKILTSIINERTYTFLELNKLLPPEQKGCKRGSYGCKDQLLINKMILEDCKNKRKNLSSAWIDYRKAFDSVPHTWILKAMQIYRISPTVINFMKTSMDLWKTTMILTHTNGSMTTRPIQIRSGIFQGDSLSPLLFCLCLAPLSMMLNNTGHGYEIQGQKVSHLFYMDDLKTFAKNDNHQESLLQTVKTFSDDIKMQFGLDKCAKATFKKGKLTESSDIHLDIDTIIKKLDHEGAYKYLGVHEGDGIQHSKMKEKIRKEYYRRIRLVTKSELNAANKIEAINTLAVPVVTYSFNIIHWQMKEIKKLDTRTRKLLTMERMHHPKADVERLYLPRKIGGRGLSQVEMAYKTTTIGLNAYLETTQDHLMKLVFQHEKSKKLYSVSREAQKFKQELNVPTVTKKDQEQVTTFAKRTKQAAKECGLQQMTATWEEKPMHGQYPTRIKKPDVEQEQTHQWLQGSGLKAETEGMMIAAQDQSLATRSYRHRIIKDGTDPKCRLCNQFEETIDHIVSGCPSLAITEYMYIHRHNKAASYLHWKICKHHELPAAEKWYDHQPQTVTENDDITVLWDMPVNTDREILANRPDIIVKNRKEKTCIMIDMTVPSERNVTIKEVEKLSKYKDLEIEVSRMWGMKTTTVPVVVGALGLIKKGLDRRIQQIPGSPTTRELQKIVLLGSAHIIRKTLSIS

SEQ ID NO: 2449 - protein, 1038 aa, Eufriesea mexicana
MNQSSGGSTDSPTPISVEASGSSRPTTERDNTIVSNFECGFPGCNRTFATARGRGVHERSAHPDWCDARNARNPHAKERWTEEERRMLARREAELTLKGVKFLNQELVKVVQRSLESIKGQRRRADHKHLVKQYLKEIEEMEEMSSSASSNSDVQEHYSAEDETTQVVDPLAVCLSGWARIDNTRFGGQRFYELCQMTSRQPKEEIKVALALFLKDFFTSDRQRCSKTSAPQGVGNITSKRAHRRAKYTKVQHLWRKGPGQCVQRILADQVEQEGEVPKEIMIPFWRSVFQGGSLVSPKLTMRDNPIEDLWAPITSGEIKGAFPPLNTAVGPDGLKVGTLKSVPLPLLAGIFNMFMFCGELPDYLNESRTVLIPKKKGASEPGEFRPITISSVMVRTFHKVLANRLNRRISLDDRQRAFRPTDGCSDNVMLLDLALKYHQSRFKPLFLSLLDMAKAFDSVSHKALNNILSARGIPSTMRNYILRTYERGVTKLQHGSWESESIHPDCGVKQGDPLSPFLFNLLVDCLLRSLPSELGVNMDGLKLNILAFADDLVLMASTSAGLQALMDHVTAFLGGCGLRANSSKCLSLAIKNVPKQKKSYVDPSCRFKIEGALLPSLKRTDQFTYLGVSFTADGRSKVDIRSEIDNKILMISRAPLKPQQKIWALRNVIIPSSMYKLSMGGIPLGYLRSVDKLIRAWLRKWLYLPHDCPNAYVHASTVDGGLGVPSVRWLAPLQRLNKIKALESSQYIQGPATETYLSQERRVAERRLKDETVLLQTNADINGFWAKHLHARFDGMPLKVSKKVPEQHRWLSKCTRFVSGRDYINCCKLRINALPTRSRTARGRAKDRSCRGGCNASETLDHVLQKCHRTNKKRIERHDAIVKYVANKLNKAGRRVEVEPRITTSSGLLKPDLVITSDEKALVIDAQVITDQFDLDRANREKVRKYSGVEFTQRIKERSGMSEVTALAVTLNWRGLWSGKSARKLLQLGILNKEDITILSSRVLIGGLAAFHQFGAMTSVQERRGARPSARERTGVG

SEQ ID NO: 2450 - protein, 920 aa, Dolomedes plantarius
MRTAVPPVPSPNSAPSSQAPRDTGSTPPTGSSQGSTPPSSQDTFDLGEELGVGDDILPSDGTIADLNVPEDPDAPSPSAEFTTRFGNFLTVPCLETAWADFECLLDEYIHFAQGHVRLPEPQEGPPTRRTANPRNHQYIQKLYRRNRRNAVRQILGMNGKSCQLPVNEIASHFCQPNLVNPEPGIFLHPRRAPEPPEEHDFTPQEVWAKLSRSENSAPGPDRLTYQHWKSVDPEAKTLATIFNVCLKAGTIPEGWKASKTILIPKVDNPTCPADWRPIALGCTITKTFTGCLANRINTWVEEHSLLNPSQKGFLRHDGAFENNFVLNQHIQRARATQSELCLASLDIWNAFGSVPHQSIFHAIKEAGIGDTFLPVIMDLYTDTTTSFLTAGELSDPVSVECGVRQGCPLSGLLFNFTIDPILRALQPQLDSFKVLAFADDLLVLAESADELQAQLNLTCQVAGQIGLALNPRKCVSLHLCPMPMGSRPTTFHINDEPIPHLEDGDQGRFLGKPFGFSIVPDSNQLEDFKETATDLLSSSLAPWQRIDALKSFFLPSLSYAQRTAQFKKKHWTEVDDTLRPLIKKTLSLPEYAANAYLYGNQKDGLFGISLCAADADIAHIDGAFKLLTSPDPRTKDLAWDDLEALVEYRLGVPASNEDLSSYLTGAQMQSSNPISSIWTNARSASRRMGLSWVLHSDRSIALYINETPILDRRKVFKSLREAVKNNFSAELKGFKHQGKTFPAFSAAKASTHFHRSGAFCRFADWRFIHRARLSAVPLNAYPRGRTNRDPRCRRCGNHPETLPHVLNHCISYMPLIRKRHDAVVTRVKKAAEGSWRVWRENQPLGDQSLKPDLVLTQGNKALILDVAIPFENGTTAFQQKRKEKEQKYAALAESLKGSFRHVKVEAIIVGALGSWVGWLV

SEQ ID NO: 2451 - protein, 1031 aa, Eristalis pertinax
MQNYNLRNRQASSPAMPASAEEDNSLPHICQGCGNRYRTEVGMKQHIRRYCRGPPNTQHTCATCNITFRTYSGLRQHMRHRHSEAYNAELQTESVAAKRRWTEDEQNEMAKAEAEFEGTEPTAIINYLASISQRSRDAIKKRRQRRSYAEKVRNYRENRHSSGNSSSEYESANEHIEEHEANEEALVAYLTTLQLNEEDRRLRNSLITNMSSSSVELNEWTSTLLRRYGRVETNYRPTRNNRLIAQLREATGRRKRAIEYRLTQQQYQQDLSRLAHRIIEGKGWSEDSQSLPTAEEVRRHFQEHENVNSREDDSPITDKFPEGVTLSTPVTIEEITTTLKTMKSNSQGVDGITLRRLKNIPKNKLSLLFNAMILLEHTPPELKKSRTIFIPKNANPNSLNDWRPITISSILIRLLHKILAYRMEVIQLHKNQRGFSRIDGCFANAFTLFSLIKYHRRKGIPICIVSLDIRKAFDTVSHASIIRSLKRCNIDDKTINYIKDNLTNAETKIKTANGDVTAHVRKGVKQGDPMSPALFNILVDEMLCGLNKFEGVTIGTNQKLRCMAYADDILIFAKTRENAEIMLDYVNEFLSDRGMKINAQKSNMLNLKVVPSKKKVYADEQPAKIGDDLIGALRIGEQFKYLGEYFTPSGSTTCSSESLFNELQRIKRAPLKPQQKLNITLTYLIPKYVHYFQRPSVTRKCLKEADRKIRTCIKNILHIPQHSKNAILYAECKEGGLGVFELLSRIPVIMRERIENLKSNDEAFANIATLNPGTITKIERMIKQEVDTKSKQKKHQAQLLDSSLSGNGFSQIKNHPAAHSIIRHPPRYWTSEDYIKAIHLRYNLLPTVGIPSNPPRARRCRANCAKTESLSHVLQGCPLTHWERIRRHNFVQKRLADMARRKGWQTLAEPHIRDREGILRKPDLILIKQNQLVISDVGIHWEGPESLNLQYHHKLATYGSQNIIEAVKLKFPNRNITIAPLIIGARGIWASLNRTLGQILEMSNAEAMDLITTTMRGSWIIHQYFMRTIWQ

SEQ ID NO: 2452 - protein, 930 aa, Eristalis pertinax
MQRRFRNYRENRHSSGNSSSEYESANEHIEEHEANEEALVAYLTTLQLNEEDRRLRNSLITNMSSSSVELNEWTSTLLRRYGRVETNYRPTRNNRLIAQLREATGRRKRAIEYRLTQQQYQQDLSRLAHRIIEGKGWSEDSQSLPTAEEVRRHFQEHENVNSREDDSPITDKFPEGVTLSTPVTIEEITTTLKTMKSNSQGVDGITLRRLKNIPKNKLSLLFNAMILLEHTPPELKKSRTIFIPKNANPNSLNDWRPITISSILIRLLHKILAYRMEVIQLHKNQRGFSRIDGCFANAFTLFSLIKYHRRKGIPICIVSLDIRKAFDTVSHASIIRSLKRCNIDDKTINYIKDNLTNAETKIKTANGDVTAHVRKGVKQGDPMSPALFNILVDEMLCGLNKFEGVTIGTNQKLRCMAYADDILIFAKTRENAEIMLDYVNEFLSDRGMKINAQKSNMLNLKVVPSKKKVYADEQPAKIGDDLIGALRIGEQFKYLGEYFTPSGSTTCSSESLFNELQRIKRAPLKPQQKLNITLTYLIPKYVHYFQRPSVTRKCLKEADRKIRTCIKNILHIPQHSKNAILYAECKEGGLGVFELLSRIPVIMRERIENLKSNDEAFANIATLNPGTITKIERMIKQEVDTKSKQKKHQAQLLDSSLSGNGFSQIKNHPAAHSIIRYPPRYWTSEDYIKAIHLRYNLLPTVGIPSNPPRARRCRANCAKTESLSHVLQGCPLTHWERIRRHNFVQKRLADMARRKGWQTLAEPHIRDREGILRKPDLILIKQNQLVISDVGIHWEGPESLNLQYHHKLATYGSQNFIEAVKLKFPNRNITIAPLIIGARGIWASLNRTLGQILEMSNAEAMDLITTTMRGSWIIHQYFMRTIWQKREKIKKKKKMVQLPKTSAEKCKAKINIMLVLFLIYKSYNFYNRIN

SEQ ID NO: 2453 - protein, 1031 aa, Eristalis pertinax
MQNYNLRNRQASSPAMPASAEEDNSLPHICQGCGNRYRTEVGMKQHIRRYCRGPPNTQHTCATCNITFRTYSGLRQHMRHRHSETYNAELQTESVVAKRRWTEDEQNEMAKAEAEFEGREPTAIINYLASISQRSRDAIKKRRQRRSYAEKVRNYRENRHSSGNSSSEYESANEQTEEHEANEEALVAYLTTLQLNEEDRRLRNSLITNMSSSSVELNEWTSTLLRRYGRVETNHRPTRNNRLIAQLREATGRIKRAIEYRLTQQQYQKDLSRLAHRIIEGKGWSEDSQSLPTAEEIRRYFQEHENVNSREDDSQITDKFPEGVTLSTPVTIEEITTTIKTMKSNSQGVDGITLRRLKNIPKNKLSLLFNAMILLEHTPPELKKSRTIFIPKNAKTNSLNDWRPITISSILIRLLHKILAYRMEVIQLHKNQRGFSRIDGCFANAFTLFSLIKYHRRKGIPICIVSLDIRKAFDTVSHASIIRSLKRCNIDDKTINYIKDNLTNAETKIKTANGDVTAHVRKGVKQGDPMSPALFNILVDEMLCGLNKFEGVTIGTNQKLRCMAYADDILIFAKTRENAEIMLDYVNEFLSDRGMKINAQKSIMLNLKVVPSKKKVYADEQPAKIGDDLIRALRIGEQFKYLGEYFTPSGSTTCSSESLFNELQRIKRAPLKPQQKLNITLTYLIPKYVHYFQRPSVTRKCLKEADRKIRTCIKNILHIPQHSKNAILYAECKEGGLGVFELLSRIPVIMRERIENLKSNDEAFANIATLNPGTITKIERMIRQEVDTKSKQKKHQAQLLDSSISGNGFSQIKNHPAAHNIIRHPPIYWTSEDYIKAIHLRYNLLPTVGIPSNPPRARRCRANCAKTESLSHVLQGCPLTHWERIRRHNFVQIRLADMARRKGWQTLAEPHIRDREGILRKPDLILIKQNQLVISDVGIHWEGPESLNLQYHHKLATYGSQNFIEAVKLKFPNRNITIAPLIIGARGIWASLNRTLGQILEMSNAEAMDLITTTMRGSWIIHQHFMRTIWQ

SEQ ID NO: 2454 - protein, 1031 aa, Eristalis pertinax
MQNYNLRNRQASSPAMPASAEEDNSLPHICQGCGNRYRTEVGMKQHIRRYCRGPPNTQHTCATCNITFRTYSGLRQHMRHRHSEAYNAELQTESVAAKRRWTEDEQNEMAKAEAEFEGTEPTAIINYLASISQRSRDAIKKRRQRRSYAEKVRNYRENRHSSGNSSSEYESANEHIEEHEANEEALVAYLTTLQLNEEDRRLRNSLITNMSSSSVELNEWTSTLLRRYGRVETNYRPTRNNRLIAQLREATGRRKRAIEYRLTQQQYQQDLSRLAHRIIEGKGWSEDSQSLPTAEEVRRHFQEHENVNSREDDSPITDKFPEGVTLSTPVTIEEITTTLKTMKSNSQGVDGITLRRLKNIPKNKLSLLFNAMILLEHTPPELKKSRTIFIPKNANPNSLNDWRPITISSILIRLLHKILAYRMEVIQLHKNQRGFSRIDGCFANAFTLFSLIKYHRRKGIPICIVSLDIRKAFDTVSHASIIRSLKRCNIDDKTINYIKDNLTNAETKIKTANGDVTAHVRKGVKQGDPMSPALFNILMDEMLCGLNKFEGVTIGTNQKLRCMAYADDILIFAKTRENAEIMLDYVNEFLSDRGIKINAQKSNMLNLKVVPSKKKVYADEQPAKIGDDLIGALRIGEQFKYLGEYFTPSGSTTCSSESLFNELQRIKRAPLKPQQKLNITLTYLIPKYVHYFQRPSVTRKCLKEADRKIRTCIKNILHIPQHSKNAILYAECKEGGLGVFELLSRIPVIMRERIENLKSNDEAFANIATLNPGIITKIERMIKQEVDTKSKQKKHQAQLLDSSRSGNGFSQIKNHPAAHSIIRHPPRYWTSEDYIKAIHLRYNLLPTVGIPSNPPRARRCRANCAKTESLSHVLQGCPLTHWERIRRHNFVQKRLADMARRKGWQTLAEPHIRDREGILRKPDLILIKQNQLVISDVGIHWEGPESLNLQYHHKLATYGSQNFIEAVKLKFPNRNITIAPLIIGARGIWASLNRTLGQILEMSNAEAMDLITTTMRGSWIIHQYFMRTIWQ

SEQ ID NO: 2455 - protein, 1031 aa, Eristalis pertinax
MQNYNLRNRQASSPAMPASAEEDNSLPHICQGCGNRYRTEVGMKQHIRRYCRGPPNTQHTCATCNITFRTYSGLRQHMRHRHSEAYNAELQTESVAAKRRWTEDEQNEMAKAEAEFEGTQPTAIINYLASISQRSRDAIKKRRQRRSYAEKVRNYRENRHSSGNSSSEYESANEHIEEHEANEEALVAYLTTLQLNEEDRRLRNSLITNMSSSSVELNEWTSTLLRRYGRVETNYRPTRNNRLIAQLREATGRRKRAIEYRLTQQQYQQDLSRLAHRIIEGKGWSEDSQSLPTAEEVRRHFQEHENVNSREDDSPITDKFPEGVTLSTPVTIEEITTTLKTMKSNSQGVDGITLRRLKNIPKNKLSLLFNAMILLEHTPPELKKSRTIFIPKNANPNSLNDWRPITISSILIRLLHKILAYRMEVIQLHKNQRGFSRIDGCFANAFTLFSLIKYHRRKGIPICIVSLDIRKAFDTVSHASIIRSLKRCNIDDKTINYIKDNLTNAETKIKTANGDVTAHVRKGVKQGDPMSPALFNILMDEMLCGLNKFEGVTIGTNQKLRCMAYADDILIFAKTRENAEIMLDYVNEFLSDRGMKINAQKSNMLNLKVVPSKKKVYADEQPAKIGDDLIGALRIGEQFKYLGEYFTPSGSTTCSSESLFNELQRIKRAPLKPQQKLNITLTYLIPKYVHYFQRPSVTRKCLKEADRKIRTCIKNILHIPQHSKNAILYAECKEGGLGVFELLSRIPVIMRERIENLKSNDEAFANIATLNPGIITKIERMIKQEVDTKSKQKKHQAQLLDSSRSGNGFSQIKNHPAAHSIIRHPPRYWTSEDYIKAIHLRYNLLPTVGIPSNPPRARRCRANCAKTESLSHVLQGCPLTHWERIRRHNFVQKRLADMARRKGWQTLAEPHIRDREGILRKPDLILIKQNQLIISDVGIHWEGPESLNLQYHHKLATYGSQNFIEAVKLKFPNRNITIAPLIIGARGIWASLNRTLGQILEMSNAEAMDLITTTMRGSWIIHQYFMRTIWQ

SEQ ID NO: 2456 - protein, 1413 aa, Idaea aversata
MELRSRKISKGPLPGGDRRGTPGADAGRSSMQTIGGRELRRRAPTGSPEQCDSRPSPSSPSSTKSLFPSISSSPPSYLKPKPSSTSSSSHPHTKSLTEDVAQSSTLTVDNTAPVQVKRTRQRWTKEMNTFILRTYYILTSLEKDTVSYLADLHNKFCERFPDVDVSRQRIGDQRRAIERSKLLSPKEISAIRSEAETYLSSLVTDRRNLTVPNISVSQSTQKSAPTISQPQAGQRMRWSTELNEEIMRGYYRITAIDTNKTAYRKLLHQHFISKFPHLSHVTEQRIADQRRIIINNKLIDTNRLEQIKSEISSNDPIITETLTTQNLVSEEIETLLINIDNIDNPVNTILTENSRQEQLTQNTLNQDNTEIDCTFNDALNYFKNTEPMTRPFIPKQKTSKKLARIINDINKYTLPKHINNDTTFETQQTVLYTAAWTAAKLNGTRLTIPPPLPNTERRNTIHKPNWQKRLESRISKLRKYIGKVTHYINGSRSRTLTNQVNKILEQYRQHTVHEEPNTQLSQFLDTLKQKLSVYNSRLKRYSACTIRKTQNSQFINSERKFYQNLRHQTTNETQTNIDTPLPNPTELKQFWSDIWENPVTHNEEALWIQEEQITQETTEPMEFQNIPVETFQTVLRNLHNWKAPGPDNIHNYWYKKFTYIQPYLYHHINNFIQNPNQMPEYITAGITYMLPKDSNDTNNPAKYRPITCLQTVYKIITSCLSHSIYSHLQSNSILKEQQKGSRKLSQGCKEQLTIDSIVLKQVQQKKKDLYTTYIDYKKAFDSVPHSWLIQILEIYKIHPQIIAFLKQAISAWTTKLKLTLNNSTVETDSIKIRRGIFQGDTFSPLWFCLALNPLSNILNSTDSGYLLQTNSNETQNSTLSDSHNFKLNHLIYMDDIKLYSSTEGELENLLELTENFSRDIKMEFGIDKCKINAIKAGQNYTMNYQLQSGDTIEPLQENETYKYLGYNQTKHILDKETKAKLKKQFQHRLNSIMKTQLTSKNLTKAINTFAIPILTYSFGIIKWNKHELKQLQRNINTTMTRFRKHHPRACVQRQTLPRSEGGRGIIDIHNLHSKQLTNLRNYFHKKSDTSTLHAAIAQNDKKLTPLNLNNHNTQHLENQITQETKIIEWTRKALHGRHRHDLSQTNVDKVASNAWLTRGELFPETEGFMIAVQDQVIETRNYQKHIIKVHNLPTDLCRRCNSTSETIQHITGACRAIVQTDYKHRHDQVANIIHQQLALKHNLLPHNTTKPYYKYIPETILENSTHKLYYDRAILTDRTIHYNRPDITLIDKTNKTALLIDIAVPNTHNIQSTITEKLTKYLELKDEITRMWNLRNVTIVPIVLSTTGVIPKQLNQSLNTINLPSFTIINLQKAVILNTCRIVRKFLQVDVGRESHPNQLTTAQQSFSLGLGP

SEQ ID NO: 2457 - protein, 1413 aa, Idaea aversata
MELRSRKISKGPLPGGDRRGTPGADAGRSSMQTIGGRELRRRAPTGSPEQCDSRPSPSSPSSTKSLFPSISSSPPSYLKPKPSSTSSSSHPHTKSLTEDVAQSSTLTVDNTAPVQVKRTRQRWTKEMNTFILRTYYILTSLEKDTVSYLADLHNKFCERFPDVDVSRQRIGDQRRAIERSKLLSPKEISAIRSEAETYLSSLVTDRRNLTVPNISVSQPTQKPTPTISQPQAGQRMKWSTELNEEIMRGYYRITAIDTNKTAYRKLLHQHFISKFPHLSHVTEQRIADQRRIIINNKLIDTNRLEQIKSEISSNDPIITETLTTQNLVSEEIETLLINIDNIDNPVNTILTENSRQEQLTQNTLNQDNTEIDCTFNDALNYFKNTEPMTRPFIPKQKTSKKLARIINDINKYILPKHINNDTTFETQQTVLYTAAWTAAKLNGTRLTIPPPLPNTERRNTIHKPNWQKRLESRISKLRKYIGKVTHYINGSRSRTLTNQVNKILEQYRQHTVHEEPNTQLSQFLDTLKQKLSVYNSRLKRYSACTIRKTQNSQFINSERKFYQNLRHQTTNETQTNIDTPLPNPTELKQFWSNIWENPVTHNEEALWIQEEQITQETTEPMEFQNIPVETFQTVLRNLHNWKAPGPDNIHNYWYKKFTYIQPYLYHHINNFIQNPNQMPEYITAGITYMLPKDSNDTNNPAKYRPITCLQTVYKIITACLSHSIYSHLQSNSILKEQQKGSRKLSQGCKEQLTIDSIVLKQVQQKKKDLYTTYIDYKKAFDSVPHSWLIQILEIYKIHPQIIAFLKQAISAWTTKLKLTLNNSTVETDSIKIRRGIFQGDTFSPLWFCLALNPLSNILNSTDSGYLLQTNSNETQNSTLSDSHNFKLNHLLYMDDIKLYSSTEGELENLLELTENFSRDIKMEFGIDKCKINAIKAGQNYTMNYQLQSGDTIEPLQENETYKYLGYNQTKHILDKETKAKLKKQFQHRLNSIMKTQLTSKNLTKAINTFAIPILTYSFGIIKWNKHELKQLQRNINTTMTRFRKHHPRACVQRQTLPRSEGGRGIIDIHNLHSKQLTNLRNYFHKKSDTSTLHAAIAQNDKKLTPLNLNNHNTQHLENQITQETKIIEWTRKALHGRHRHDLSQTNVDKVASNAWLTRGELFPETEGFMIAVQDQVIETRNYQKHIIKVHNLPTDLCRRCNSTSETIQHITGACRAIVQTDYKHRHDQVANIIHQQLALKHNLLPHNTTKPYYKYIPETILENSTHKLYYDRAILTDRTIHYNRPDITLIDKTNKTALLIDIAVPNTHNIQSTITEKLTKYLELKDEITRMWNLRNVTIVPIVLSTTGVIPKQLNQSLNTINLPSFTIINLQKAVILNTCRIVRKFLQVDVGRESHPNQLTTAQQSFSLGLGP

SEQ ID NO: 2458 - protein, 1413 aa, Idaea aversata
MELRSRKISKGPLPGGDRRGTPGADAGRSSMQTIGGRELRRRAPTGSPEQCDSRPSPSSPSSTKSLFPSISSSPPSYLKPKPSSTSSSSHPHTKSLTEDVAQSSTLTVDNTAPVQVKRTRQRWTKEMNTFILRTYYILTSLEKDTVSYLADLHNKFCERFPDVDVSRQRIGDQRRAIERSKLLSPKEISAIRSEAETYLSSLVTDRRNLTVPNISVSQSTQKPTPTISQPQAGQRMRWSTELNEEIMRGYYRITAIDTNKTAYRKLLHQHFISKFPHLSHVTEQRIADQRRIIINNKLIDTNRLEQIKSEISSNDPIITETLTTQNLVSEEIETLLINIDNIDNPVNTILTENSRQEQLTQNTLNQDNTEIDCTFNDALNYFKNTEPMTRPFIPKQKTSKKLARIINDINKYILPKHINNDTTFETQQTVLYTAAWTAAKLNGTRLTIPPPLPNTERRNTIHKPNWQKRLESRISKLRKYIGKVTHYINGSRSRTLTNQVNKILEQYRQHTVHEEPNTQLSQFLDTLKQKLSVYNSRLKRYSACTIRKTQNSQFINSERRFYQNLRHQTTNETQTNIDTPLPNPTELKQFWSDIWENPVTHNKEALWIQEEQITQETTEPMEFQNIPVETFQTVLRNLHNWKAPGPDNIHNYWYKKFTYIQPYLYHHINNYIQNPNQMPEYITAGITYMLPKDSNDTNNPAKYRPITCLQTVYKIITACLSHSIYSHLQSNSILKEQQKGSRKLSQGCKEQLTIDSIVLKQVQQKKKDLYTTYIDYKKAFDSVPHSWLIQILEIYKIHPQIIAFLKQAISAWTTKLKLTLNNSTVETDSIKIRRGIFQGDTFSPLWFCLALNPLSNILNSTDSGYLLQTNSNETQNSTLSDSHNFKLNHLLYMDDIKLYSSTEGELENLLELTENFSRDIKMEFGIDKCKINAIKAGQNYTMNYQLQSGDTIEPLQENETYKYLGYNQAKHILDKETKAKLKKQFQHRLNSIMKTQLTSKNLTKAINTFAIPILTYSFGIIKWNKHELKQLQRNINTTMTRFRKHHPRACVQRQTLPRSEGGRGIIDIHNLHSKQLTNLRNYFHKKSDTSTLHTAIAQNDKKLTPLNLNNHNTQHLENQITQETKIIEWTRKALHGRHRHDLSQTNVDKVASNAWLTRGELFPETEGFMIAVQDQVIETRNYQKHIIKVHNLPTDLCRRCNSTSETIQHITGACRAIVQTDYKHRHDQVANIIHQQLALKHNLLPHNTTKPYYKYIPETILENSTHKLYYDRAILTDRTIHYNRPDITLIDKTNKTALLIDIAVPNTHNIQSTITEKLTKYLELKDEITRMWNLRNVTIVPIVLSTTGVIPKQLNQSLNTINLPSFTIINLQKAVILNTCRIVRKFLQVDVGRESHPNQLTTAQQSFSLGLGP

SEQ ID NO: 2459 - protein, 1413 aa, Idaea aversata
MELRSRKISKGPLPGGDRRGTPGADAGRSSMQTIGGRELRRRAPTGSPEQCDSRPSPSSPSSTKSLFPSISSSPPSYLKPKPSSTSSSSHPHTKSLTEDVAQSSTLTVDNTAPVQVKRTRQRWTKEMNTFILRTYYILTSLEKDTVSYLADLHNKFCERFPDVDVSRQRIGDQRRAIERSKLLSPKEISAIRSEAETYLSSLVTDRRNLTVPNISVSQSTQKPTPTISQPQAGQRMRWSTELNEEIMRGYYRITAIDTNKTAYRKLLHQHFISKFPHLSQVTEQRIADQRRIIINNKLIDTNRLEQIKSEISSNDPIITETLTTQNLVSEEIETLLINIDNIDNPVNTILTENSRQEQLTQNTLNQDNTEIDCTFNDALNYFKNTEPMTRPFIPKQKTSKKLARIINDINKYILPKHINNDTTFETQQTVLYTAAWTAAKLNGTRLTIPPPLPNTERRNTIHKPNWQKRLESRISKLRKYIGKVTHYINGSRSRTLTNQVNKILEQYRQHTVHEEPNTQLSQFLDTLKQKLSVYNSRLKRYSACTIRKTQNSQFINSERKFYQNLRHQTTNETQTNIPNPLPNPTELKQFWSDIWENPVTHNEEALWIQEEQITQETTEPMEFQNIPVDTFQTVLRNLHNWKAPGPDNIHNYWYKKFTYIQPYLYHHINNFIQNPNQMPEYITAGITYMLPKDSNDTNNPAKYRPITCLQTVYKIITACLSHSIYSHLQSNSILKEQQKGSRKLSQGCKEQLTIDSIVLKQVQQKKKDLYTTYIDYKKAFDSVPHSWLIQILEIYKIHPQIIAFLKQAISAWTTKLKLTLNNSTVETDSIKIRRGIFQGDTFSPLWFCLALNPLSNILNSTDSGYLLQTNSNETQNSTLSDSHNFKLNHLLYMDDIKLYSSTEGELENLLELTENFSRDIKMEFGIDKCKINAIKAGQNYTMNYQLQSGDTIEPLQENETYKYLGYNQAKHILDKETKAKLKKQFQHRLNSIMKTQLTSKNLTKAINTFAIPILTYSFGIIKWNKHELKQLQRNINTTMTRFRKHHPRACVQRQTLPRSEGGRGIIDIHNLHSKQLTNLRNYFHKKSDTSTLHAAIAQNDKKLTPLNLNNHNTQHLENQITQETKIIEWTRKALHGRHRHDLSQTNVDKVASNAWLTRGELFPETEGFMIAVQDQVIETRNYQKHIIKVHNLPTDLCRRCNSTSETIQHITGACRAIVQTDYKHRHDQVANIIHQQLALKHNLLPHNTTKPYYKYIPETILENSTHKLYYDRAILTDRTIHYNRPDITLIDKTNKTALLIDIAVPNTHNIQSTITEKLTKYLELKDEITRMWNLRNVTIVPIVLSTTGVIPKQLNQSLNTINLPSFTIIHLQKAVILNTCRIVRKFLQVDVGRESHPNQLTTAQQSFSLGLGP

SEQ ID NO: 2460 - protein, 1413 aa, Idaea aversata
MELRSRKISKGPLPGGDRRGTPGADAGRSSMQTIGGRELRRRAPTGSPEQCDSRPSPSSPSSTKSLFPSISSSPPSYLKPKPSSTSSSSHPHTKSLTEDVAQSSTLTVDNTAPVQVKRTRQRWTKEMNTFILRTYYILTSLEKDTVSYLADLHNKFCERFPDVDVSRQRIGDQRRAIERSKLLSPKEISAIRSEAETYLSSLVTDRRNLTVPNISVSQSTQKPTPTISQPQAGQRMRWSTELNEEIMRGYYRITAIDTNKTAYRKLLHQHFISKFPHLSQVTEQRIADQRRIIINNKLIDTNRLEQIKSEISSNDPIITETLTTQNLVSEEIETLLINIDNIDNPVNTILTENSRQEQLTQNTLNQDNTEIDCTFNDALNYFKNTEPMTRPFIPKQKTSKKLARIINYINKYILPKHINNDTTFETQQTVLYTAAWTAAKLNGTRLTIPPPLPNTERRNTIHKPNWQKRLESRISKLRKYIGKVTHYINGSRSRTLTNQVNKILEQYRQHTVHEEPNTQLSQFLDTLKQKLSVYNSRLKRYSACTIRKTQNSQFINSERKFYQNLRHQTTNETQTNIDTPLPNPTELKQFWSDIWENPVTHNEEALWIQEEQITQETTEPMEFQNIPVDTFQTVLRNLHNWKAPGPDNIHNYWYKKFTYIQPYLYHHINNFIQNPNQMPEYITAGITYMLPKDSNDTNNPAKYRPITCLQTVYKIITACLSHSIYSHLQSNSILKEQQKGSRKLSQGCKEQLTIDSIVLKQVQQKKKDLYTTYIDYKKAFDSVPHSWLIQILEIYKIHPQIIAFLKQAISAWTTKLKLTLNNSTVETDSIKIRRGIFQGDTFSPLWFCLALNPLSNILNSTDSGYLLHTNSNETQNSTLSDSHNFKLNHLLYMDDIKLYSSTEGELENLLELTENFSRDIKMEFGIDKCKINAIKAGQNYTMNYQLQSGDTIEPLQENETYKYLGYNQAKHILDKETKAKLKKQFQHRLNSIMKTQLTSKNLTKAINTFAIPILTYSFGIIKWNKHELKQLQRNINTTMTRFRKHHPRACVQRQTLPRSEGGRGIIDIHNLHSKQLTNLRNYFHKKSDTSTLHAAIAQNDKKLTPLNLNNHNTQHLENQITQETKIIEWTRKALHGRHRHDLSQTNVDKVASNAWLTRGELFPETEGFMIAVQDQVIETRNYQKHIIKVHNLPTDLCRRCNSTSETIQHITGACRAIVQTDYKHRHDQVANIIHQQLALKHNFLPHNTTKPYYKYIPETILENSTHKLYYDRAILTDRTIHYNRPDITLIDKTNKTALLIDIAVPNTHNIQSTITEKLTKYLELKDEITRMWNLRNVTIVPIVLSTTGVIPKQLNQSLNTINLPSFTIINLQKAVILNTCRIVRKFLQVDVGRESHPNQLTTAQQSFSLGLGP

SEQ ID NO: 2461 - protein, 1407 aa, Polyctor polyctor
METRRQRKLRLGSLPGGDRRGALGADAECLSMRTVSGSGLSRRAPAGSPEQSDSRTNLSPSSSLSSRFPSLPSSPPSYLNTNAISPSMSSVIPNLTSPSEAEDVVQSTLAVDDSAPGEAKRVRMKWSKEMNTFILRTYFILTTLDTDTTSYLPELHTKFLERFPDIQVSRQRIGGQRRAIISRNLLTKEEVDKIRSEAATYLNSISVNNPTTQTNIMTTPHTPHSNTRQTHPTSLQAQPGKKMRWSRELNEAVIKGYYKVTMLNTNNTGYRKLLHQYFVNEFPHLSHITEQRVADQRRVIINNRFFSEAELDCIKQEVVDELRINSEPNIINNSINETNDLNTIDSNIFTNTDTDNQEDSAEIENDTNIEIETTFKNALEYFKTTDPLKRPYIPRQKSSKKFAKIINYINKNIFKNYIDIDASYECFQTVIYSAAWTASKLNGSKLSIPPVIAHTAPQQKHRKPSWQKRLEKRISKLRKHIGILTHFINGNRSRAMQNKVDKIIERFKIHTTHEDPNTQYPQFLDTLKQKLAVYSSRLKRYVACTLRKTQNRVFQNNEKSFYRNISLQSSNIHNDTTSQNRVDFLSPSASDLKQFWAGIWENPVDHNHEALWIEEEIKRHETTEPMVYEHIPLDVFKKVLANLHNWKAPGPDNIQNYWYKKFIYVQPYLYRHINKFISNPEIIPPYITIGTTYMLPKDLSDTANPAKYRPITCLQTIYKIITACLTHLIYKHTETNNILNEEQKGARKNSQGCKEQLTIDTVILKQIQKHKKNLYTAYIDYKKAYDSVPHSWLIQILKIYKINPLIVTFLEHLMSTWRTKLLLRTNTNNIETDEIKIQRGIFQGDTLSPLWFCLALNPLSNLLNASNKGYTLNYKTNLNTDTKINISHLLYMDDIKLFETNDNELKVLLQITDKFSQDIRMNLGIDKCKINATKAGQNLSMQYELESGETIDPLGEQETYKYLGYNQNTQILEKATKDNLRKQFKHRLNSVLKTELYSKNTIKAINTYAVPILTYSFGIIKWSKTELKQLQRIINTTMTKNRKHHPRACVQRQTLPRTEGGRGIIDIINLHNKQISNLRAYFHKQAHTSNLHAAIAQNDNRLTPLNLKNTNTQKNEEQTDKQAKIEQWNRKSLHGRHRQDLSQTNVDKSASNAWLTRGDLFPETEGFMLAIQDQVIETRNYQKYIIKLRNLPTDLCRRCSSASETIQHITGACRAIVQTDYKHRHDQVANIIHQTLSIKYNLIPSTRKVPYYKYTPDTILENTNYKLYFDRGILTDRTVHFNRPDLLLINKLQKTAVIIDIAIPNTHNLQSTITEKLTKYLELKEEIMRMWHLKTVSIVPIVLSTTGVIPTQLHKSIKNLDLPSFTFINLQKAVILNTCRIVRKFLQTEIERESHLSNVTPTTTSID

SEQ ID NO: 2462 - protein, 1425 aa, Vanessa cardui
MMDKTNRYNLRSLPGGRRGASGAGAGCYSMRSTGDEALSRRALVAKQATADHRELNRRASDVEVTAEPQGYSQNPASNPASSPKSSFSSISSCTPSYINTFNHPNSSTNTSFRSHSPLLVENVVQSTNVDDSAPVKTIKRARKKWTKEMNMFILRTYYILTSLEEDTTSYLTDLHTKFLEQFPDMEVSRQRVGDQRRAIERNKLLTLEDKNKARNEAKAYLHSLAVDISSANKVDTLLHANHLTELSSHSPTQTHFTQGRTNQRMRWSNEINEEIIRLYYKITHDMNTNRTSYRKILHQKFIEKYPHLVHISEQRVADQRRVIINNKLIPSSRLEELKQEVTNEIGITDIATDKRCEQDTTCNEDNEDNQWKIINDLNRIQIDDHIQDKNNKEETPQYIDSEIDDTFQQALEYFKTTDPNCRPYIPKQNTSKKLAKIITYLNTSILPKYIDENTTFESEQTIIYSAAWTSAKINGTKLSLPFHNKTLPQTKNQKPNWQKRLERRILKLRKYIGKLTQVINGNNNCALKLEVDSILEHYKVHTQHEEHNVQLTQFLDTLKQKLSVFSCRLKRYLACTARKTENAQFKTNERKFYQNIRSQSTNLTNCTKNSTMHDTNLPPRDELRKFWINLWEAPINHNHEANWIKEEIHRHETTEPMEFRQIPIETFNIVLKRLHNWKSPGPDRIHNYWYKKFTYIHPYLYTHINNFIANPSSMPQYIAKGITYMLPKDPNDTANPSKYRPITCLQTIYKIITACLTHSIYNHLEKNAILEEQQKGCRKNSQGCKEQLTIDTVILKQVQKMKKDLYTVYIDYKKAFDSVPHSWLINILHIYKIHPQIINFLQRAITLWTTKLTISLQNKTIETDEIKIQRGIFQGDTLSPLWFCLALNPLSTILNSTCNGYTLQYTNSLTNNIELININHLLYMDDIKMFSSTEKGLENLIKLAENFSQDIKMEFGIDKCKINSIKSGHNHLMHYQLQTGETIDPLEENDTYKYLGYNQAKQILEKETKIKIKQQFNYRLNRILKTQLNSKNIIKAINTFAIPILIYSFGILKWSKNDLKQLQRNINTTMTKNRKHHPRACVQRQTLPRSEGGRGIIDIINLHNNQITNLRKYFYTKSNTSKLHTAIVETDKKLTPLNLQDKNTQKNEEQIDRNVKISEWARKSLHGRHRQDLCRSNVDINASNAWLSRGELFPETEGFMIAIQDQVIETRNYQKYIMRIPNLSTDLCRRCNSVSESIQHITGACRAIAQTDYKYRHDQVANIVHQELALKYKLISNKTAYYKYTPETVLENTTHKLYYDRAILTDRTVHYNRPDITIVDKVQKSAFLIDIAIPNTHNLQSTINEKLTKYTELKEEIARMWHLQKVTIVPIVLSTTGVIPKQMHISVKALNLPNSLYVNMQKAVILNTCRIVRKFFATDGERELL

SEQ ID NO: 2463 - protein, 791 aa, Nymphalis polychloros
MKHNNKAQWIKEELHKHETTEPMEFQHIPIETFYTVLKQLHNWKAPGPDRIHNYWYKKFTHIHPYLYTHINNFIINPSSMPQYITKGITYMLPKDLNDTANPSKYRPITCLQTIYKIITACLTHTIYKHLEQNTILEEQQKGCKKHSQGCKEQLTIDTVILKQVQKMKSDLFTVYIDYKKAFDSVPHSWLIKILHIYKINPQIIHFLQHAISTWTTNLTLNLQNKTIETDEIKIKRGIFQGDTLSPLWFCLALNPLSTLLNSTNTGYTLQYKNSLTNKNESLNINHLFYMDDLKLFSSTEKALKGLIKLTEGFSQDIKMEFGIDKCKINAIKSGQNHQMHYQLQTGEIIDPLGENDTYKYLGYNQAKQILDKETKMKLKQQFNYRLNSIMKSQLNSKNIIKAINTFAIPILTYSFGILKWSKNDLKELQRNINTTMTKNRKHHPRACVQRQTLPRNEGGRGIIDIQNMHNNQITNLRKYFYTKSNTSNLHTAIVQSDKKLTPLNLHDINTQSNEIQIDQHAKISEWTRKSLHGRHRQDLCRINVDKNASNAWLSRGEFFPETEGFMIAIQDQVIETRNYQKYIMKITNLSTDLCRRCNSVSESIQHITGACRAIAQTDYKYRHDQVANIVHQELALKYKLISDKIAYYKYTPNTVLENTTHKLYYDRAILTDRTVHYNRPDIAIVDKTQKTAFLIDIAIPNTHNLQSTINEKLTKYTELKEEIARMWHLQKVKIIPLILSTTGVIPKQMHTSLKALNLPNFLFVNMQKAVILNTCRIVRKFLATEGEREFL

SEQ ID NO: 2464 - protein, 1424 aa, Vanessa cardui
MMDKTNRYNLRSLPGGRRGASGAGAGCYSMRSTGDEALSRRALVAKQATADHRELNRRASDVEVTAEPQGYSQNPSSNPASSPKSSFSSISSCTPSYINTFNHPNSSTNTSFRSHSPLLVENVVQSTNVDDSAPVKTIKRARKKWTKEMNMFILRTYYILTSLEEDTTSYLTDLHTKFLKQFPDMEVSKQRVGDQRRAIERNKLLTLEDKNKARNEAKAYLHSLAIDISSANKVDTLLHANHLTELSSHSPTQTHFTQGRTNQRMRWSNEINEEIIRLYYKITHMNTNRTSYRKILHQKFIEKYPHLVHISEQRVADQRRVIINNKLIPSTRLEELKQEVTNEIGITDIATDKRCEQDTTCNEDNEDNQWKIINDLNRIQIDDHIQDKNNKEETPQYIDSEIDDTFQQALEYFKTTDPNCRPYIPKQNTSKKLAKIITYLNTSILPKYIDENTTFESEQTIIYSAAWTSAKINGTKLSLPFHNKTLPQTKNQKPNWQKRLERRILKLRKYIGKLTQVINGNNNCALKLEVDSILEHYKVHTQHEEHNVQLKQFLDTLKQKLSVFSCRLRRYLACTARKTENAQFKTNERKFYQNIRSQSTNLTNCTKNSTMHDTSLPPRDELRKFWNNLWEAPINHNHEANWIKEEIHRHETTEPMEFRQIPIETFNIVLKRLHNWKAPGPDRIHNYWYKKFTYIHPYLYTHINNFIANPSSMPQYIAKGITYMLPKDPNDTANPSKYRPITCLQTIYKIITACLTHSIYNHLEKNAILEEQQKGCRKNCQGCKEQLTIDVVILKQVQKMKKDLYTVYIDYKKAFDSVPHSWLINILHIYKIHPQIINFLQRAISLWTTKLTISLQNKTIETDEIKIQRGIFQGDTLSPLWFCLALNPLSTILNSTCNGYTLQYTNSLTNNIELININHLLYMDDIKIFSSTEKGLENLIKLAENFSQDIKMEFGTDKCKINSIKSGHNHLMHYQLQTGETIDPLEENDTYKYLGYNQAKQILEKETKIKIKQQFNYRLNRILKTQLNSKNIIKAINTFAIPILIYSFGILKWSKNDLKQLQRNINTTMSKNRKHHPRACVQRQTLPRSEGGRGIIDIINLHNNQITNLRKYFYTKSNTSKLHTAIVETDKKLTPLNLQDKNTQKNEEQIDRKVKISEWARKSLHGRHRQDLCRSNVDINASNAWLSRGELFPETEGFMIAIQDQVIETRNYQKYIMRIPNLSTDLCRRCNSVSESIQHITGACRTIAQTDYKYRHDQVANIVHQELALKYKLISNKTAYYKYTPETVLENTTHKLYYDRAILTDRTVHYNRPDITIVDKVQKSAFLIDIAIPNTHNLQSTINEKLTKYTELKEEIARMWHLQKVTIVPIVLSTTGVIPKQMHISVKALNLPNFLYVNMQKAVILNTCRIVRKFFATDGERELL

SEQ ID NO: 2465 - protein, 1420 aa, Nymphalis polychloros
MMKKSHRYNLRSLPGGRRGASGAGAGCYSIRSTGDEVLSRRALVVQHVTADHRELTRRASDVEVTAEPLENSHNPQSNPSSSPKSLFSSIPSTTPSYLNINDQPTFSTTIYSRNSSPLLQAENVVQSTNVDDSAPVHADKRTRKKWTREMNMFILRTYHILTSFEKDTTSYLTDLHTKFIEQFPDMQVSKQRVGDQRRAIERNQLLTVEDKNRARVEAQAYLDNLAVDISRAKEVDTDVHASRTTRISPHSTTQMHSTQNRTNKRMRWSNEINEEIIRLFYKVTHLDTNRTSYRKILHQKFIDKFPHLVHISEQRIADQRRVIVNNKLIPNSRLEELKQEVNNEIGITNKETYVNSEQNPKSNKDNDSSDLNNIQVNDDVQKENNTTETQPYVNTEIDETFQHALEYFRTTDPISRPYIPKQNSSKKFAKIITYINTLILPKYIDANTTFESQQTTIYSAAWTAAKLNGTKLSIPYHNKNQSPQVKSQKPNWQKRLERRILNLRKYIGKLTQIINGNNSRTLKSEVELILERYKVHTRHEEPNVQLTQFLDTLKQKLSVLSCRLKRYLTCTARKTENAQFKNNERKFYQNIRSQPTNLTNHTNNSNIHDITLPLKDELRKFWSNLWETPIKHNDKAQWIKEELHKHETTEPMEFQHIPIETFYTVLKQLHNWKAPGPDRIHNYWYKKFTHIHPYLYTHINNFIINPSSMPQYITKGITYMLPKDLNDTANPSKYRPITCLQTIYKIITACLTHTIYKHLEQNTILEEQQKGCKKHSQGCKEQLTIDTVILKQVQKMKSDLFTVYIDYKKAFDSVPHSWLIKILHIYKINPQIIHFLQHAISTWTTNLTLNLQNKTIETDEIKIKRSIFQGDTLSPLWFCLALNPLSTLLNSTNTGYTLQYKNSLTNKNESLNINHLFYMDDLKLFSSTEKALKGLIKLTEGFSQDIKMEFGIDKCKINAIKSGQNHQMHYQLQTGEIIDPLGENDTYKYLGYNQAKQILDKETKMKLKQQFNYRLNSIMKSQLNSKNIIKAINTFAIPILTYSFGILKWSKNDLKQLQRNINTTMTKNRKHHPRACVQRQTLPRNEGGRGIIDIQNMHNNQITNLRKYFYTKSNTSNLHTAIVQSDKKLTPLNLHDINTQSNEIQIDQHAKISEWTRKSLHGRHRQDLCRINVDKNASNAWLSRGEFFPETEGFMIAIQDQVIETRNYQKYIMKITNLSTDLCRRCNSVSESIQHITGACRAIAQTDYKYRHDQVANIVHQELALKYKLISDKIAYYKYTPNTVLENTTHKLYYDRAILTDRTVHYNRPDIAIVDKTQKTAFLIDIAIPNTHNLQSTINEKLTKYTELKEEIARMWHLQKVTIIPLILSTTGVIPKQMHTSLKALNLPNFLFVNMQKAVILNTCRIVRKFLATEGERELL

SEQ ID NO: 2466 - protein, 1424 aa, Vanessa cardui
MMDKTNRYNLRSLPGGRRGASGAGAGCYSMRSTGDEALSRRALVAKQATADHRELNRRASDVEVTAEPQGYSQNPASNPASSPKSSFSSISSCTPSYINTFNHPNSSTNTSFRSHSPLLVENVVQSTNVDDSAPVKTIKRARKKWTKEMNMFILRTYYILTSLEEDTTSYLTDLHTKFLEQFPDMEVSRQRVGDQRRAIERNKLLTLEDKNKARNEAKAYLHSLAVDISSANKVDTLLHANHLTELSSHSPTQTHFTQGRTNQRMRWSNEINEEIIRLYYKITHMNTNRTSYRKILHQKFIEKYPHLVHISEQRVADQRRVIINNKLIPSSRLEELKQEVTNEIGITDIATDKRCEQDTTCNEDNEDNQWKIINDLNRIQIDDHIQDKNNKEETPQYIDSEIDDTFQQALEYFKTTDPNCRPYIPKQNTSKKLAKIITYLNTSILPKYIDENTTFESEQTIIYSAAWTSAKINGTKLSLPFHNKTLPQTKNQKPNWQKRLERRILKLRKYIGKLTQVINGNNNCALKLEVDSILEHYKVHTQHEEHNVQLTQFLDTLKQKLSVFSCRLKRYLACTARKTENAQFKTNERKFYQNIRSQSTNLTNCTKNSTMHDTNLPPRDELRKFWINLWEAPINHNHEANWIKEEIHRHETTEPMEFRQIPIETFNIVLKRLHNWKAPGPDRIHNYWYKKFTYIHPYLYTHINNFIANPSSMPQYIAKGITYMLPKDPNDTANPSKYRPITCLQTIYKIITACLTHSIYNHLEKNAILEEQQKGCRKNSQGCKEQLTIDTVILKQVQKMKKDLYTVYIDYKKAFDSVPHSWLINILHIYKIHPQIINFLQRAITLWTTKLTISLQNKTIETDEIKIQRGIFQGDTLSPLWFCLALNPLSTILNSTCNGYTLQYTNSLTNNIELININHLLYMDDIKIFSSTEKGLENLIKLAENFSQDIKMEFGIDKCKINSIKSGHNHLMHYQLQTGETIDPLEENDTYKYLGYNQAKQILEKETKIKIKQQFNYRLNRILKTQLNSKNIIKAINTFAIPILIYSFGILKWSKNDLKQLQRNINTTMTKNRKHHPRACVQRQTLPRSEGGRGIIDIINLHNNQITNLRKYFYTKSNTSKLHTAIVETDKKLTPLNLQDKNTQKNEEQIDRNVKISEWARKSLHGRHRQDLCRSNVDINASNAWLSRGELFPETEGFMIAIQDQVIETRNYQKYIMRIPNLSTDLCRRCNSVSESIQHITGACRAIAQTDYKYRHDQVANIVHQELALKYKLISNKTAYYKYTPETVLENTTHKLYYDRAILTDRTVHYNRPDITIVDKVQKSAFLIDIAIPNTHNLQSTINEKLTKYTELKEEIARMWHLQKVTIVPIVLSTTGVIPKQMHISVKALNLPNFLYVNMQKAVILNTCRIVRKFFATDGERELL

SEQ ID NO: 2467 - protein, 1240 aa, Vanessa atalanta
MEVSRQRVGDQRRAIERNKLLTLEDKNKARNEAKAYLHSLAVDISSANKVETLLHANHLTELSSHLPTQTHSTQGRTNQRMRWSNEINEEIIRLYYKITHMNTNRTSYRKILHQKFIEKFPHLEHISEQRVADQRRVIINNKLIPSTRLEELKQEVTNEIGITDIATTTTTTMHTTCNEDNEDNQWKIINDLNRIQIDDHIQDKNNKEETPQYIDSEIDDTFQQALEYFKTTDPDCRPYIPKQNTSKKLAKTITYINTSILPKYIDANTTFESEQTIIYSAAWTSAKINGTKLSLPFHNKTLPQARNQKPNWQKRLERRILKLRKYIGKVTQVINGSNNCALKLEVDSILERYKVHTQHEEHNVQLIQFLDTLKQKLSVFSCRLKRYLACTARKTENAQFKTNERKFYQNIRSQSTNLTNYTKNSTTHDTNLPPKDELRKFWINIWEAPINHNHEANWIKEEIHRHETTEPMEFKQIPIETFNIVLKRLHNWKAPGPDRIHNYWYKKFTYIHPYLYTHINNFIANPSSMPQYIAKGITYMLPKDPNDTANPSKYRPITCLQTIYKIVTACLTHSIYNHLEKNAILEEQQKGCKKNSQGCKEQLTIDTVILKQVQKMKKDLYTVYIDYKKAFDSVPHSWLIKILHIYKIHPQIIHFLQHAISLWTTKLTISLQNKTIETDEIKIQRGIFQGDTLSPLWFCLALNPLSTILNSTCNGYTLQYTNSLTNNIELININHLLYMDDIKIFSSTEKGLENLIKLTENFSQDNKMELGIDKCKINSIKAGHNHLMHYQLQTGETIDPLEENDTYKYLGYNQAKQILEKETKIKIKQQFNYRLNRILKTQLNSKNIIKAINTFAIPILIYSFGILKWSKNDLKQLQRNINTNMTKNRKHHPRACVQRQTLPRSEGGRGIIDIINMHNNQITNLRKYFYTKSNTSKLHTAIVETDKKLTPLNLQDKNTQSNEEQIDRNVKIIEWTRKSLHGRHRQDLCRSNVDINASNAWLSRGELFPETEGFMIAIQDQVIETRNYQKYIMRIPNLSTDLCRRCNSVSESIQHITGACRAIAQTDYKYRHDQVANIVHQELALKYKLISNKIAYYKYTPETVLENTTHKLYYDRAILTDRTVHYNRPDITIVDKVQKSAFLIDIAIPNTHNLQSTINEKLTKYTELKEEIARMWHLQKVTIVPIVLSTTGIIPKQMHISVKTLNLPNFLYVNMQKAVILNTCRIVRKFLATEGERELL

SEQ ID NO: 2468 - protein, 814 aa, Vanessa cardui
MHDTSLPPRDELRKFWINLWEAPINHNHEANWIKEEIHRHETTEPMEFRQIPIETFNIVLKRLHNWKAPGPDRIHNYWYKKFTYIHPYLYTHINNFIANPSSMPQYIAKGITYMLPKDPNDTANPSKYRPITCLQTIYKIITACLTHSIYNHLEKNAILEEQQKGCRKNSQGCKEQLTIDAVILKQVQKMKKDLYTVYIDYKKAFDSVPHSWLINILHIYKIHPQIINFLQRAISLWTTKLTISLQNKTIETDEIKIQRGIFQGDTLSPLWFCLALNPLSTILNSTCNGYTLQYTNSITNNIELININHLLYMDDIKIFSSTEKGLENLIKLAENFSQDIKMEFGIDKCKINSIKSGHNHLMHYQLQTGETIDPLEENDTYKYLGYNQAKQILEKETKIKIKQQFNYRLNRILKTQLNSKNIIKAINSFAIPILIYSFGILKWSKNDLKQLQRNINTTMSKNRKHHPRACVQRQTLPRSEGGRGIIDIINLHNNQITNLRKYFYTKSNTSKLHTAIVETDKKLTPLNLQDKNTQKNEEQIDRKVKISEWARKSLHGRHRQDLCRSNVDINASNAWLSRGELFPETEGFMIAIQDQVIETRNYQKYIMRIPNLSTDLCRRCNSVSESIQHITGACRTIAQTDYKYRHDQVANIVHQELALKYKLISNKTAYYKYTPETVLENTTHKLYYDRAILTDRTVHYNRPDITIVDKVQKSAFLIDIAIPNTHNLQSTINEKLTKYTELKEEIARMWHLQKVTIVPIVLSTTGVIPKQMHISVKALNLPNFLYVNMQKAVILNTCRIVRKFFATDGERELL

SEQ ID NO: 2469 - protein, 1424 aa, Vanessa cardui
MMDKTNRYNLRSLPGGRRGASGAGAGCYSMRSTGDEALSRRALVAKQATADHRELNRRASDVEVTAEPQGYSQNPASNPASSPKSSFSSISSGTPSYINTFNHPNSSTNTSFHSHSPLLVENVVQSTNVDDSAPVKTIKRARKKWTKEMNMFILRTYYILTSLEEDTTSYLTDLHTKFLEQFPDMEVSKQRVGDQRRAIERNKLLTLEDKNKARNEAKAYLHSLAVDISSANKVDTLLHANHLTELSSHSPTQTHFTQGRTNQRMRWSNDINEEIIRLYYKITHMNTNRTSYRKILHQKFIEKYPHLVHISEQRVADQRRVIINNKLIPSTRLEELKQEVTNEIGIKDIATDKRCEQDTTCNEDNEDNQWKIINDLNRIQIDDHIQDKNNKEETPQYIDSKIDDTFQQALEYFKTTDPNCRPYIPKQNTSKKLAKIITYLNTSILPKYIDENTTFESEQTIIYSAAWTSAKINGTKLSLPFHNKTLPQTKNQKPNWQKRLERRILKLRKYIGKLTQVINGNNNCALKLEVDSILEHYKVHTQHEEHNVQLTQFLDTLKQKLSVFSCRLKRYLACTARKTENAQFKTNERKFYQNIRSQSTNLTNCTKNSTMHDTNLPPRDELRKFWINIWEAPVNHNHEANWIKEEIHRHETTEPMEFRQIPIETFNIVLKRLHNWKAPGPDRIHNYWYKKFTYIHPYLYTHINNFIANPSSMPQYIAKGITYMLPKDPNDTANPSKYRPITCLQTIYKIITACLTHSIYNHLEKNAILEEQQKGCRKNSQGCKEQLTIDTVILKQVQKMKKDLYTVYIDYKKAFDSVPHSWLINILHIYKIHPQIINFLQRAMSLWTTKLTISLQNKTIETDEIKIQRGIFQGDTLSPLWFCLALNPLSTILNSTCNGYTLQYTNSITNNIELININHLLYMDDIKIFSSTEKGLENLIKLTENFSQDIKMEFGIDKCKINSIKSGHNHLMHYQLQTGETIDPLEENDTYKYLGYNQAKQILEKETKIKIKQQFNYRLNRILKTQLNSKNIIKAINTFAIPILIYSFGILKWSKNDLKQLQRNINTTMTKNRKHHPRACVQRQTLPRSEGGRGIIDIINLHNNQITNLRKYFYTKSNTSKLHTAIVETDKKLTPLNLQDKNTQNNEEQIDRNVKISEWARKSLHGRHRQDLCRSNVDINASNAWLSRGELFPETEGFMIAIQDQVIETRNYQKYIMRIPNLSTDLCRRCNSVSESIQHITGACRAIAQTDYKYRHDQVANIVHQELALKYKLITNKTAYYKYTPETVLENTTHKLYYDRAILTDRTVHYNRPDITIVDKVQKSAFLIDIAIPNTHNLQSTINEKLTKYTELKEEIARMWHLQKVTIVPIVLSTTGVIPKQMHISVKALNLPNFLYVNMQKAVILNTCRIVRKFFATDEERELL

SEQ ID NO: 2470 - protein, 1420 aa, Nymphalis polychloros
MMKKSHRYNLRSLPGGRRGASGAGAGCYSIRSTGDEVLSRRALVVQHVTADHRELNRRASDVEVTAEPLENSHNPQSNPSSSPKSLFSSIPSTTPSYLNINNQPTFSTTIYSRNSSPLLQAENVVQSTNVDDSAPVHADKRTRKKWTREMNMFILRTYHILTSFEKDTTSYLTDLHTKFIEQFPDMQVSKQRVGDQRRAIERNQLLTVEDKNRARVEAQAYLDNLAVDISRAKEVDTDVHASRTTRISPHSTTQMHSTQNRTNKRMRWSNEINEEIIRLFYKVTHLDTNRTSYRKILHQKFIDKFPHLVHISEQRIADQRRVIVNNKLIPNSRLEELKQEVNNEIGITNKETYVNSEQNPKSNKDNDSSDLNNIQVNDDVQKENNTTETQPYVNTEIDETFQHALEYFRTTDPISRPYIPKQNTSKKFAKIITYINTLILPKYIDANTTFESQQTTIYSAAWTAAKLNGTKLSIPYHNKNQSPQVKSQKPNWQKRLERRILNLRKYIGKLTQIINGNNSRTLKSEVELILERYKVHTRHEEPNVQLTQFLDTLKQKLSVLSCRLKRYLTCTARKTENAQFKNNERKFYQNIRSQPTNLTNHTNNSNIHDITLPLKDELRKFWTNLWETPIKHNDKAQWIKEELHKHETTEPMEFQHIPIETFYTVLKQLHNWKAPGPDRIHNYWYKKFTHIHPYLYTHINNFIINPSSMPQYITKGITYMLPKDLNDTANPSKYRPITCLQTIYKIITACLTHTIYKHLEQNTILEEQQKGCKKHSQGCKEQLTIDTVILKQVQKMKSDLFTVYIDYKKAFDSVPHSWLIKILHIYKINPQIIHFLQHAISTWTTNLTLNLQNKTIETDDIKIKRGIFQGDTLSPLWFCLALNPLSTLLNSTNTGYTLQYKNSLTNKNESLNINHLFYMDDLKLFSSTEKALNGLIKLTEGFSQDIKMEFGIDKCKINAIKSGQNHQMHYQLQTGEIIDPLGENDTYKYLGYNHAKQILDKETKMKLKQQFNYRLNSIMKSQLNSKNIIKAINTFAIPILTYSFGILKWSKNDLKQLQRNINTTMTKNRKHHPRDCVQRQTLPRNEGGRGIIDIQNMHNNQITNLRKYFYTKSNTSNLHTAIVQSDKKLTPLNLHDINTQSNEIQIDQHAKISEWTRKSLHGRHRQDLCRINVDKNASNAWLSRGEFFPETEGFMIAIQDQVIETRNYQKYIMKITNLSTDLCRRCNSVSESIQHITGACRAIAQTDYKYRHDQVANIVHQELALKYKLISDKIAYYKYTPDTVLENTTHKLYYDRAILTDRTVHYNRPDIAIVDKTQKTAFLIDIAIPNTHNLQSTINEKLTKYTELKEEIARMWHLQKVTIIPLILSTTGVIPKQMHTSLNALNLPNFLFVNMQKAVILNTCRIVRKFLATEGERELL

SEQ ID NO: 2471 - protein, 1424 aa, Vanessa atalanta
MMDKTNRYNLRSLPGGRRGASGAGAGCYSMRSTGDEALSRRALVAQQVTADHRELNRRASDVEVTAEPQEYSQNPPSNPSSSPKSSFSSIPSCTPSYINTFNQPNSSTNTSSRSHSPLLLVENVVQSTNVDDSAPVKTIKRARKKWTREMNMFILRTYYILTSLEKDTTSYLTDLHTKFLEQFPDMEVSRQRVGDQRRAIERNKLLTLEDKNKARNEAKAYLHSLAVDISSANKVETLLHANHLTELSSHLPTQTHSTQGRTNQRMRWSNEINEEIIRLYYKITHMNTNRTSYRKILHQKFIEKFPHLEHISEQRVADQRRVIINNKLIPSTRLEELKQEVTNEIGITDIATTTTTMHTTCNEDSEDNQWKIINDLNRIQKDDHIQDKNNKEETPQYIDSEIDDTFQQALEYFKTTDPDCRPYIPKQNTSKKLAKTITYINTSILPKYIDANTTFESEQTIIYSAAWTSAKINGTKLSLPFHNKTLPQARNQKPNWQKRLERRILKLRKYIGKVTQVINGNNNCALKLEVDSILERYKVHTQHEEHNVQLIQFLDTLKQKLSVFSCRLKRYLVCTARKTENAQFKTNERKFYQNIRSQSTNLTNYTKNSTTHDTNLPPKDELRKFWINIWEAPINHNHEANWIKEEIHRHETTEPMEFKQIPIETFNIVLKRLHNWKAPGPDRIHNYWYKKFTYIHPYLYIHINNFIANPSSMPQYIAKGITYMLPKDPNDTANPSKYRPITCLQTIYKIVTACLTHSIYNHLEKNAILEEQQKGCKKNSQGCKEQLTIDTVILKQVQKMKKDLYTVYIDYKKAFDSVPHSWLIKILHIYKIHPQIIHFLQHAISLWTTKLTISLQNKTIETDEIKIQPGIFQGDTLSPLWFCLALNPLSTILNSTCNGYTLQYTNSLTNNIELININHLLYMDDIKIFSSTEKGLENLIKLTENFSQDIKMELGIDKCKINSIKAGHNHLMHYQLQTGETIDPLEENDTYKYLGYNQAKQILEKETKIKIKQQFNYRLNRILKTQLNSKNIIKAINTFAIPILIYSFGILKWSKNDLKQLQRNINTTMTKNRKHHPRACVQRQTLARSEGGRGIIDIINMHNNQITNLRKYFYTKSNTSKLHTAIVETDKKLTPLNLQDKNTQSNEKQIDRNVKIIEWTRKSLHGRHRQDLCRSNVDINASNAWLSRGELFPETEGFMIAIQDQVIETRNYQKYIMRIPNLSTDLCRRCNSVSESIQHITGACRAIAQTDYKYRHDQVANIVHQELALKYKLISNKIAYYKYTPETVLENTTHKLYYDRAILTDRTVHYNRPDITIVDKVQKSAFLIDIAIPNTHNLQSTINEKLTKYTELKEEIARMWHLQKVTIVPIVLSTTGIIPKQMHISVKTLNLPNFLYVNMQKAVILNTCRIVRKFLATEGERELL

SEQ ID NO: 2472 - protein, 1420 aa, Nymphalis polychloros
MMKKSHRYNLRSLPGGRRGASGAGAGCYSIRSTGDEVLSRRALVVQHVTADHRELNRRASDVEVTAEPLENSHNPQSNPSSSPKSLFSSIPSTTPSYLNINSQPNFSTTIYSRNSSPLLQAENVVQSTNVDDSAPVHADKRTRKKWTREMNMFILRTYHILTSFEKDTTSYLTDLHTKFIEQFPDMQVSKQRVGDQRRTIERNQLLTVEDKNRARVEAQAYLDNLAVDISRAKEVDTDVHASRTTRISPHSTTQMHSTQNRTNKRMRWSNEINEEIIRLFYKVTHLDTNRTSYRKILHQKFIDKFPHLVHISEQRIADQRRVIVNNKLIPNSRLEELKQEVNNEIGITNKETYVNSEQNPKSNKDNDSSDLNNIQVNDDVQKENNATETQPYVNTEIDETFQHALEYFRTTDPISRPYIPKQNTSKKFAKIITYINTLILPKYIDANTTFESQQTTIYSAAWTAAKLNGTKLSIPYHNKNQSPQVKSQKPNWQKRLERRILNLRKYIGKLTQIINGNNSRTLKSEVELILERYKVHTRHEEPNVQLTQFLDTLKQKLSVLSCRLKRYLTCTARKTENAQFKNNERKFYQNIRSQPTNLTNHTNNSNIHDITLPLKDELRKFWSNLWETPIKHNDKAQWIKEELHKHETTKPMEFQHIPIETFYTVLKRLHNWKAPGPDRIHNYWYKKFTHIHPYLYTHINNFIINPSSMPQYITKGITYMLPKDLNDTANPSKYRPITCLQTIYKIITACLTHTIYKHLEQNTILEEQQKGCKKHSQGCKEQLTIDTVILKQVQKMKSDLFTVYIDYKKAFDSVPHSWLIKILHIYKINPQIIHFLQHAISTWTTNLTLNLQNKTIETDEIKIKRGIFQGDTLSPLWFCLALNPLSTLLNSTNTGYTLQYKNSLTNKNESLNINHLFYMDDLKLFSSTEKALKGLIKLTEGFSQDIKMEFGIDKCKINAIKSGQNHQMHYQLQTGEIIDPLGENDTYKYLGYNQAKQILDKETKMKLKQQFNYRLNSIMKSQLNSKNIIKAINTFAIPILTYSFGILKWSKNDLKQLQRNINTTMTKNRKHHPRACVQRQTLPRNEGGRGIIDIQNMHNNQITNLRKYFYTKSNTSNLHTAIVQSDKKLTPLNLHDINTQSNEIQIDQHAKISEWTRKSLHGRHRQDLCRINVDKNASNAWLSRGEFFPETEGFMIAIQDQVIETRNYQKYIMKITNLSTDLCRRCNSVSESIQHITGACRAIAQTDYKYRHDQVANIVHQELALKYKLISDKIAYYKYTPNTVLENTTHKLYYDRAILTDRTVHYNRPDIAIVDKTQKTAFLIDIAIPNTHNLQSTINEKLTKYTELKEEIARMWHLQKVTIIPLILSTTGVIPKQMHTSLKALNLPNFLFVNMQKAVILNTCRIVRKFLATEGERELL

SEQ ID NO: 2473 - protein, 1424 aa, Vanessa cardui
MMDKTNRYNLRSLPGGRRGASGAGAGCYSMRSTGDEALSRRALVAKQATADHRELNRRASDVEVTAEPQGYSQNPASNPASSPKSSFSSISSSTPSYINTFNHPNSSTNTSFRSHSPLLVENVVQSTNVDESAPVKTIKRARKKWTKEMNMFILRTYYILTSLEEDTTSYLTDLHTKFLEQFPDMEVSKQRVGDQRRAIERNKLLTLEDKNKARNEAKAYLHSLAVDISSANKVDTLLHANHVTELSSHSPTQTHSNQGRTNQRMRWSNEINEEIIRLYYKITHMNTNRTSYRKILHQKFIEKYPHLVHISEQRVADQRRVIINNKLIPSTRLEELKQEVTNEIGITDIATAKRCEQDTTCNEDNEDNQWKIINDLNRIQIDDHIQDKNNKEETPQYVDSEIDDTFQQALEYFKTTDPNCRPYIPKQNTSKKLAKIITYINTSILPKYIDENTTFESEQTIIYSAAWTSAKINGTKLSLPFHNKTLPQTKTQKPNWQKRLERRILKLRKYIGKLTQVINGNNNCALKLEVDSILEHYKVHTQHEEHNVQLTQFLDTLKQKLSVFSCRLKRYLACTARKTENAQFKTNERKFYQNIRTQSTNLTNCTKNSTMHDTNLPPRDELRKFWINIWEAPINHNHEANWIKEEMHRHETTEPMEFRQIPIETFNIVLKRLHNWKAPGPDRIHNYWYKKFTYIHPYLYIHINNFIANPSSMPQYIAKGITYMLPKDPNDTANPSKYRPITCLQTIYKIITACLTHSIYNHLEKNAILEEQQKGCRKNSQGCKEQLTIDTVISKQVQKMKKDLYTVYIDYKKAFDSVPHSWLIKILHIYKINPQIINFLQRAISLWTTKLTISLQNKTIETDEIKIQRGIFQGDTLSPLWFCLALNPLSTILNSTSNGYTLQHTNSLTNNIELININHLLYMDDIKIFSSTEKGLENLIKLAENFSQDIKMEFGIDKCKINSIKAGRNHLMHYQLQTGETIDPLEENDTYKYLGFNQAKQILEKETKIKIKQQFNYRLNRILKTQLNSKNIIKAINTFAIPILIYSFGILKWSKNDLKQLQRNINTTMTKNRKHHPRACVQRQTLPRSEGGRGIIDIINMHNNQITNLRKYFYTKSNTSKLHTAIVETDKKLTPLNLQDKNTQNNEEQIDRNVKISEWARKSLHGRHRQDLCRSNVDINASNAWLSRGELFPETEGFMIAIQDQVIETRNYQKYIMRIPNLSTDLCRRCNSVSESIQHITGACRAIAQTDYKYRHDQVANIVHQELALKYKLISNKTAYYKYTPETVLENTTHKLYYDRAILTDRTVHYNRPDITIVDKVQKSAFLIDIAIPNTHNLQSTINEKLTKYTELKEEIARMWHLQKVTIVPIVLSTTGIIPKQMHVSVKTLNLPNFLYVNMQKAVILNTCRIVRKFFATDGERELL

SEQ ID NO: 2474 - protein, 1420 aa, Nymphalis polychloros
MMKKSHRYNLRSLPGGRRGASGAGAGCYSIRSTGDEVLSRRALVVQHVTADHRELNRRASDVEVTAEPLENSHNPQSNPSSSPKSLFSSIPSTTPSYLNINNQPTFSTTIYSRNSSPLLQAENVVQSTNVDDSAPVHADKRTRKKWTREMNMFILRTYHILTSFEKDTTSYLTDLHTKFIEQFPDMQVSKQRVGDQRRAIERNQLLTVEDKNRARVEAQAYLDNLAVDISRAKEVDTDVHASRTTRISPHSTTQMHSTQNRTNKRMRWSNEINEEIIRLFYKVTHLDTNRTSYRKILHQKFIDKFPHLVHISEQRIADQRRVIVNNKLIPNSRLEELKQEVNNEIGITNKETYVNSEQNPKSNKDNDSSDLNNIQVNDDVQKENNTTETQPYVNTEIDETFQHALEYFRTTDPISRPYIPKQNTSKKFAKIITYINTLILPKYIDANTTFESQQTTIYSAAWTAAKLNGTKLSIPYHNKNQSPQVKSQKPNWQKRLERRILNLRKYIGKLTQIINGNNSRTLKSEVELILERYKVHTRHEEPNVQLTQFLDTLKQKLSVLSCRLKRYLTCTARKTENAQFKNNERKFYQNIRSQPTNLTNHTNNSNIHDITLPLKDELRKFWSNLWETPIKHNDKAQWIKEELHKHETTEPMEFQHIPIETFYTVLKQLHNWKAPGPDRIHNYWYKKFTHIHPYLYTHINNFIINPSSMPQYITKGITYMLPKDLNDTANPSKYRPITCLQTIYKIITACLTHTIYKHLEQNTILEEQQKGCKKHSQGCKEQLTIDTVILKQVQKMKSDLFTVYIDYKKAFDSVPHSWLIKILHIYKINPQIIHFLQHAISTWTTNLTLNLQNKTIETDEIKIKRGIFQGDTLSPLWFCLALNPLSTLLNSTNTGYTLQYKNSLTNKNESLNINHLFYMDDLKLFSSTEKALNGLIKLTEGFSQDIKMEFGIDKCKINAIKSGQNHQMHYQLQTGEIIDPLGENDTYKYLGYNQAKQILDKETKMKLKQQFNYRLNSIMKSQLNSKNIIKAINTFAIPILTYSFGILKWSKNDLKQLQRNINTTMTKNRKHHPRACVQRQTLPRNEGGRGIIDIQNMHNNQITNLRKYFYTKSNTSNLHTAIVQSDKKLTPLNLHDINTQSNEIQIDQHAKISEWTRKSLHGRHRQDLCRINVDKNASNAWLSRGEFFPETEGFMIAIQDQVIETRNYQKYIMKITNLSTDLCRRCNSVSESIQHITGACRAIAQTDYKYRHDQVANIVHQELALKYKLISDKIAYYKYTPDTVLENTTHKLYYDRAILTDRTVHYNRPDIAIVDKTQKTAFLIDIAIPNTHNLQSTINEKLTKYTELKEEIARMWHLQKVTIIPLILSTTGVIPKQMHTSLNALNLPNFLFVNMQKAVILNTCRIVRKFLATEGERELL

SEQ ID NO: 2475 - protein, 1424 aa, Vanessa atalanta
MMDKTNRYNLRSLPGGRRGASGAGAGCYSMRSTGDEALSRRALVAQQVTADHRELNRRASDVEVTAEPQEYSQNPPSNPSSSPKSSFSSIPSCTPSYINTFNQPNSSTNTSSRSHSPLLLVENVVQSTNVDDSAPVKTIKRARKKWTREMNMFILRTYYILTSLEKDTTSYLTDLHTKFLEQFPDMEVSRQRVGDQRRAIERNKLLALEYKNKARNEAKAYLHSLAVDISSANKVETLLHANHLTELSSHLPTQTHSTQGRTNQRMRWSNEINEEIIRLYYKITHMNTNRTSYRKILHQKFIEKFPHLEHISEQRVADQRRVIINNKLIPSIRLEELKQEVTNEIGITDIATTTTTMHTTCNEDSEDNQWKIINDLNRIQIDDHIQDKNNKEETPQYIDSEIDDTFQQALEYFKTTDPDCRPYIPKQNTSKKLAKTITYINTSILPKYIDANTTFKSEQTIIYSAAWTSAKINGTKLSLPFHNKTLPQARNQKPNWQKRLERRILKLRKYIGKVTQVINGNNNCALKLEVDSILERYKVHTQHEEHNVQLIQFLDTLKQKLSVFSCRLKRYLACTARKTENAQFKTNERKFYQNIRSQSTNLTNYTKNSTTHDTNLPPKDELRKFWINIWETPINHNHEANWIKEEIHRHETTEPMEFKQIPIETFNIVLKRLHNWKAPGPDRIHNYWYKKFTYIHPYLYTHINNFIANPSSMPQYIAKGITYMLPKDPNDTANPSKYRPITCLQTIYKIVTACLTHSIYNHLEKNAILEEQQKGCKKNSQGCKEQLTIDTVILKQVQKMKKDLYTVYIDYKKAFDSVPHSWLIKILHIYKIHPQIIHFLQHAISLWTTKLTISLQNKTIETDEIKIQRGIFQGDTLSPLWFCLALNPLSTILNSTCNGYTLQYTNSLTNNIELININHLLYMDDIKIFSSTEKGLENLIKLTENFSQDIKMELGIDKCKINSIKAGHNHLMHYQLQTGETINPLEENDTYKYLGYNQAKQILEKETKIKIKQQFNYRLNRILKTQLNSKNIIKAINTFAIPILIYSFGILKWSKNDLKQLQRNINTTMTKNRKHHPRACVQRQTLPRSEGGRGIIDIINMHNNQITNLRKYFYTKSNTSKLHTAIVETDKKLTPLNLQDKNTQSNEEQIDRNVKIIEWTRKSLHGRHRQDLCRSNVDINASNAWLSRGELFPETEGFMIAIQDQAIETRNYQKYIMRIPNLSTDLCRRCNSVSESIQHITGACRAIAQTDYKYRHDQVANIVHQELALKYKLISNKIAYYKYTPETVLENTTHKLYYDRAILTDRTVHYNRPDITIVDKVQKSAFLIDIAIPNTHNLQSTINEKLTKYTELKEEIARMWHLQKVTIVPIVLSTTGIIPKQMHISVKTLNLPNFLYVNMQKAVILNTCRIVRKFLATEGERELL

SEQ ID NO: 2476 - protein, 1420 aa, Nymphalis polychloros
MMKKSHRYNLRSLPGGRRGASGAGAGCYSIRSTGDEVLSRRALVVQHVTADHRELNRRASDVEVTAEPLENSHNPQSNPSSSPKSLFSSIPSTTPSYLNINNQPTFSTTIYSRNSSPLLQAENVVQSTNVDDSAPVHADKRTRKKWTRAMNMFILRTYHILTSFEKDTTSYLTDLHTKFIEQFPDMQVSKQRVGDQRRAIERNQLLTVEDKNRARVEAQAYLDNLAVDISRAKEVDTDVHASRTTRIPPHSTTQMHSTQNRTNKRMRWSNEINEKIIRLFYKVTHLDTNRTSYRKILHQKFIDKFPHLVHISEQRIADQRRVIVNNKLIPNSRLEELKQEVNNEIGITNKETYVNSGQNPKSNKDNDSSDLNNIQVNDDVQKENNTTETQPYVNTEIDETFQHALEYFRTTDPISRPYIPKQNTSKKFAKIITYINTLILPKYIDANTTFESQQTTIYSAAWTAAKLNGTKLSIPYHNKNQSPQVKSQKPNWQKRLERRILNLRKYIGKLTQIINGNNSRTLKSEVELILERYKVHTRHEEPNVQLTQFLDTLKQKLSVLSCRLKRYLTCTARKTENAQFKNNERKFYQNIRSQPTNLTNHTNNSNIHDITLPLKDELRKFWSNLWETPIKHNDKAQWIKEELHKHETTEPMEFQHIPIETFYTVLKRLHNWKAPGPDRIHNYWYKKFTHIHPYLYTHINNFIINPSSMPQYITKGITYMLPKDLNDTANPSKYRPITCLQTIYKIITACLTHTIYKHLEQNTILEEQQKGCKKHSQGCKEQLTIDTVILKQVQKMKSDLFTVYIDYKKAFDSVPHSWLIKILHIYKINPQIIHFLQHAISTWTTNLTLNLQNKTIETDEIKIKRGIFQGDTLSPLWFCLALNPLSTLLNSTNTGYTLQYKNSLTNKNESLNINHLFYMDDLKLFSSTEKALKGLIKLTEGFSQDIKMEFGIDKCKINAIKSGQNHQMHYQLQTGEIIDPLGENDTYKYLGYNQAKQILDKETKMKLKQQFNYRLNIIMKSQLNSKNIIKAINTFAIPILTYSFGILKWSKNDLKQLQRNINTTMTKNRKHHPRACVQRQTLPRNEGGRGIIDIQNMHNNQITNLRKYFYTKSNTSNLHTAIVQSDKKLTPLNLHDINTQSNEIQIDQHAKISEWTRKSLHGRHRQDLCRINVDKNASNAWLSRGEFFPETEGFMIAIQDQVIETRNYQKYIMKITNLSTDLCRRCNSVSESIQHITGACRAIAQTDYKYRHDQVANIVHQELALKYKLISDKIAYYKYTPNTVLENTTHKLYYDRAILTDRTVHYNRPDIAIVDKTQKTAFLIDIAIPNTHNLQSTINEKLTKYTELKEEIARMWHLQKVTIIPLILSTTGVIPKQMHTSLKALNLPNFLFVNMQKAVILNTCRIVRKFLATEGERELL

SEQ ID NO: 2477 - protein, 1123 aa, Vanessa atalanta
MRWSNEINEEIIRLYYKITHMNTNRTSYRKILHQKFIEKFPHLEHISEQRVADQRRVIINNKLIPSTRLEELKQEVTNEIGITDIATTTTTMHTTCNEDSEDNQWKIINDLNRIQIDDHIQDKNNKEETPQYIDSEIDDTFQQALEYFKTTDPDCRPYIPKQNTSKKLAKTITYINTSILPKYIDANTTFESEQTIIYSAAWTSAKINGTKLSLPFHNKTLPQARNQKPNWQKRLERRILKLRKYIGKVTQVINGNNNCALKLEVDSILERYKVHTQHEEHNVQLIQFLDTLKQKLSVFSCRLKRYLACTARKTENAQFKTNERKFYQNIRSQSTNLTNYTKNSTTHDTNLPPKDELRKFWINIWEAPINHNHEANWIKEEIHRHETTEPMEFKQIPIETFNIVLKRLHNWKAPGPDRIHNYWYKKFTYIHPYLYTHINNFIANPSSMPQYIAKGITYMLPKDPNDTANPSKYRPITCLQTIYKIVTACLTHSIYNHLEKNAILEEQQKGCKKNSQGCKEQLTIDTVILKQVQKMKKDLYTVYIDYKKAFDSVPHSWLIKILHIYKIHPQIIHFLQHAISLWTTKLTISLQNKTIETDEIKIQWGIFQGDTLSPLWFCLALNPLSTILNSTCNGYTLQYTNSLTNNIELININHLLYMDDIKIFSSTEKGLENSIKLTENFSQDIKMELGIDKCKINSIKAGHNHLMHYQLQTGETIDPLEENDTYKYLGYNQAKQILEKETKIKIKQQFNYRLNRILKTQLNSKNIIKAINTFAIPILIYSFGILKWSKNDLKQLQRNINTTMTKNRKHHPRACVQRQTLPRSEGGRGIIDIINMHNNQITNLRKYFYTKSNTSKLHTAIVETDKKLTPLNLQDKNTQSNEEQIDRNVKIIEWTRKSLHGRHRQDLCRSNVDINASNAWLSRGELFPETEGFMIAIQDQVIETRNYQKYIMRIPNLSTDLCRRCNSVSESIQHITGACRAIAQTDYKYRHDQVANIVHQELALKYKLISNKIAYYKYTPETVLENTTHKLYYDRAILTDRTVHYNRPDITIVDKVQKSAFLIDIAIPNTHNLQSTINEKLTKYTELKEEIARMWHLQKVTIVPIVLSTTGIIPKQMHISVNL

SEQ ID NO: 2478 - protein, 1418 aa, Idaea aversata
METRLKKKLRIGSLPGGDRRGALGADAECLSMQTVSGSGLSQRAPAGKPEEGYSRPSSSSPSSTKSLFPSISSSPPSYLNPIANPPSSISSSSITHPHTRSITENVAQSTFTVDNTAPVEVKRVRQRWSKEMNIFILHTYYILTSMEKDTISYLPDLHTKFCERFPDVAVSRQRIGDQRRAIERNKLLSLEEIARVRNDAEEYLNSLNTERSNLVIATISTGSQLTQNQTSLVSKTQRGQRMRWSSELNEEIMRAYYRITSIETNKTSYRKLLHQHFVDKFSHLAHISEQRVSDQRRIIINNRLINSDRLEEIRHEVASTLNLHNENIENSNNTTEDQIENTNFDSLFNIEAENLDNMQEQHSSAETEQESWPEIDSLFDEALNYFKNFEPIGRPFIPKQKTSKKLAKIVHYINTKILPKHIDADTLFEKQQLVIYVAAWTAAKSNGTKLTIPPRVYTLQQTKQIHKPNWQKRLERKIKDLRKYIGRLTQFINGNRNNISLLNDVNKILEQYKQHTLHEEPNTQLTEFLDTLKQKLSVYSSRLKRYLACTERKTQNAQFTNNEKKFYQNLRIQTSNTINLNTTDTQTPDPEELRSFWSNIWENPVSHNPETVWIEEEQRKHDTTEPMQFEHIPVETFHRVLKKIHNWKAPGPDNIHNYWYKKFSYIHPYLYHHINHFIQNPESMPAYITEGVTFMLPKDLNDTKNPAKYRPITCLQTIYKIITACLSESIYNHVERNSILQEQQKGSRKLSQGCKEQLTIDNVLLKHVQSHKKDLFTMYVDYKKAYDSVPHTWLLKVLEIYKINPYIIAFLKHSSTTWTTKLKLNLHNTNIQTDEIRIKRGIFQGDTLSPLWFCLALNPLSNILNSTDNGYSLKYVKNSPETTEPDLENYKLSHLLYMDDIKLYANTQTELNNLIELTEQFSLDIRMEFGIDKCKINAVKAGQNQMSHYELQCGEIIEPLQENQTYKYLGFNQAQQILDKETKFKLKQDFKHRVNSIMRTQLYSKNVVKAINTFAIPILTYSFGILKWTKTELKQLQRNVNTTMTKNRKHHPRACVQRQVLPRYEGGRGIIDIYNLHNSLITNLRQYFHNKSNTSDLHLSIVQNDRRFTPLNLNDTNTQKNEEQISQQIKINDWSRKALHGRHRHDLCHNHVDKAASNAWLTRGELFPETEGFMIAIQDQVIETRNYQKFIIKTPNLATDLCRRCNSSSETIQHITGACRAIVQTDYKHRHDQVANIIHQSLALKYNLIPSSTKLPYYKYTPESILENANYKLYFDRGILTDKTVHFNRPDLTLVDKLRKTALLIDIAVPNTHNLQSTITEKLTKYVELKEEIIRMWKLKAVSIVPIVLSTTGVIPKQLHQSIKTLHLPEYTFINLQKAVILNTCRIVRKFLQTELERESLPNTLNSIVVSNSRNHLA

SEQ ID NO: 2479 - protein, 1418 aa, Idaea aversata
METRLKKKLRIGSLPGGDRRGALGADAECLSMQTVSGSGLSQRAPAGKPEEGYSRPSSSSPSSTKSLFPSISSSPPSYLNPIVNPPSSISSSSITHPHTRSITENVAQSTFTVDNTAPVEVKRVRQRWSKEMNIFILHTYYILTSMEKDTISYLPDLHTKFCERFPDVAVSRQRIGDQRRAIERNKLLSLEEIARVRNDAEEYLNSLNTERSNLVIATISTGSQLTQNQTSLVSKTQTGQRMRWSSELNEEIMRAYYRITSIETNKTSYRKLLHQHFVDKFPHLAHISEQRVSDQRRIIINNRLINSDRLEEIRHEVASTLNLHNENIENSNNTTEDQIENTNFDSLFNIEAENLDNMQEQHSSAETEQESRPEIDSLFDEALNYFKNFEPIGRPFIPKQKTSKKLAKIVHYINTKILPKHIDADTLFEKQQLVIYVAAWTAAKSNGTKLNIPPRVYTLQQTKQIHKPNWQKRLERKIKDLRKYIGRLTQFINGNRNNISLLNEVNKILEQYKQHTLHEEPNTQLTEFLDTLKQKLSVYSSRLKRYLACTERKTQNAQFTNNEKKFYQNLRNQTSNTINLNTTDTQTPDPEELRSFWSNIWENPVSHNPETVWIEEEQRKHDTTEPMQFEHIPVETFHRVLKKIHNWKAPGPDNIHNYWYKKFSYIHPYLYHHINHFIQNPESMPAYITEGVTFMLPKDLNDTKNPAKYRPITCLQTIYKIITACLSESIYNHVERNSILQEQQKGSRKLSQGCKEQLTIDNVLLKHVQSHKKDLFTMYVDYKKAYDSVPHTWLLKVLEIYKINPYIIAFLKHSSTTWTTKLKLNLHNTNIQTDEIRIKRGIFQGDTLSPLWFCLALNPLSNILNSTDNGYSLKYVKNSPETTEPDLENYKLSHLLYMDDIKLYANNQTELNNLIELTEQFSLDIRMEFGIDKCKINAVKAGQNQMSHYELQCGEIIEPLQENQTYKYLGFNQAQQILDKETKFKLKQDFKHRVNSIMRTQLYSKNVVKAINTFAIPILTYSFGILKWTKTELKQLQRNVNTTMTKNRKHHPRACVQRQVLPRYEGGRGIIDIYNLHNSLITNLRQYFHNKSNTSDLHLSIVQNDRRFTPLNLNDTNTQKNEEQISQQIKINDWSRKALHGRHRHDLCHNHVDKAASNAWLTRGELFPETEGFMIAIQDQVIETRNYQKFIIKTPNLATDLCRRCNSSSETIQHITGACRAIVQTDYKHRHDQVANIIHQSLALKYNLIPSSTKLPYYKYTPESILENANYKLYFDRGILTDKTVHFNRPDLTLVDKLRKTALLIDIAVPNTHNLQSTITEKLTKYVELKEEIIRMWKLKAVSIVPIVLSTTGVIPKQLHQSIKTLDLPEYTFINLQKAVILNTCRIVRKFLQTELERESLPNTLNSIAVSNSRNHLA

SEQ ID NO: 2480 - protein, 1418 aa, Idaea aversata
METRLKKKLRIGSLPGGDRRGALGADAECLSMQTVSGSGLSQRAPAGKPEEGYSRPSSSSPSSTKSLFPSIPSSPPSYLNPIANPPSSISSSSITHPHTRSVTENVAQSTFTVDNTAPVEVKRVRQRWSKEMNIFILHTYYILTSMEKDTISYLPDLHTKFCERFPNVAVSRQRIGDQRRAIERNKLLSLEEIARVRNDAEEYLNSLHTERSNLVIATTSTGSQLTQNQTSLVSKTQIGQRMRWSSELNEEIMRAYYRITSIETNKTSYRKLLHQHFVDKFPHLAHVSEQRVSDQRRIIINNRLINSDRLEEIRHEVASTLNLLNENIENSNNTTEDQIENTNFNSLFNTEAENLDNLQEQHSSAEAEQESRPEIHSLFDEALNYFKNFEPIGRPFIPKQKTSKKLAKIVHYINTKILPKHIDADTLFEKQQLVIYVAAWTAAKSNGTKLTIPPRVYTLQQTKQIHKPNWQKRLERKIGDLRKYIGRLTQFINGNRNNSSLLNDVNKILEQYKQHTLHEEPNTQLTEFLDTLKQKLSVYSTRLKRYLACTERKTQNAQFTNNEKKFYQKLRNQTSNTNNLNTIDTQTPDPEELRSFWSNIWENPVSHNPETVWIEEEQRKHDTTEPMQFEYIPVETFHRILKKLHNWKAPGPDNIHNYWYKKFSYIHPFLYHHINHFIQNPESMPAYITEGVTYMLPKDLNDTKNPAKYRPITCLQTIYKIITACLSESIYNHVERNSILQEQQKGSRKLSQGCKEQLIIDNVLLKHVQSNKKDLFTMYVDYKKAYDSIPHTWLLKVLEIYKIHPHIIAFLKHSSTTWTTKLKLNLHKTNIQTDEIRIKRGIFQGDTLSPLWFCLALNPLSNILNSTDNGYSLKYVKNSPETTEPDLENYKLTHLLYMDDIKLYANTQTELNNLIELTEQFSLDIRMEFGIDKCKINAVKAGQNQMSHYELQSGEIIEPLQENQTYKYLGFNQAQQILDKETKFKLKQDFKHRVNSIMRTQLYSKNFVKAINIFAIPILTYSFGILKWTKTELKQLQRNVNTTMTKNRKHHPRACVQRQILPRHEGGRGIIDIYNLHNSQITNLRQYFHNKSNASDLHLSIAQNDRRFTPLNLNDTNTQKNEEQISQQIKINDWSRKVLHGRHRHDLCHNHVDKAASNAWLTRGELFPETEGFMIAIQDQVIETRNYQKFIIKTPSLTTDLCRRCNSSSETIQHITGACRAIVQTDYKHRHDQVANIIHQSLALKYNLIPSSTKLPYYKYTPESILENANYKLYFDRGILTDRTVHFNRPDLTLVDKIRKTALLIDIAVPNTHNLQNTITEKLTKYVELKEEIMRMWHLKSVSIVPIVLSTTGVIPKQLHQSIKTLDLPEYTFINLQKAVILNTCRIVRKFLQTELERESLPNTLNSIAASNIRNHLA

SEQ ID NO: 2481 - protein, 1418 aa, Idaea aversata
METRLKKKLRIGSLPGGDRRGALGADAECLSMQTVSGSGLSQRAPAGKPEEGYSRPSSSSPSSTKSLFPSIPSSPPSYLNPIANPPSSISSSSITHPHTRSVTENVAQSTFTVDNTAPVEVKRVRQRWSKEMNIFILHTYYILTSMEKDTISYLPDLHTKFCERFPNVAVSRQRIGDQRRAIERNKLLSLEEIARVRNDAEEYLNSLNTERSNLVIATTSTGSQLTQNQTSLVSKTQIGQRMRWSSELNEEIMRAYYRITSIETNKTSYRKLLHQHFVDKFPHLAHVSEQRVSDQRRIIINNRLINSDRLEEIRHEVASTLNLLNENIENSNNTTEDQIENTNFNSLFNTEAENLDNLQEQHSSAEAEQESRPEIHSLFDEALNYFKNFEPIGRPFIPKQETSKKLAKIVHYINTKILPKHIDADTLFEKQQLVIYVAAWTAAKSNGTKLTIPPRVYTLQQTKQIHKPNWQKRLERKIRDLRKYIGRLTQFINGNRNNSSLLNDVNKILEQYKQHTLHEEPNTQLTEFLDTLKQKLSVYSTRLKRYLACTERKTQNAQFTNNEKKFYQKLRNQTSNTNNLNTIDTQTPDPEELRSFWSNIWENPVSHNPETVWIEEEQRKHDTTEPMQFEYIPVETFHRILKKIHNWKAPGPDNIHNYWYKKFSYIHPFLYHHINHFIQNPESMPAYITEGVTYMLPKDLNDTKNPAKYRPITCLQTIYKIITACLSESIYNHVERNSILQEQQKGSRKLSQGCKEQLIIDNVLLKHVQSNKKDLFTMYVDYKKAYDSIPHTWLLKVLEIYKIHPHIIAFLKHSSTTWTTKLKLNLHKTNIQTDEIRIKRGIFQGDTLSPLWFCLALNPLSNILNSTDNGYSLKYVKNSPETTEPDLENYKLTHLLYMDDIKLYANTQTELNNLIELTEQFSLDIRMEFGIDKCKINAVKAGQNQMSHYELQSGEIIEPLQENQTYKYLGFNQAQQILDKETKFKLKQDFKHRVNSIMRTQLYSKNFVKAINIFAIPILTYSFGILKWTKTELKQLQRNVNTTMTKNRKHHPRACVQRQILPRHEGGRGIIDIYNLHNSQITNLRQYFHNKSNASDLHLSIAQNDRRFTPLNLNDTNTKKNEEQISQQIKINDWSRKVLHGRHRHDLCHNHVDKAASNAWLTRGELFPETEGFMIAIQDQVIETRNYQKFIIKTPSLTTDLCRRCNSSSETIQHITGACRAIVQTDYKHRHDQVANIIHQSLALKYNLIPSSTKLPYYKYTPESILENANYKLYFDRGILTDRTVHFNRPDLTLVDKIRKTTLLIDIAVPNTHNLQSTITEKLTKYVELKEEIMRMWHLKSVSIVPIVLSTTGVIPKQLHQSIKTLDLPEYTFINLQKAVILNTCRIVRKFLQTELERESLPNTLNSIAASNIQNHLA

SEQ ID NO: 2482 - protein, 1418 aa, Idaea aversata
METRLKKKLRIGSLPGGDRRGALGADAECLSMQTVSGSGLSQRAPAGKPEEGYSRPSSSSPSSTKSLFPSIPSSPPSYLNPIANPPSSISSSSITHPHTRSVTENVAQSTFTVDNTAPVEVKRVRQRWSKEMNIFILHTYYILTSMEKDTISYLPDLHTKFCERFPNVAVSRQRIGDQRRAIKRNKLLSLEEIARVRNDAEEYLNSLNTERSNLVIATTSTGSQLTQNQTSLVSKTQIGQKMRWSSELNEEIMRAYYRITSIETNKTSYRKLLHQHFVDKFPHLAHVSEQRVSDQRRIIINNRLINSDRLEEIRHEVASTLNLLNENIENSNNTTEDQIENTNFNSLFNTEAENLDNLQEQHSSAEAEQESRPEIHSLFDEALNYFKNFEPIGRPFIPKQKTSKKLAKIVHYINTKIQPKHIDADTLFEKQQLVIYVAAWTAAKSNGTKLTIPPRVYTLQQTKQIHKPNWQKRLERKIRDLRKYIGRLTQFINGNRNNSSLLNDLNKILEQYKQHTLHEEPNTQLTEFLDTLKQKLSVYSTRLKRYLACTERKTQNAQFTNNEKKFYQKLRNQTSNTNNLNTIDTQTPDPEELRSFWSNIWENPVSHNPETVWIEEEQRKHDTTEPMQFEYIPVETFHRILKKLHNWKAPGPDNIHNYWYKKFSYIHPFLYHHINHFIQNPESMPAYITEGVTYMLPKDLNDTKNPAKYRPITCLQTIYKIITACFSESIYNHVERNSILQEQQKGSRKLSQGCKEQLIIDNVLLKHVQSNKKDLFTMYVDYKKAYDSIPHTWLLKVLEIYKIHPHIIAFLKHSSTTWTTKLKLNLHKTNIQTDEIRIKRGIFQGDTLSPLWFCLALNPLSNILNSTDNGYSLKYVKNSPETTEPDLENYKLTHLLYMDDIKLYANTQTELNNLIELTEQFSLDIRMEFGIDKCKINAVKAGQNQMSHYELQSGEIIEPLQENQTYKYLGFNQAQQILDKETKFKLKQDFKHRVNSIMRTQLYSKNFVKAINIFAIPILTYSFGILKWTKTELKQLQRNVNTTMTKNRKHHPRACVQRQILPRHEGGRGIIDIYNLHNSQITNLRQYFHNKSNASDLHLSIAQNDRRFTPLNLNDTNTQKNEEQISQQIKINDWSRKVLHGRHRHDLCHNHVDKAASNAWLTRGELFPETEGFMIAIQDQVIETRNYQKFIIKTPSLTTDLCRRCNSSSETIQHITGACRAIVQTDYKHRHDQVANIIHQSLALKYNLIPSSTKLPYYKYTPESILENANYKLYFDRGILTDRTVHFNRPDLTLVDKIRKTTLLIDIAVPNTHNLQSTITEKLTKYVELKEEIMRIWHLKSVSIVPIVLSTTGVIPKQLHQSIKTLDLPEYTFINLQKAVILNTCRIVRKFLQTELERESLPNTLNSIAASNIQNHLA

SEQ ID NO: 2483 - protein, 1375 aa, Idaea aversata
METRLKKKLRIGSLPGGDRRGALGADAECLSMQTVSGSGLSQRAPAGKPEEGYSRPSSSSPSSTKSLFPSIPSSPPSYLNPIANPPSSISSSSITHPHTRSVTENVAQSTFTVDNTAPVEVKRVRQRWSKEMNIFILHTYYILTSMEKDTISYLPDLHTKFCERFPNVAVSRQRIGDQRRAIERNKLLSLEEIARVRNDAEEYLNSLNTERSNLVIATTSTGSQLTQNQTSLVSKTQIGQRMRWSSELNEEIMRAYYRITSIETNKTSYRKLLHQHFVDKFPHLAHVSEQRVSDQRRIIINNRLINSDRLEEIRHELASTLNLLNENIENSNNTTEGQIENTNFNSLFNTEAENLDNLQEQHSSAEAEQESRPEIHSLFDEAINYFKNFEPIGRPFIPKQKTSKKLAKIVHYINTKILPKHIDADTLFEKQQLVIYVAAWTAAKSNGTKLTIPPRVYTLQQTKQIHKPNWQKRLERKIRDLRKYIGRLTQFINGNRNNSSLLNDVNKILEQYKQHTLHEEPNTQLTEFLDTLKQKLSVYSTRLKRYLACTERKTQNAQFTNNEKKFYQKLRNQTSNTTNLNTIDTQTPDPEELRSFWSNIWENPVSHNPETVWIEEEQRKHDTTEPMQFEYIPVETFHRILKKLHNWKAPGPDNIHNYWYKKFSYIHPFLYHHINHFIQNPESMPAYITEGVTYMLPKDLNDTKNPAKYRPITCLQTIYKIITACLSESIYNHVERNSILQEQQKGSRKLSQGCKEQLIIDNVLLKHVQSNKKDLFTMYVDYKKAYDSIPHTWLLKVLEIYKIHPHIIAFLKHSSTTWTTKLKLNLHKTNIQTDEIRIKRGIFQGDTLSPLWFCLALNPLSNILNSTDNGYSLKYVKNSPETTEPDLENYKLTHLLYMDDIKLYANTQTELNNLIELTEQFSLDIRMEFGIDKCKINAVKAGQNQMSHYELQSGEIIEPLQENQTYKYLGFNQAQQILDKETKFKLKQDFKHRVNSIMRTQLYSKNFVKAINIFAIPILTYSFGILKWTKTELKQLQRNVNTTMTKNRKHHPRACVQRQILPRHEGGRGIIDINNLHNSQITNLRQYFHNKSNASDLHLSIAQNDRRFTPLNLNDTNTQKNEEQISQQIKINDWSRKVLHGRHRHDLCHNHVDKAASNAWLTRGELFPETEGFMIAMQDQVIETRNYQKFIIKTPNLTTDLCRRCNSSSETIQHITGACRAIVQTDYKHRHDQVANIIHQSLALKYNLIPSSTKLPYYKYTPESILENANYKLYFDRGILTDRTVHFNRPDLTLVDKIRKTALLIDIAVPNTHNLQSTITEKLTKYVELKEEIMRMWHLKSVSIVPIVLSTTGVIPKQLHQSIKTLDLPEYTLKK

SEQ ID NO: 2484 - protein, 1419 aa, Idaea aversata
METRLKKKLRIGSLPGGDRRGALGADAECLSMQTVSGSGLSQRAPAGKPEEGYSRPSSSSSPSSTKSLFPSIPSSPPSYLNPIANPPSSISSSSITHPHTRSVTENVAQSTFTVDNTAPVEVKRVRQRWSKEMNIFILHTYYILTSMEKDTISYLPDLHAKFCERFPNVAVSRQRIGDQRRAIERNKLLSLEEIARVRNDAEEYLNSLNTERSNLVIATTSTGSQLTQNQTSLVSKTQIGQRMRWSSELNEEIMRAYYRITSIETNKTSYRKLLHQHFVDKFPHLAHVSEQRVSDQRRIIINNRLINSDRLEEIRHEVASTLNLLNENIENSNNTTEDQIENTNFNSLFNTEAENLDNLQEQHSSAEAEQESRPEIHSLFDEALNYFKNFEPIGRPFIPKQKTSKKLAKIVHYINTKILPKHIDADTLFEKQQLVIYVAAWTAAKSNGTKLTIPPRVYTLQQTKQIHKPNWQKRLERKIRDLRKYIGRLTQFINGNRNNSSLLNDVNKILEQYKQHTLHEEPNTQLTEFLDTLKQKLSVYSTRLKRYLACTERKTQNAQFTNNEKKFYQKLRNQTSNTNNLNTIDTQTPDPEELRSFWSNIWENPVSHNPETVWIEEEQRKHDTTEPMQFEYIPVETFHRILKKLHNWKAPGPDNIHNYWYKKFSYIHPFLYHHINHFIQNPESMPAYITEGVTYMLPKDLNDTKNPAKYRPITCLQTIYKIITACLSESIYNHVERNSILQEQQKGSRKLSQGCKEQLIIDNVLLKHVQSNKKDLFTMYVDYKKAYDSIPHTWLLKVLEIYKIHPHIIAFLKHSSTTWTTKLKLNLHKTNIQTDEIRIKRGIFQGDTLSPLWFCLALNPLSNILNSTDNGYSLKYVKNSPETTEPDLENYKLTHLLYMDDIKLYANTQTELNNLIELTEQFSLDIRMEFGIDKCKINAVKAGQNQMSHYELQSGEIIEPLQENQTSKYLGFNQAQQILDKETKFKLKQDFKHRVNSIMRSQLYSKNFVKAINIFAIPILTYSFGILKWTKTELKQLQRNVNTTMTKNRKHHPRACVQRQILPRHEGGRGIIDIYNLHNSQITNLRQYFHNKSNASDLHLSIAQNDRRFTPLNLNDTNTQKNEEQISQQIKINDWSRKVLHGRHRHDLCHNHVDKAASNAWLTRGELFPETEGFMIAIQDQVIETRNYQKFIIKTPSLTTDLCRRCNSSSETIQHITGACRAIVQTDYKHRHDQVANIIHQSLALKYNLIPSSTKLPYYKYTPESILENANYKLYFDRGILTDRTVHFNRPDLTLVDKIRKTTLLIDIAVPNTHNLQSTITEKLTKYVELKEEIKRMWHLKSVSIVPIVLSTTGVIPKQLHQSIKTLDLPEYTFINLQKAVILNTCRIVRKFLQTELERKSLPNTLNSIAASNIQNHLA

SEQ ID NO: 2485 - protein, 1418 aa, Idaea aversata
METRLKKKLRIGSLPGGDRRGALGADAECLSMQTVSGSGLSQRAPAGKPEEGYSRPSSSSPSSTKSLFPSISSSPPSYLNPIANPPSSISSSSITHPHTRSITENVAQSTFTVDNTAPVEVKRVRQRWSKEMNIFILHTYYILTSMEKDTISYLPDLHTKFCERFPDVAVSRQRIGDQRRAIERNKLLSLEEIARVRNDAEEYLNSLNTERSNLVIATISTGSQLTQNQTSLVSKTQRGQRMRWSSELNEEIMRAYYRITSIETNKTSYRKLLHQHFVDKFSHLAHISEQRVSDQRRIIINNRLINSDRLEEIRHEVASTLNLHNENIENSNNTTEDQIENTNFDSLFNIEAENLDNMQEQHSSAETEQESWPEIDSLFDEALNYFKNFEPIGRPFIPKQKTSKKLAKIVHYINTKILPKHIDADTLFEKQQLVIYVAAWTAAKSNGTKLTIPPRVYTLQQTKQIHKPNWQKRLERKIKDLRKYIGRLTQFINGNRNNISLLNDVNKILEQYKQHTLHEEPNTQLTEFLDTLKQKLSVYSSRLKRYLACTERKTQNAQFTNNEKKFYQNLRIQTSNTINLNTTDTQTPDPEELRSFWSNIWENPVSHNPETVWIEEEQRKHDTTEPMQFEHIPVETFHRVLKKIHNWKAPGPDNIHNYWYKKFSYIHPYLYHHINHFIQNPESMPAYITEGVTFMLPKDLNDTKNPAKYRPITCLQTIYKIITACLSESIYNHVERNSILQEQQKGSRKLSQGCKEQLTIDNVLLKHVQSHKKDLFTMYVDYKKAYDSVPHTWLLKVLEIYKINPYIIAFLKHSSTTWTTKLKLNLHNTNIQTDEIRIKRGIFQGDTLSPLWFCLALNPLSNILNSTDNGYSLKYVKNSPETTEPDLENYKLSHLLYMDDIKLYANTQTELNNLIELTEQFSLDIRMEFGIDKCKINAVKAGQNQMSHYELQCGEIIEPLQENQTYKYLGFNQAQQILDKETKFKLKQDFKHRVNSIMRTQLYSKNVVKAINTFAIPILTYSFGILKWTKTELKQLQRNVNTTMTKNRKHHPRACVQRQVLPRYEGGRGIIDIYNLHNSLITNLRQYFHNKSNTSDLHLSIVQNDRRFTPLNLNDTNTQKNEEQISQQIKINDWSRKALHGRHRHDLWHNHVDKAASNAWLTRGELFPETEGFMIAIQDQVIETRNYQKFIIKTPNLATDLCRRCNSSSETIQHITGACRAIVQTDYKHRHDQVANIIHQSLALKYNLIPSSTKLPYYKYTPESILENANYKLYFDRGILTDKTVHFNRPDLTLVDKLRKTALLIDIAVPNTHNLQSTITEKLTKYVELKEEIIRMWKLKAVSIVPIVLSTTGVIPKQLHQSIKTLDLPEYTFINLQKAVILNTCRIVRKFLQTELERESLPNTLNSIVVSNSRNHLA

SEQ ID NO: 2486 - protein, 1410 aa, Thyatira batis
MENKVNNVYNLRSLPGGRRGTPRVDAGCHSRAIIDDAGTCRLDPVDKQCYNRRAASVTEESEEVRSNTASPTSSVSLFSSIPSSPQYFVDHLIHSPISSFSSLNSLTEDVVQTAHADKSAPTEVQKCARKKWSTEMNMFILRTYFTLTNLETDTRSYLTDLHITFINKFPNMQVSKQRIGDQRRAIIRKNLLTHDQIQQIRSEVTTALNNNNQSQYISQQTTTQTTGRIRWTTEHNETIIRSYYRITLFDTDKTAYRKQLHQDFISRFPHLGHISEQRVSDQRRLIIANKYIRENRLNEIKQEVSDELRMRDHQTDRPNTNAAQILDTVEQEQSINNIDIIDPIDIEIENYTHQPTIIINDSQDSEYNRQVHIDEIFQNALDYFKNTDPIQRPYIPKQKTSKKLAMTVQYVNNFCLKENINNETDYLTLQTTLYCAAWTVSKVNGTRLEIPQVTNNKQKGAKRKPRWQRRLENRVKELRKHIGRLTHYINGSRSSKLNKHIEKIQQKFITHTSHEEPNAKLVEFLDTLKQKLTVTCSRLTRYNECTARKDQNFQFNSNEKRFYQDLRNSRSNQTNSTSDNIPNTPQPEELRQFWSNIWEQQAIHNTNAKWIEQEKYNSTHIPPMQFESISVDVFHNVLKQLHNWKAPGPDHIHNYWYKKFNHVHPFLFNHVNHFIQNPNIMPHYITEGITYMVPKDKNDTANPAKYRPITCLQTIYKIITACLSHTIYNHLENNNILQEQQKGCRKNSQGCKEQLTIDSVILKQVKQKKKDLYSMYIDYKKAYDSVPHSWLIQVLNIYKIHPQISAFLEHAMTKWTTRLILRTTGNTIETSEIRIKCGIFQGDTLSPLWFCLALNPLSNILNSTDIGYSFSDTEQHLPTDAEGLINYHQNPKLNHLLYMDDIKLYASTHDDLQKLAELTEQFSLDIKMQFGIDKCKINAVKAGQSFQQEYRLQAGDLIGSLQEDETYKYLGYNQAQQILEKETKIKLTQQFKHRLNSILKTQLNSKNTVKAINAFAIPILTYSFGILKWNKHDLKNLQRSVNTTMTKNRKHHPRACVQRQTLPRCEGGRGIIDIQNLHNTQIINLRRYFHYKSTVSCLHAAIELNDKKLTPLNLHDKTTQKNEELISKHTKIVEWTRKSLHGRHYQDLSQPNVDMTASNAWLSRGELFPETEGFIIAIQDQIIETRNYQKYIIKIPNLPTDLCRRCNSSSETIQHITGACKTIVQTDYKHRHDQVANIIHQKLAIKHKLINPTKNVPYYKYTPEIVLENSTHKLYYDRAILTDKTVHYNRPDIILVNKTLKTALIIDIAIPNTHNLQSTINEKLSKYVDLKDEITRLWKLQNVLIAPVVLSTTGVIPKQLHQSIETLQLPRNTFMTLQKAAILNTCRIVRKFFLTHTPSNSTIVLPPTNP

SEQ ID NO: 2487 - protein, 1397 aa, Thyatira batis
MENKVNNVYNLRSLPGGRRGTPRVDAGCHSRAIIDDAGTCRLDPVDKQCYNRRATSVTEESEEVRSNTASPTSSVSLFSSIPSSPQHFVDRLIDSPISSFSSLNSLTEDVVQTANADKSAPAEVKKCARKKWSTEMNMFILRTYFTLTNLETDTRSYLTDLHSTFINKFPNMQVSKQRIGDQRRAIIRKNLLTHDQIQQIRSEVTTALNNSNQSQPISQPTTTQTTGRMRWTTEHNETIIRSYYRITLFDTDKTAYRKQLHQEFISRFPHLGHISEQRVSDQRRLIIANKYIQEDRLSEIKQEVSDELRMRDHQTDRPIINAAQILDTVEQEQSINNIDIIDSIDIEIENYTHQPTIIINDSQDRENNRQVHIDEVFQNALDYFKNTDPIQRPYIPKQKTSKKLAMTVQYVNDFCLKENINNETDFSTLQTTLYCAAWTVAKVNGTRLEIPHVTNNKQKGTKRKPRWQRRLENRVKELRKHIGRLTHYINGSRSSTLNKHIETIQQKFITHTSHEEPNAKLVEFLDTLKQKLTVTCSRLTRYNACTARKDQNFQFNSNEKRFYQDLRNSRSNQTNSSSDNIPNTPQPEELRQFWSNIWEQQAIHNANAKWIEQEQNNSIHIPPMQVESISVDVFHNVLKQLHNWKAPGPDHIHNYWYKKFNHVHPFLFNHVNHFIQNPNILPHYITEGITYMVPKDKNDTANPAKYRPITCLQTIYKIITACLSHTIYNHLENNNILQEQQKGCRKNSQGCKEQLTIDSVILKQVKQKKKDLYSMYIDYKKAYDSVPHSWLIQVLNIYKIHPQISAFLEHAMTIWTTRLILRTADNTIETGKIRIRCGIFQGDTLSPLWFCLALNPLSNILNSTDIGYSFSDTEQHLPTDAERLINYPQNPKLNHLLYMDDIKLYASTHDDLQKLAELTEQFSLDIKMQFGIDKCKINAVKAGQNFQQEYRLQAGDLIGSLQEDETYKYLGYNQAQQILEKETKIKLTQQFKHRLNSILKTQLNSKNTVKAINAFAIPILTYSFGILKWNKHDLKNLQRSVNTTMTKNRKHHPRACVQRQTLPRCEGGRGIIDIHNLHNTQIINLRRYFHYKSTVSYLHAAIELNDKKLTPLNLHDKTTQKNEELISKQTKIVEWTRKSLHGRHYQDLSQPNVDKIASNAWLSRGELFPETEGFIIAIQDQIIETRNYQKYIIKIPNLPTDLCRRCNSSSETIQHITGACKTIVQTDYKHRHDQVVNIIHQKLAIKHKLINPTKNVPYYKYTPEIVLENSTHKLYYDRAILTDKTVHYNRPDIILVNKTLKTALIIDIAIPNTHNLQCTINEKLSKYVDLKDEITRLWKLQNVLIAPVVLSTTGVIPKQLHQSIETLQLPHNTFLTLQKAAILNTCRIVRKFFLTHT

SEQ ID NO: 2488 - protein, 1402 aa, Thyatira batis
MENKVNNVYNLRSLPGGRRGTPRVDAGCHSRAIIDDAGTCRLDPVDKQCYNRRAASVTEESEEVRSNTASPTSSVSLFSSIPSSPQYFVDRLIHSPISSFSSLNSLTEDVVQTANADKSAPTEVKKCARKKWSTEMNMFILRTYFTLTNLETDTRSYLTDLHITFINKFPNMQVSKQRIGDQRRAIIRKNLLTHDQIQQIRSEVTTALNNSNQSQPISQTTTTQTTGRMRWTTEHNETIIRSYYRITLFDTDKTAYRKQLHQEFISRFPHLGHISEQRVSDQRRLIIANKYIQEDRLNEIKQEVSDELRMRDHQTDRPIINAAQILDTVEQEQSINNIEIIDSIDIEIENYTHQPTIIINDSQDRENNRQVHIDEVFQNALDYFKNTDPIQRPYIPKQKTSKKLAMTVQYVNDFCLKENINNETDFSTLQTTLYCAAWTVAKVNGTRLEIPHVTNNKQKDTKRKPRWQRRLENRVKELRKHIGRLTHYINGSRSSTLNKHIEKIQQKFITHTSHEEPNAKLVEFLDTLKQKLTVTCSRLTRYNACTARKDQNFQFNTNEKRFYQDLRNSRSNQTNSSSDNIPNTPQPEELRQFWSNIWEQQAIHNANAKWIEQEQNNSIHIPPMQFESISVDVFHNVLKQLHNWKAPGPDHIHNYWYKKFNNVHPFLFKHVNHFIQNPNILPHYITEGITYMVPKDKNDTANPAKYRPITCLQTIYKIITACLSHTIYNHLENNNILQEQQKGCRKNSQGCKEQLTIDSVILKQVKQKKKDLYSMYIDYKKAYDSVPHSWLIQVLNIYKIHPQISAFLEHAMTIWKTRLILRTADNTIETGTIRIRCGIFQGDTLSPLWFCLALNPLSNILNSTDIGYSFSDTEQHLPTDAEGLINYPQNPKLNHLLYMDDIKLYASTHDDLQKLAKLTEQFSLDIKMQFGIDKCKINAVKAGQNFQQEYRLQAGDLIGSLQEDETYKYLGYNQAQQILEKETKIKLTQQFKHRLNSILKTQLNSKNTVKAINAFAIPILTYSFGILKWNKHDLKNLQRSVNTTMTKNRKHHPRACVQRQTLPRCEGGRGIIDIQNLHNTQIINLRRYFHYKSTVSCLHAAIELNDKKLTPLKLHDKTTQKNEELISKHTKIVEWTRKSLHGRHYQDLSQPNVDMTASNAWLSRGELFPETEGFIIAIQDQIIETRNYQKYIIKIPNLPTDLCRRCNSSSETIQHITGACKTIVQTDYKHRHDQVANIIHQKLAIKHKLINPTKNVPYYKYTPETVLENSTHKLYYDRAILTDKTVHYNRPDIILVNKTLKTALIIDIAIPNTHNLQSTINEKLSKYVDLKDEITRMWKLQNVLIAPVVLSTTGVIPKQLHQSIETLQLPRNTYMTLQKAAILNTCRIVRKFFLTHTQSTAQ

SEQ ID NO: 2489 - protein, 1402 aa, Thyatira batis
MENKVNNVYNLRSLPGGRRGTPRVDAGCHSRAIIDDAGTCRLDPVDKQCYNRRAASVTEESEEVRSNTASPTSSVSLFSSIPSSPQYFVDRLIHSPISSFSSLNSLTEDVVQTANADKSAPTEVKKCARKKWSTEMNMFILRTYFTLTNLETDTRSYLTDLHITFINKFPNMQVSKQRIGDQRRAIIRKNLLTHDQIQQIRSEVTTALNNSNQSQPISQTTTTQTTGRMRWTTEHNETIIRSYYRITLFDTDKTAYRKQLHQEFISRFPHLGHISEQRVSDQRRLIIANKYIQEDRLNEIKQEVSDELRMRDHQTDRPIINAAQILDTVEQEQSINNIEIIDSIDIEIENYTHQPTIIINDSQDRENNRQVHIDEVFQNALDYFKNTDPIQRPYIPKQKTSKKLAMTVQYVNDFCLKENINNETDFSTLQTTLYCAAWTVAKVNGTRLEIPHVTNNKQKDTKRKPRWQRRLENRVKELRKHIGRLTHYINGSRSSTLNKHIEKIQQKFITHTSHEEPNAKLVEFLDTLKQKLTVTCSRLTRYNACTARKDQNFQFNTNEKRFYQDLRNSRSNQTNSSSDNIPNTPQPEELRQFWSNIWEQQAIHNANAKWIEQEQNNSIHIPPMQFESISVDVFHNVLKQLHNWKAPGPDHIHNYWYKKFNNVHPFLFKHVNHFIQNPNILPHYITEGITYMVPKDKNDTANPAKYRPITCLQTIYKIITACLSHTIYNHLENNNILQEQQKGCRKNSQGCKEQLTIDSVILKQVKQKKKDLYSMYIDYKKAYDSVPHSWLIQVLNIYKIHPQISAFLEHAMTIWKTRLILRTADNTIETGTIRIRCGIFQGDTLSPLWFCLALNPLSNILNSTDIGYSFSDTEQHLPTDAEGLINYPQNPKLNHLLYMDDIKLYASTHDDLQKLAKLTEQFSLDIKMQFGIDKCKINAVKAGQNFQQEYRLQAGDLIGSLQEDETYKYLGYNQAQQILEKETKIKLTQQFKHRLNSILKTQLNSKNTVKAINAFAIPILTYSFGILKWNKHDLKNLQRSVNTTMTKNRKHHPRACVQRQTLPRCEGGRGIIDIQNLHNTQIINLRRYFHYKSTVSCLHAAIELNDKKLTPLNLHDKTTQKNEELISKHTKIVEWTRKSLHGRHYQDLSQPNVDMTASNAWLSRGELFPETEGFIIAIQDQIIETRNYQKYIIKIPNLPTDLCRRCNSSSETIQHITGACKTIVQTDYKHRHDQVANIIHQKLAIKHKLINPTKNVPYYKYTPETVLENSTHKLYYDRAILTDKTVHYNRPDIILVNKTLKTALIIDIAIPNTHNLQSTINEKLSKYVDLKDEITHMWKLQNVLIAPVVLSTTGVIPKQLHQSIETLQLPRNTYMTLQKAAILNTCRIVRKFFLTHTQSTAQ

SEQ ID NO: 2490 - protein, 1410 aa, Thyatira batis
MENKVNNVYNLRSLPGGRRGTPRVDAGCHSRAIIDDAGTCRLDPVDKQCYNRRAASVTEESEEVRSNTASPTSSVSLFSSIPSSPQYFVDHLIHSPISSFSSLNSLTEDVVQTAHADKSAPTEVQKCARKKWSTEMNMFILRTYFTLTNLETDTRSYLTDLHITFINKFPNMQVSKQRIGDQRRAIIRKNLLTHDQIQQIRSEVTTALNNNNQSQYISQQTTTQTTGRMRWTTEHNETIIRSYYRITLFDTDKTAYRKQLHQDFISRFPHLGHISEQRVSDQRRLIIANKYIRENRLNEIKQEVSDELRMRDHQTDRPNINAAQILDTVEQEQSINNIDIIDPIDIEIENYTHQPTIIINDSQDSEYNRQVHIDEIFQNALDYFKNTDPIQRPYIPKQKTSKKLAMTVQYVNNFCLKENINNETDYLTLQTTLYCAAWTVSKVNGTRLEIPQVTNNKQKGAKRKPRWQRRLENRVKELRKHIGRLTHYINGSRSSKLNKHIEKIQQKFITHTSHEEPNAKLVEFLDTLKQKLTVTCSRLTRYNECTARKDQNFQFNSNEKRFYQDLRNSRSNQTNSTSDNIPNTPQPEELRQFWSNIWEQQAIHNTNAKWIEQEKYNSTHIPPMQFESISVDVFHNVLKQLHNWKAPGPDHIHNYWYKKFNHVHPFLFNHVNHFIQNPNIMPHYITEGITYMVPKDKNDTANPAKYRPITCLQTIYKIITACLSHTIYNHLENNNILQEQQKGCRKNSQGCKEQLTIDSVILKQVKQKKKDLYSMYIDYKKAYDSVPHSWLIQVLNIYKIHPQISAFLEHAMTKWTTRLILRTTGNTIETSEIRIKCGIFQGDTLSPLWFCLALNPLSNILNSTDIGYSFSDTEQHLPTDAEGLINYHQNPKLNHLLYMDDIKLYASTHDDLQKLAELTEQFSLDIKMQFGIDKCKINAVKAGQNFQQEYRLQAGDLIGSLQEDETYKYLGYNQAQQILEKETKIKLTQQFKHRLNSILKTQLNSKNTVKAINAFAIPILTYSFGILKWNKHDLKNLQRSVNTTMTKNRKHHPRACVQRQTLPRCEGGRGIIDIQNLHNTQIINLRRYFHYKSTVSCLHAAIELNDKKLTPLNLHDKTTQKNEELISKHTKIVEWTRKSLHGRHYQDLSQPNVDMTASNAWLSRGELFPETEGFIIAIQDQIIETRNYQKYIIKIPNLPTDLCRRCNSSSETIQHITGACKTIVQTDYKHRHDQVANIIHQKLAIKHKLINPTKNVPYYKYTPEIVLENSTHKLYYDRAILTDKTVHYNRPDIILVNKTLKTALIIDIAIPNTHNLQSTINEKLSKYVDLKDEITRLWKLQNVLIAPVVLSTTGVIPKQLHQSIETLQLPRNTFMTLQKAAILNTCRIVRKFFLTHTPSNSTIVLPTTNP

SEQ ID NO: 2491 - protein, 1410 aa, Thyatira batis
MENKVNNVYNLRSLPGGRRGTPRVDAGCHSRAIIDDAGTCRLDPVDKQCYNRRAASVTEESEEVRSNTASPTSSVSLFSSIPSSPQYFVDHLIHSPISSFSSLNSLTEDVVQTAHADKSAPTEVQKCARKKWSTEMNMFILRTYFTLTNLETDTRSYLTDLHITFINKFPNMQVSKQRIGDQRRAIIRKNLLTHDQIQQIRSEVTTALNNNNQSQYISQQTTTQTTGRIRWTTEHNETIIRSYYRITLFDTDKTAYRKQLHQDFISRFPHLGHISEQRVSDQRRLIIANKYIRENRLNEIKQEVSDELRMRDHQTDRPNINAAQILDTVEQEQSINNIDIIDPIDIEIENYTHQPTIIINDSQDSEYNRQVHIDEIFQNALDYFKNTDPIQRPYIPKQKTSKKLAMTVQYVNNFCLKENINNETDYLTLQTTLYCAAWTVSKVNGTRLEIPQVTNNKQKGAKRKPRWQRRLENRVKELRKHIGRLTHYINGSRSSKLNKHIEKIQQKFITHTSHEEPNAKLVEFLDTLKQKLTVTCSRLTRYNECTARKDQNFQFNSNEKRFYQDLRNSRSNQTNSTSDNIPNTPQPEELRQFWSNIWEQQAIHNTNAKWIEQEKYNSTHIPPMQFESISVDVFHNVLKQLHNWKAPGPDHIHNYWYKKFNHVHPFLFNHVNHFIQNPNIMPHYITEGITYMVPKDKNDTANPAKYRPITCLQTIYKIITACLSHTIYNHLENNNILQEQQKGCRKNSQGCKEQLTIDSVILKQVKQKKKDLYSMYIDYKKAYDSVPHSWLIQVLNIYKIHPQISAFLEHAMTKWTTRLILRTTGNTIETSEIRIKCGIFQGDTLSPLWFCLALNPLSNILNSTDIGYSFSDTEQHLPTDAEGLINYHQNPKLNHLLYMDDIKLYASTHDDLQKLAELTEQFSLDIKMQFGIDKCKINAVKAGQSFQQEYRLQAGDLIGSLQEDETYKYLGYNQAQQILEKETKIKLTQQFKHRLNSILKTQLNSKNTVKAINAFAIPILTYSFGILKWNKHDLKNLQRSVNTTMTKNRKHHPRACVQRQTLPRCEGGRGIIDIQNLHNTQIINLRRYFHYKSTVSCLHAAIELNDKKLTPLNLHDKTTQKNEELISKHTKIVEWTRKSLHGRHYQDLSQPNVDMTASNAWLSRGELFPETEGFIIAIQDQIIETRNYQKYIIKIPNLPTDLCRRCNSSSETIQHITGACKTIVQTDYKHRHDQVANIIHQKLAIKHKLINPTKNVPYYKYTPEIVLENSTHKLYYDRAILTDKTVHYNRPDIILVNKTLKTALIIDIAIPNTHNLQSTINEKLSKYVDLKDEITRLWKLQNVLIAPVVLSTTGVIPKQLHQSIETLQLPRNTFMTLQKAAILNTCRIVRKFFLTHTPSNSTIVLPPTNP

SEQ ID NO: 2492 - protein, 1415 aa, Idaea aversata
METRARKKLRIGSLPGGDRRGALGADAECLSIRTVSGSGLSRRAPAGSPEQDDSRTQFPLSSSPSSLFPSLPSSPPSYLNPIANPSSLSTISNSTSKAEDVVQAILAIDDTAPGEAKRVRIKWSKEMNKFILRTYYILTSIENDTTSYLPELHIKFLEQFPEVQVSRQRIGDQRRAIIKRKLLTVQEVNDIRNEATVYLNSISVNNPSSINPSQPNTIAISHTSSQQQQPGQRMRWSRELNEEIIRAYYKITLLDTNRTSYRKLLHQHFINKFPHLAHITEQRVADQRRIIINNRIFNTAELDRIKQEVADELRTTNEPSISKVNESSLHNNEDETTDLNRIDPTIFTETDNQEHNLDIEQDENNTEIETTFQNALDYFKTTDPIKRPFIPRQKTSKRLAKIVSYLDKSVFKNHVDMDTSFEMLQAIIYSAAWTTAKLNGSKLSIPILVNNKEQNKNHKPNWQKRLERRISKLRKNIGLLTHFINGNRSRAMQSRVDNILQQFRLHTVHEDPNTQLPQFLDTLKQKLAVYSSRLKRYVACTLRKTQNKQFQNNEKSFYRTISKQTTNHNDNTSENRTNPPLPPSNELKEFWSDIWENSVDHNNEAQWIEEERNKHETTEPMDYERIPVDIFNNVLKNLHNWKAPGPDHIQNYWYKKFTFLQPYIYKHINNFIQNPELIPTYITIGTTFMIPKDYNDTTNPAKYRPITCLQTIYKIITACLAQLIYKHTEANHILNEQQKGARKNSQGCKEQLTIDTVILKQIQQYKKDLFTAYIDYKKAYDSVPHSWLIQILEIYKIHPQLITFLQYIMNTWTTKLILRTETENIETDEIKIKRGIFQGDTLSPLWFCLALNPLSNLLNASNKGYPINYKTTQPINNVSVNSTDNKFNFTHLLYMDDIKLFGSSNDDLQMLLQITDKFSQDIRMNFGIDKCKINAVKAGQNYSMSYQLDSGETIDPLEEQETYKYLGYRQNRQILDKDVKANLRTKFKHRLNSILKTELHAKNTVKAINTYAIPILTYSFGIIKWNKTELKQLQRNINTTMTKNRKHHPRACVQRQTLPRIEGGRGIIDIQNLHNKQISNLRAYFHKKIETSNLHSAIVQNDNKLTPLNLRDTNVQKNEEQTNKLTKIEEWTRKSLHGRHRQDLCQTHVDKDASNAWLTRGELFPETEGFMLAIQDQIIETRNYQKYIIKIPNLPTDLCRRCNSASETIQHITGACRAIVQTDYKHRHDQVASIIHQNLALKYNLIPLAPKVPYYKYTPDTILENTNYKLYFDRGILTDRTIHFNRPDLLLIDKIKKTAVIIDIAIPNTHNLQSTITEKLTKYVELKEEIMRMWHLKAVSIVPIVLSTTGVIPIQLHKSIEKLSLPDYIFINLQKAVILNTCRIVRKFLQTESERELQPNSINQTQQRQLSDDLA

SEQ ID NO: 2493 - protein, 1415 aa, Idaea aversata
METRARKKLRIGSLPGGDRRGALGADAECLSIRTVSGSGLSRRAPAGSPEQDDSRTQFPLSSSPSSLFPSLPSSPPSYLNPIANPSSLSTISNSTSKAEDVVQAILAIDDTAPGEAKRVRIKWSKEMNKFILRTYYILTSIENDTTSYLPELHIKFLEQFPEVQVSRQRIGDQRRAIIRRKLLTVQEVNDIRNEAAVYLNSISVNNPSSINPSQPNTIAISHTSSQQQQPGQRMRWSRELNEEIIRAYYKITLLDTNRTSYRKLLHQHFINKFPHLAHITEQRVADQRRIIINNRIFNTAELDRIKQEVADELRTTNEPSISNVNESSLHNNEDETTDLNRIDPTIFTETDNQEHNLDIEQDKNNTEIETTFQNALDYFKTTDPIKRPFIPRQKTSKRLAKIVSYLDKSVFKNHVDMDTSFEMLQAIIYSAAWTTAKLNGSKLSIPILVNNKEQNKNHKPNWQKRLERRISKLRKNIGLLTHFINGNRSRAMQSRVDNILQQFRLHTVHEDPNTQLPQFLDTLKQKLAVYSSRLKRYVACTLRKTQNKQFQNNEKSFYRTISKQTTNHNDNTSENRTNPPLPPSNELKEFWSDIWENSVDHNNEAQWIEEERNKHETTEPMDYERIPVDIFNNVLKNLHNWKAPGPDHIQNYWYKKFTFLQPYIYKHINNFIQNPELIPTYITIGTTFMIPKDYNDTTNPAKYRPITCLQTIYKIITACLAQLIYKHTEANHILNEQQKGARKNSQGCKEQLTIDTVILKQIQQYKKDLFTAYIYYKKAYDSVPHSWLIQILEIYKIHPQLITFLQYIMNTWTTKLILRTETENIETDEIKIKRGIFQGDTLSPLWFCLALNPLSNLLNASNKGYPINYKTTQPINNLSVNSTDNKFNFTHLLYMDDIKLFGSSNDDLQMLLQITDKFSQDIRMNFGIDKCKINAVKAGQNYSMSYQLDSGETIDPLEEQETYKYLGYRQNRQILDKDVKANLRTKFKHRLNSILKTELHAKNTVKAINTYAIPILTYSFGIIKWNKTELKQLQRNINTTMTKNRKHHPRACVQRQTLPRIEGGRGIIDIQNLHNKQISNLRAYFHKKIETSNLHSAIVQNDNKLTPLNLRDTNVQKNEEQTNKLTKIEEWTRKSLHGRHRQDLCQTHVDKDASNAWLTRGELFPETEGFMLAIQDQIIETRNYQKYIIKIPNLPTDLCRRCNSASETIQHITGACRAIVQTDYKHRHDQVASIIHQNLALKYNLIPLAPKVPYYKYTPDTILENTNYKLYFDRGILTDRTIHFNRPDLLLIDKIKKTAVIIDIAIPNTHNIQSTITEKLTKYVELKEEIMRMWHLKAVSIVPIVLSTTGVIPIQLHKSIEKLSLPDYIFINLQKAVILNTCRIVRKFLQTESERELQPNSINQTQQRQLSDDLA

SEQ ID NO: 2494 - protein, 1008 aa, Blastobasis adustella
METAVLQFLGTDPTTRPKLPRLRESRKLHELIHIFNTEILKQFLSDDTDISHTHTIVYCSALVICRQLGFKIQNNTNNYERRKKTHIKPPWQLRLEKDIANLRADIGRLTQYINNNRSKKVISKVETIFKKTKVHSSHEKNNIRPEEHLDTLKQKLAAKSHRLARYKKALDRKLDNKLFTINEKSFYRALNNRIGNSVQNIPTEEELTEYWAKLWKKQKEHNEQAYWIKDEENNWKAIDEMEFTDITEEDIKIVTKKMKNWKAAGVDGIHNFWYKNLHAVHSALGKNITNLITGGTPEEPPVFLTRGITYMLPKSNNTDDPSQYRPITCLPTLYKMITSCITNKINRHLDKYNILAEEQKGCKQNHQGCKEQLTIDATILKHANSGNRSLHLAYIDYKKAFDSVPHSWLIRVLQIYKINPTIITFLENVMENWSTSLTVTSKESNVSTGVIKIENGIFQGDSLSPLWFCLALNPLSRLLNSTKCGYKLTKDSCITHLMYMDDIKLFASSSKQIKSLVDKTAQFSSDINMTFGLDKCRVLHLYRGKITGVDSFREEIDIAEMEGNETYKYLGIKQAKSINHNLIKKDLTTEYIRRLNLICRKHLVSKNMFKAINTYAIPVLTYSFGIIKWSKTDINKLQIKTRTTLTKHNNLHPKSAIERSSIKRDSGGRGLIDIKILWQKQINSMRHFFYDKAKTSKIHLAVIESDANYTPLNLINKGLTTTSTEFTEKEKIDNWRRKELHGRHLHDLEQTHVDHKASNKWLKLGYLFPETEGFMIAIQDQVINTKNYRKHILKDPNMQNDKCRKCNRQPETIQHITSACCHLAQTDYIHRHNQIANIIHQKLAIKHKLIPPKSLPYYQYVPKPVLESARHRMYFDRAILTDKTIHFNRPDITLIDKLEKHAFIIDIAVPNTHNLQKTTADKINKYTELKEEILRIWNLEKVDIVPLLLSSTGIIPKHVKHYLRLIDLPENTYINMQKATILNTCRIVRKFLQEDTTRNQIESEAHLE

SEQ ID NO: 2495 - protein, 1268 aa, Blastobasis adustella
MITRSKTSKNSIQACEPVIENETFLVSPATSSRSPFSSTSPSSSLQFAAETYDQLTDTDFSRASTPAEDVSQGASATKPATTKAGKPRVRMKWSKELNLFIMRTYYYITKLETDRTMYTKRLFDDFKLQYPDINVTAQRICDQRRVIIRNKLLSDEVLDKLKHDISLRLLNEDSDSVNLPLSIAQSDTFPSSTQSVTNPLNTQSDTTLPITQPDTLPQIANTLTTTTVSFQESTQMTSNVTFSNDTDQNHENNHCTNELIQEMETAVLQFLGTDPTTRPKLPRLRESRKLHELIHIFNTKILKQFLSDDTDISHTHTIVYCSALVICRQLGFKIQNNTNNYERRKKTHIKPPWQLRLEKDIANLRADIGRLTQYINNNRSKKVISKVETIFKKTKVHSSHEKNNIRPEEHLDTLKQKLAAKSHRLARYKKALDRKLDNKVFTINEKSFYRALNNRIGNSVQNIPTEEELTEYWAKLWKKQKEHNEQAYWIKDEENNWKAIDEMEFTDITEEDIKIVTKKMKNWKAAGVDGIHNFWYKNLHAVHSALGKNITNLITGIEEPPVFLTRGITYMLPKSKNTDDPSQYRPITCLPTLYKMITSCITNKINRHLDKYNILAEEQKGCKQNHQGCKEQLTIDATILKHANSGNRSLHLAYIDYKKAFDSVPHSWLIRVLQIYKINPTIITFLENVMENWSTSLTVTSKESNVSTGVIKIENGIFQGDSLSPLWFCLALNPLSRLLNSTKCGYKLTKDSCITHLMYMDDIKLFASSSKQIKSLVDKTAQFSSDINMTFGLDKCRVLHLYRGKITGVDSFREEIDIEEMEGNETYKYLGIKQAKSINHNLIKKDLTTEYIRRLNLICRKHLVSKNMFKAINTYAIPVLTYSFGIIKWSKTDINKLQIKTRTTLTKHNNLHPKSAIERSSIKRDSGGRGLIDIKILWQKQINSMRHFFYDKAKTSKIHLAVIESDANYTPLNLINKGLTTTSTEFTEKEKIDNWRRKELHGRHLHDLEQTHVDHKASNKWLKLGYLFPETEGFMIAIQDQVINTKNYRKHILKDPNMQNDKCRKCNRQPETIQHITSACCHLAQTDYIHRHNQIANIIHQKLAIKHKLIPPKSLPYYQYVPKPVLESARHRMYFDRAILTDKTIHFNRPDITLIDKLEKHAFIIDIAVPNTHNLQKTTADKINKYTELKEEILRIWNLEKVDIVPLVLSSTGIIPKHVKHYLRLIDLPENTYINMQKATILNTCRIVRKFLQEDTTRNQIESEAHLE

SEQ ID NO: 2496 - protein, 1268 aa, Blastobasis adustella
MITRSKTSKNSIQACEPVIENETFLVSPATSSRSPFSSTSPSSSLQFAAETYDQLTDTDFSRASTPAEDVSQGASATKPATTKAGKPKVRMKWSKELNLFIMRTYYYITKLETDRTMYTKRLFDDFKLQYPDINVTAQRICDQRRVIIRNKLLSDEVLDKLKHDISLRLLNEDSDSVNLPLSIAQSDTFPSSTQSVTNPLNTQSDTTLPITQPDTLPQIANTLTTTTVSFQESTQMTSNVTFSNDTDQNHENNHCTNELIQEMETAVLQFLGTDPTTRPKLPRLRESRKLHELIHIFNTKILKQFLSDDTDISHTHTIVYCSALVICRQLGFKIQNNTNNYERRKKTHIKPPWQLRLEKDIANLRADIGRLTQYINNNRSKKVISKVETIFKKTKVHSSHEKNNIRPEEHLDTLKQKLAAKSHRLARYKKALDRKLDNKLFTINEKSFYRALNNRIGNSVQNIPTEEELTEYWAKLWKKQKEHNEQAYWIKDEENNWKAIDEMEFTDITEEDIKIVTKKMKNWKAAGVDGIHNFWYKNLHAVHSALGKNITNLITGIGEPPVFLTRGITYMLSKSNNTDDPSQYRPITCLPTLYKMITSCITNKINRHLDKYNILAEEQKGCKQNHQGCKEQLTIDATILKHANSGNRSLHLAYIDYKKAFDSVPHSWLIRVLQIYKINPTIITFLENVMENWSTSLTVTSKESNVSTGVIKIENGIFQGDSLSPLWFCLALNPLSRLLNSTKCGYKLTKDSCITHLMYMDDIKLFASSSKQIKSLVDKTAQFSSDINMTFGLDKCRVLHLYRGKITGVDSFREEIDIAEMEGNETYKYLGIKQAKSINHNLIKKDLTTEYIRRLNLICRKHLVSKNMFKAINTYAIPVLTYSFGIIKWSKTDINKLQIKTRTTLTKHNNLHPKSAIERSSIKRDSGGRGLIDIKILWQKQINSMRHFLYDKAKTSKIHLAVIESDANYTPLNLINKGLTTTSTEFTEKEKIDNWRRKELHGRHLHDLEQTHVDHKASNKWLKLGYLFPETEGFMIAIQDQVINTKNYRKHILKDPNMQNDKCRKCNRQPETIQHITSACCHLAQTDYIHRHNQIANIIHQKLAIKHKLIPPKSLPYYQYVPKPVLESARHRMYFDRAILTDKTIHFNRPDITLIDKLEKHAFIIDIAVPNTHNLQKTTADKINKYTELKEEILRIWNLEKVDIVPLVLSSTGIIPKHVKHYLRLIDLPENTYINMQKATILNTCRIVRKFLQEDTTRNQIESEAHLE

SEQ ID NO: 2497 - protein, 766 aa, Blastobasis adustella
MEFTDITEEDIKIVTKKMKNWKAAGVDGIHNFWYKNLHAVHSALRKNITNLITGIEEPPVFLTRGITYMLPKSKNTDDPSQYRPITCLPTLYKMITSCITNKINRHLDKYNILAEEQKGCKQNHQGCKEQLTIDATILKHANSGNRSLHLAYIDYKKAFDSVPHSWLIRVLQIYKINPTIITFLENVMENWSTSLTVTSKESNVSTGVIKIENGIFQGDSLSPLWFCLALNPLSRLLNSTKCGYKLTKDSCITHLMYMDDIKLFASSSKQIKSLVDKTAQFSSDINMTFGLDKCRVLHLYRGKITGVDSFREEIDIAEMEGNETYKYLGIKQAKSINHNLIKKDLTTEYIRRLNLICRKHLVSKTMFKAINTYAIPVLTYSFGIIKWSKTDINKLQIKTRTTLTKHNNLHPKSAIERSSIKRDSGGRGLIDIKILWQKQINSMRHFFYDKAKTSKIHLAVIESDANYTPLNLINKGLTTTSTEFTEKEKIDNWRRKELHGRHLHDLEQTHVDHKASNKWLKLGYLFPETEGFMIAIQDQVINTKNYRKHILKDPNMQNDKCRKCNRQPETIQHITSACCHLAQTDYIHRHNQIANIIHQKLAIKHKLIPPKSLPYYQYVPKPVLESARHRMYFDRAILTDKTIHFNRPDITLIDKLEKHAFIIDIAVPNTHNLQKTTADKINKYTELKEEILRIWNLEKVDIVPLVLSSTGIIPKHVKHYLRLIDLPENTYINMQKATILNTCRLVRKFLQEDTTRNQIESEAHLE

SEQ ID NO: 2498 - protein, 1268 aa, Blastobasis adustella
MITRSKTVKNSIQACEPVIENETFLVSPATSSRSPFSSTSPSSSLQFAAETYDQLTDTDFSRASTPAEDVSQGASATKPATTKAGKPRVRMKWSKELNLFIMRTYYYITKLETDRTMYTKRLFDDFKLQYPDINVTAQRICDQRRVIIRNKLLSDEVLDKLKHDISLQLLNEDSDSVNLPLSIAQSDTFPSSTQSVTNRLNTQSDTTLPITQPDTLPQIANTLTTTTVSFQESTQMTSNVTFSNDTDQNHESNHCTNELIQKMETAVLQFLGTDPTTRPKLPRLRESRKLHELIHIFNTKILKQFLSDDTDISHTHTIVYCSALVICRQLGFKIQNNTNNYERRKKTHIKPPWQLRLEKDIANLRADIGRLTQYINNNRSKKVISKVQTIFKKTKVHSSHEKNNIRPEEHLDTLKQKLAAMSHRLARYKKALDRKRDNKLFTINEKSFYRALNNRIGNSVQNIPTEEELTEYWAKLWKKQKEHNEQAYWIKDEENNWKAIDEMEFTDITEEDIKIVTKKMKNWKAAGVDGIHNFWYKNLHAVHSALGKNITNLITGIEEPPVFLTRGITYMLPKSNNTDDPSQYRPITCLPTLYKMITSCITNKINRHLDKYNILAEEQKGCKQNHQGCKEQLTIDATILKHANSGNRSLHLAYIDYKKAFDSVPHSWLLRVLQIYKINPTIITFLENVMENWSTSLTVTSKESNVCTGVIKIENGIFQGDSLSSLWFCLALNPLSRLLNSTKCGYKLTKDSCITHLMYMDDIKLFASSSKQIKSLVDKTAQFSSDINMTFGLDKCRVLHLYRGKITGVDSFREEIDIAEMEGNETYKYLGIKQAKSINHNLIKKDLTTEYIRRLNLICRKHLVSKNMFKAINTYAIPVLTYSFGIIKWSKTDINKLQIKTRTTLTKHNNLHPKSAIERSSIKRDSGGRGLIDIKILWQKQINSMRHFFYDKAKTSKIHLAVIESDANYTPLNLINKGLTTTSTEFTEKEKIDNWRRKELHGRHLHDLEQTHVDHKASNKWLKLGYLFPETEGFMIAIQDQVINTKNYRKHILKDPNMQNDKCRKCNRQPETIQHITSACCHLAQTDYIHRHNQIANIIHQKLAIKHKLIPPKSLPYYKYVPKPVLESARHRMYFDRAILTDKTIHFNRPDITLIDKLEKHALIIDIAVPNTHNLQKTTADKINKYTELKEEILRIWNLEKVDIVPLVLSSTGIIPKHVKHYLRLIDLPENTYINMQKATILNTCRIVRKFLQEDTTRNQIESEAHLE

SEQ ID NO: 2499 - protein, 1268 aa, Blastobasis lacticolella
MITRSKSSKNSVQACEPVTGNETFLVSPATSLRSLFSSTSPSSSLQFAAETHDQLTDTDFSRESTPAEDVSQGASATKPVTTKAGKPRVRMKWSKDINLFIMRTYYYITKLETDRTMYTKRLFDEFKLQYPDVNVTAQRICDQRRVIIRNKLLSDEVLDQLKQDISLRLLNENSDSVNLLLSNTQLDIFPSSTQSVTNPPSIQSDTTLPITQPDTLSPIANTLTTTTVPSQESTQLSSDVTFSYDTDQSHESNHHTNELVQEMETAVLQFSGTDPSTRPKLPRLRESRKLYELIHIFNTNILKQFLSNDTDISHTHTIVYCSALVICRQLGFKIQNNTYNYEHRKKFHLKPPWQLRLEKDIASLRADIGRLTQYINNNRSIKVISKVETIFKKTKVHSSHENNNIRPEEHLDTLKQKLAAKSHRLARYKKALDRKRDNKLFTMNEKSFYRALNNRIDNSIKNIPTEEALTEYWAKLWKKQKEHNEQADWIKDEENKWKAIDEMEFTDVTEEDIKIVIRKMKNWKAAGVDGIHNFWYKNLHAVHTALAKNITNLITGIEEPPVFLTRGVTYMLPKSNNTDDPSQYRPITCLPTLYKMITSCITNKINGHLDKYNILAEEQKGCKRNHQGCKEQLTIDATILKHANSGNRNLHLAYIDYKKAFDSVPHSWLIRVLQIYKINPTIITFLENVMENWSTSLTVTSKESNVSTGVIKIENGIFQGDSLSPLWFCLALNPLSRLLNSTKCGYNLTKDSCITHLMYMDDIKLFARSSKQIKSLIETTAQFSSDINMTFGLDKCRVLHLYRGKIIGVDSLREEIDIAEMEENETYKYLGIKQAKSINHREIKKDLTTEYIRRLNLICTKHLISKNMFKAINTYAIPVLTYSFGIIKWSKTDINKLQIKTRTTLTKHNSLHPKSAIERSSIKRDCGGRGLIDIKILWQKQINNMRHFFYDKAKTSKIHLAVIESDANYTPLNLINKGLTTTSTESTEKEKIDNWRKKELHGRHLHDLEQMHVDHKASNKWLKLGYLFPETEGFMIAIQDQVINTKNYRKHILKDPNMPNDKCRKCNRQPETIQHITSACSHLAQTDYTHRHNQIANIIHQKLAIKHKLIPPKSLPYYQYIPKPVLESARHRIYFDRAILTYKTIHFNRPDITLIDKQEKHAFIIDIAVPNTHNLQKTTADKINKYTELKEEILRIWNLEKVDIVPLVLSSTGVIPKHIKHYLRLIDLPENIYINMQKAAILNTCRIVRKFLQEDTTRNQIESEVHLE

SEQ ID NO: 2500 - protein, 1127 aa, Coccinella septempunctata
MNVCLISAYFHVTQGETQTKKYANKLADKWLQTYPEMRFTGKHLIAQVKNIKTRKLLSPDEIESIKTMAIQKSPAKRIENLRRSIHRTSIQGQIRTETREEGEREQTIQPETITKEILEIFHEENQKWGGVEMENRPKIQKLNQNKEAKTLMQAINNALREKFEESTNFEELCHMVYCAAVTANNIQPTKNKAKTGTRKTDHKKPPWEERIEGRISALRREIGILHTYLEDQNPSRKVKEKALAYARKMKLKPSDTEYLQHLKIHVESLKQKIAALGNRLRRYHKRTKRYKENNLFNNSQRNFFRQLEGTNQHNEQTPVPNLDEVNKYWSSIWSKDESHNRKATWIDLETRDRENVGEMSEIIVTEEDVKATVKRLKNWTTPGGDGIHNYWWKTLTATHKMLALFIQNAIENPSDIPEYFTKGSTLLIPKKGDLGRPENYRPITCLPSAYKVLTSIIAHKIEDHLKNNNIMAWEQNGCRKRGRGSKELLVIDNAITKQAKRKQKNISIAWIDYQKAFDSVPHTWLLEVLEIYKIHPKVISLLTNLMSTWRTSLKIGNSTSTLQNEVLIKIRRGIFQGDSLSPLWFCLALNPLSTMLNRSAYGYSIDQINKVTHLFFMDDLKLFARGRKYLEGQLELVRQFSKDIGMRFGIEKCAMVDVTRGRLDRGEDVVLSDGQIIGRLGSEERYKYLGIQQTYEIKQQENKAEVEEEMMKRVRKILSTQLSAKNKIMAINIWALPTFMYTAGVLSWSKTDLERLDRRIRAALTKSGMLHPRSAIERIYLPRNEGGRGLGNIEHSYLREERKLKNYFSRGNLPLQRLVSNLCFPGATSETQSTEPEIGSPYELWRQIWQSKPLHGRFYASLHQPEVDIQNSTTYLKQGYLFPQTEGTILAIQDQVVPTRVYTKHILKQNVETTKCRLSNQEEESVQHLSSGCSAIAGTKYLSRHNNMGKVVHQLLCLKEGLIQHFTPHHAYNPQGLMENNNIKVYWDLPITTDQGVEHNRPDMLVWNRRKNNAIIIDFSVPLDQNLAKAYNEKILRYEALSRQIKNIWKLQRVEIKPLVVSCNGLIHKKTVQHLQELQLPPNTICWMQKAVILGTVNIVRQVVYPYRRKIDSLALVPGQSDTTTKV

SEQ ID NO: 2501 - protein, 1099 aa, Coccinella septempunctata
MRAHYIATDMLATNSDKTYRQILVEVWNEINPARPSTAPILSNRVRWILSGQKISRAELEVIKTSCYPNVASREQEDMERLTGPRMSSPRIRRSALFLPRESDIELGRSFSGNLMKYASMSPESRPVIPRLEHCKMAVKTIASLNNILPGYLEQTDTLEGLVDVVYAAAITICEINGQRIIQQTESRVRKTCQQRPPWLDRLQGKIVSLRKKVGIMHAYLGNDAPSLKLLRSVKKVASAFKIKRKDPNFREKISLKLDFVKQKIKALGSRLRRYNERVKRYNNNKLFYKNQKQFFRQLEEKTPSDGGHLDPRTAREYWSGIWTEAVTHDDSAYWIDEAQEKIPNTRMEDIEVSEADIVEVLRGSNNWSSPGEDKIHNYWWKYLTSTHDLLARLFRRALQDPSSIPEYFTAGITYLIPKGGNKTDPENYRPITCLPSIYKLFTGVISKHIGKYLGENNLMAAEQRGCRRGARSSKELLVVDYILTKQARRKLRNISVAWIDYRKAFDTVPHSWLIKVLRMHGIADQVIDTLMHLMKTWRTRLKVKVGDRIEESGQVLINRGIFQGDTLSPLWFCVALNPLSILLKNTNYGYVIDKQKNVRISHHLYMDDLKLYAANFDQLKRQLEIVSAFSQSVKMQMGMNKSATLEVKRGKIINADEPVKLMNNEKIPTLSAQETYKYLGVKQALDIKTSEMKKQFKERLLSRMTLLLKSKLNAGSLFRAINMWAIPSITYSFGILTWSPTDLREIDRSVRTMLTKYGMHHPHSSTTRLYLPRHLGGRGLISLEIAHEREVDALRTYILKKSTIFFIALREADDGLSALRLSETEHRRQEHSAEEMMEEWKSKALHGRYPGNLEKKEVNKMESLTYLRAGYLFPETEGRLLAIQDQVVPTRMYLRHIAKIDIPSDRCRRCLVGAETIQHITSACPIMAPTEYLERHNSMARIYHQQIALNLGLLKREVEQHLYIPKSLLQNDRHKLYWDVTMVTERGVTHNRPDVVIFDKTRASCLLLDFTIPADENLSKAYTEKITKYADLAFQLRELHKLESISVMPLVMSVSGLVEQHLVGNTEKLGLNRAIISAAQKQVILGTVRTVRKFLQGPS

SEQ ID NO: 2502 - protein, 884 aa, Coccinella septempunctata
MHAYLGNDAPSLKLLRSVKKVASAFKIKRKDPNFREKISLKLDFVKQKIKALGSRLRRYNERVKRYNNNKLFYKNQKQFFRQLEEKTPSDGGHLDPRTAREYWSGIWTEAVTHEDSAYWIDEAQEKIPNTRMEDIEVSEADIVEVLRGSNNWSSPGEDKIHNYWWKYLTSTHDLLARLFRRALQDPSSIPEYFTAGITYLIPKGGNKTDPENYRPITCLPSIYKLFTGVISKHIGKYLGENNLMAAEQRGCRRGARSSKELLVVDYILTKQARRKLRNISVAWIDYRKAFDTVPHSWLIKVLRMHGIADQVTDTLMHLMKTWRTRLKVKVGDRIEESGQVLINRGIFQGDTLSPLWFCLALNPLSILLKNTNYGYVIDKQKNVRISHHLYMDDLKLYAANFDQLKRQLEIVSAFSQSVKMQMGMNKSATLEVKRGKIINADEPIKLMNNEKIPTLSAQETYKYLGVKQALDIKTSEMKKQFKERLLSRMTLLLKSKLNAGSLFRAINMWAIPSITYSFGILTWSPTDLREIDRSVRTMLTKYGMHHPHSSTTRLYLPRHLGGRGLISLEIAHEREVDALRTYILKKSTIFFIALREADDGLSALRLSETEHRRQEHSAEEMMEEWKSKALHGRYPGNLEKKEVNKMESLTYLRAGYLFPETEGRLLAIQDQVVPTRMYLRHIAKIDIPSDRCRRCLVGAETIQHITSACPIMAPTEYLERHNSMARIYHQQIALNLGLLKREVEQHLYIPKSLLQNDRHKLYWDVTMVTERGVAHNRPDVVIFDKTRASCLLLDFTIPADENLSKAYTEKITKYADLAFQLRELHKLESISVMPLVMSVSGLVEQHLVGNTEKLGLNRAIISAAQKQVILGTVRTVRKFLQGPS

SEQ ID NO: 2503 - protein, 1373 aa, Zygaena filipendulae
MYRTRSKTKNTAQAKPDVEDWGSHDLAATSANDEEEQHKGDHVLEAMTVSPDHQDIHVSSLPSSPCLFQTPSTPSLMFGISRSTSTTTEMSDVVQEAFANDLEPTVRQTRARKKWSAEMNSFIWRTYLYTSKLETVKRGYLEDLHRQFTEKFPAMNITRQRLGDQRRAIVRNKLLPDSVRKNIRDEVSAALNSAVPTCQAPPNISNPYSQTPQTPTTEPRTRKKWTNDVNEAIMKTYYTITNLEADLTAYRKPLHTIITQQFPQIAHVSEQRIADQRRAIVSNKLIAVERLEAIKEEVERNRIISQPYRHANETAYLAQSTNDDTNHSFTDITQYAAIENIAQLSVNSNYSVTNNSYPNNFRDKYLNDKITETFKTILEKYKNTDPIQRPFIPKQKTSKRLAYIVSYINNEILPNHISIDHEFLETQAIVYCAAYTSAVCNGSKIREVNINDIGNRRQCVTPPWQKRLIKKIDDLRRDTGRMTQYVRGNRSRKILSRVEEIKAKYKTHSQHEEPNITDEQFLDTLKQKLNAASSRLKRYLNCTMRKKQNSQFVNNEKQFYRTFDIDTRATTDNSHNKDAPPAESLHQFWSNIWANPVQHNEEAKWLPTLLTNTDGTPQMEFQHIPVETFVDVLNKTHNWKAPGSDNIHNYWYKKFTNIHPMLHNHINNFIQSPDLMPKYITTGITYMIPKDTDYKNSSKYRPITCLQTIYKILTSCITELIYQHITSNNILAEEQKGCRKNSQGCKEQLIIDSVAMKLARKRNINTMYIDYRKAFDSVPHSWLIYTLKNYNIHPTIITFLKCTMENWRTKLKLTNGNTTILTQEIPIRRGIFQGDALSPLWFCLALNPLSQLLNRNCSGFLIKIGQNQYNLTHLMYMDDIKLYSSSKKTLHQLADVTQEFSNDIRMEFGIDKCKTFTLRRGTVEKHEYTLDTGDRVEPMDQNDAYRYLGFQQSKQIHEKITKADITKKFKHRLNSILRSQLNSRNITKAINTFAIPMLTYTFGIIKWSQTDLQRLQRVINTTLTIHRKHHPKSCVQRLTLSRIEGGRGIIDIVNLHNKQIKSLRQFFYRRAQESTLHNTVALADVKLTPLNLQDRDAQRNEQITDKKDKIASWESKALHGRHRQYLQQQHVDKEASNTWLRRGELFPETEAFMIAIQDQVIDTRNYQKYIIRKPDLQTDLCRRCHSSSETIQHITSACKAIVQTDYKHRHDQVAAIVHQHLAKQYKLIDKCIPYYKYQPQAVLENDIYKIYWDRTIITDKTIHYNRPDLTVLNKIKNAVMLIDIAVCNTHNLSTTYSEKIAKYTDLSIEIKTQWKVQTVTTVPIVISSTGVVPKTLSNSLKKLDMSSYFISVIQKATILNTCRLTRKFLSLSG

SEQ ID NO: 2504 - protein, 976 aa, Thalassaphorura encarpata
MASAEVQNPLSQNDESKCNLCGKFFKGKRGVSAHITRAHPELRRDLTSQQHQVNPAYSEVVAEVDLSENARNTEIASRKETLTKIVNTFQNKFAALLHGNQDEERFEEVYVDLTKFLSDAHGNLPGPKHPASKYFRARKNKRNFSLNDRRYSETNNPVRKSKRDREKRNERYQYDLAQYNFYHRRKKCVQQLMTSSQEPSCPIPIADLHIAFSERWTRQNTVVREDYGAKPTVEVQNKIDTEFEIIITEEEVDSALKGINNDTAPGVDRITVRTMKNLNCASLLATIASIMLKWQYVPKEMKEAKTVLTFKKGDPNRPENWRPISVCSILRRIIERVFDKIVHRYIQLSPHQRGFTNQPGTHVNTSLISACLKKAKQDKSNVNVILLDIIKAFDYVGYEHLSRTIDHTTLPTPMKGILMKLQTENFTRLNVGSGISEPINFSRGLFQGAPLSPTLFNLSIDYVIRELTEYDVATKYGFSLVQHLPPLSAAGFADDVALVSKNHTSALEQTISARKLFKESGLEIHPAKSINISAVKGKQVQVDIQVDSESVIPGLAVGEKIKYLGVTFQDEIIFDQAAVIGALTKDLQLLVSTALLKPEQKLSILNQYLWPKVIYPFQSAPIVKIPQSFLEDMDKNVRSSVKEILGLPCDTPNSMLYSPAKFKGLNLVKAKWEAYIQSHNISQTLQQCPNEYLPFIRDFDREMEFCKDKLGITMEQMESNPTDQTPKAMSTTFRSILRGKQFEEWCALPQKGKGVILFKEVPKYNKWLINKQGLSSSEWVTNIKMTANVAAVRAIPGRNLQTTRCRFCDEIETLGHVLGSCSRGELLRNSRHHRVRTLIANAFREKNLQVYEEVTCLSETGSTRRIDIIVLNSDNQTALVLDPTIRIESSIDQPVEVNNEKKAIYEPCISDLITKYKLTSIEVVGLLIGARGTITKFFSDFVKNHNLENSLVEDITLTVLKSSAHILQNHIHGAPL

SEQ ID NO: 2505 - protein, 1009 aa, Campodea augens
MMDNFNSCTCNNMLVDSSEPLILCDGCQIRFHGCCVSLTAADIDRFQADDNRWLCNVCLHQRRPSFSIETSQSKICPICSKSCLNERGLKTHWGKMHKDEALVPLTPSNSQLQRPNSTIRQPNLQVESLLMKLRSLRKKCRILKRIPRSARFCCAYKLSNIINECVTSNNLSSWENLLCFSYNALRVPPKSNKSLGSLVKKNISSLKFEEDVLPSRSASTTLSNRVASKVSDGDIRGAIRILSSIDSLAPDDFDTYTKLREKHPCPSKILSFPIKPDEDIYTFRVNEKDILKMVSSFPNGSSGGIDGLRPQHLKDLLSDSNGEAAHSLAKALSSLCNLMFSGEVCSDVTNILYGATLCALAKKDGGVRPIAIGCTIRRLAAKLACQFVGDAAGTYLRPKQVGFKTPGGCEAAVHATRTFIKTNLNTEFVLLKIDAMNAFNSIERDTMLEAVKQITPPIYSFLHQVYSSPSLLFFGDNTILSQVGAQQGDPCGPLLFSLTIQPVIESLISDLNIWYLDDGTLAGPPESVFKDFQTIMERFKDLGLNINPSKCELFFFSEFQQEIFLTFSSISPGIRLAKDHLDLLGSPILSSGVKSALEKKKDEINLLISRLQDLPFHIAYYLLKHCLMVPKLTYLLRTVPSWEAMDVLREIDLNFKVSIESIINSSLNNIKWKWTSLPTRFGGLGIRRLEDICLPAFLSSAFSTCSLINVMLNSDSDELLVDLVNGLDEWNKCNIIYPVKRNHQYMWDNIKIEQVISTFAFPDLKDKSRFLASMCDESNAWLNVLPSRSLGTLLDNNTFRISVGLRFGLNICSPHICICGNQVEKDGAHGLSCKRSAGRHSRHSELNNIICRALSSAKIPSVLEPTGLSRTDGKRVDGMTLIPYSRGQILLWDATCGDTLAPSYLEFSSVTAGSVASKASLKKVSKYQNLTDQNFLFVPFAVETLGPWCKEALSFIDDLCCQIICNTGEKRAKSYLKQRISIAIQRGNAGCVMGTLPPSSPLEEIFYIL

SEQ ID NO: 2506 - protein, 1018 aa, Hormaphis cornu
MLRNHGRSPDRATPVLPHETPNEPAAQDNKCRAPDCERTFSSARGRGVHEKRAHPDWYDQRNLLDHPAKNSRWTEEERLLLARKEAELTRRGVDFMNQELVKFFNRTLESVKGQRRRQVNYDCVQQFLAEFGDTLSSDDEHQDDQVSSGSSEHERDPLADHLAGLAPLDNGEFNAKWLDRICVMTSSSPKERVRIELASYLLETFPAEKRSSPLRAARPPPPPSNNRAKRRAEYKRAQDLWYRNRGECVRRIVSEQLGHEESVPKEIMEPFWSAVFTQNKDSSPKFGEPVDIQGQLWNPILASEVKGALPPPDTAVGSDGVTSATLKKVPKEHLARIFNLFMWCGKLPEHLNKSRTILLPKKKGAKDPAEYRPITMSSVIVRTFHKILGRRLSCVPLDERQRGFRDANGCAENTALLDLALRFHHRKNRKLFLASLDMAKAFDSVAFKALHESLRNRGLPPKMRNYIRTVYEDSFTVLQHGGWESEKVHPTCGVKQGDPLSPILFNFILDGLFKQLSPELGVDIDGTRLNVMAFADDLVLMASSQEGLQALIDQVAAYLSNCGLEPNAHKCTTIAIKTIPKLKKTAVDPSCAFTILGRKMLAMKRTDRMRYLGIPFTPEGKADTNAIEQLEAKIQSLTKAPLKPQQRMWALRVVVLPGLLYQLVMGGVKFSYLRSLDIRIRCAVRKWLNLPKDCPNAYIHSDIQDGGLGIPSIRWTAPLRRLHCLQSLLKSEYLSGAGIRFYLEGEVKETLKRLKNNKSETLRTNKQLKYYQSSMLYEAVDGIALKGSRKVKGQHSWIGDGTKFLTGRDFLMSCKMRINALPTRSRTARGQNKDKYCRAGCGNVETTNHILQICHRSHAARIRRHDAVAHYLARNLEKNGYVVDLEPHIQTKEGLRKPDIVATLGRTTIIVDAQVVSEQTDLDRANRTKIDYYGKNKSLIEEVRKKYKSADVLTLAATLSWRGLWSGVSAADLLRRGVIRQKDIKVISSRVIIGGLAIWNRWNRSTAHTRRRNREGIG

SEQ ID NO: 2507 - protein, 802 aa, Aphaenogaster picea
MEEEMRVREDVVPETIDNLSGSAKRAGEAPRALESCQYRTKILKYLAELPGPTSTQFSMAKLNSICLSLYAKQPAEILQDLTLYLYEVFPTKPRTAARATNSVPSRNPVTRRQKRRVEYARVQDLWRKNRGKCLRILLDDIVDVTPPAEEVMTPFWRTVMTQQKDTSPDQEMPQCVIEELWEPVSSKEIRKAFPSSSTASGPDGLSARLVKKIPMEALVRILNLVMLCESAPSHLIESITSLIPKKAGAKEPADFRPITVSSTLIRTLHKVLAGRMARLIRLDQRQRAFRPTDGCSDNVFLLDLVLRFHRQKNKPLFMASLDIAKAFDSVAHKTIRETLQIKGTPPPMINYIMDVYRRSTTRQSCGYWTSEKIQPKCGVKQGDPMSPIIFNLIIDRLLTRLPKEIGARIGGLSVNAAAFADDMLLFATTPMGLQKLLDISTNFLDQCGLQVNASKCFTVALRNVPHEKRTVIDHATVFTCENRVLPALKRSDEWRYLGIPFTPEGRAKVIATNDVQETLLKLTKAPLKPQQRLFALRTLVLPRVYHKLELGSTSLSMLKKCDRLIRQAVRAWLALPADTPNAYIHADVRAGGLGISSLRWSAPARRLKRLESLPVADQHRDEATGSFMTAEIRRCRERLRNGTSQLNALKDIGRRWADLLYNKVDGAPLRESGRVPQQHRWIQEGNRFLSGKDFLQSCKLRINALPTKSRTSRGRPIDRQCRAGCGRPETLNHVLQQCHRTHGLRVRRHDAVAAFLIRSLNVGGYEVEVEPKFRTDDGVRKPDILAKLGVTAIVIDAQVVND

SEQ ID NO: 2508 - protein, 890 aa, Aphaenogaster rudis
MEEEMRVREDVVPETIDNLSGSAKRAGEAPRALESCQYRTKILKYLAELPGPTSTQFSMAKLNSICLSLYAKQPAEILQDLTLYLYEVFPTKPRTAARATNSVPSRNPVTRRQKRRVEYARVQDLWRKNRGKCLRILLDDIVDVTPPAEEVMTPFWRTVMTQQKDTSPDQEMPQCVIEELWEPVSSKEIRKAFPSSSTASGPDGLSARLVKKIPMEALVRILNLVMLCESAPSHLIESITSLIPKKAGAKEPADFRPITVSSTLIRTLHKVLAGRMARLIRLDQRQRAFRPTDGCSDNVFLLDLVLRFHRQKNKPLFMASLDIAKAFDSVAHKTIRETLQIKGTPPPMINYIMDVYRRSTTRQSCGYWTSEKIQPKCGVKQGDPMSPIIFNLIIDRLLTRLPKEIGARIGGLSVNAAAFADDMLLFATTPMGLQKLLDISTNFLDQCGLQVNASKCFTVALRNVPHEKRTVIDHATVFTCENRVLPALKRSDEWRYLGIPFTPEGRAKVIATNDVQETLLKLTKAPLKPQQRLFALRTLVLPRVYHKLELGSTSLSMLKKCDRLIRQAVRAWLALPADTPNAYIHADVRAGGLGISSLRWSAPARRLKRLESLPVADQHRDEATGSFMTAEIRRCRERLRNGTSQLNALKDIGRRWADLLYNKVDGAPLRESGRVPQQHRWIQEGNRFLSGKDFLQSCKLRINALPTKSRTSRGRPIDRQCRAGCGRPETLNHVLQQCHRTHGLRVRRHDAVAAFLIRSLNVGGYEVEVEPKFRTDDGVRKPDILAKLGVTAIVIDAQVVNDQINLDDAHKKKIDYYSPLSEAIKKKYGVNEVVFTSATLSWRGIWSEASAGSLTGLGILRKGTLKVVSSRVLIGGLACFHIFNKTTVTR

SEQ ID NO: 2509 - protein, 1140 aa, Ctenocephalides felis
MDNTIMTNEINGAGIGACGNASRNEPGEHSDGSGSRNDPDIIVWWPFVEIVCPFCPGACTLVSSSEVSRHLKQFHPDRRAKYICSRCQQVCGNQGGLTVHSRSCKGPRSEEAFKCNECTASFPSKTGLSQHERHTHPGVRNEKRRLASQRPESSTRNLKVWTDEDIETLRRVNDQYLECRHVNVKIRDEHLPHMTRTQISDKRGELGLRTKSGRIDEPAVGSQALVNPEQLDDDDCETRHQLVETQVAASQQDRDGDDLKSWAQQLLKDWEDWRDIEIDEKLNEASAQLEDLRKRLEAGCRPSDVVRHIDNLVECVLTPALTKRPQSTTGKKGSKAHGRRRQNGQRKNRRKFNYARHQDLYNNCPNKLVESIVSGCNAVDNNIRPPTGDIKSLYDGLWGTEWKGSFSYNDPRPEVSVLDSIPIITPNNIRERVMRINAKKAVGPSGVRKADLTRLKGTEAVLARLFNLIVWSGYFPKSWRVCSTTLIPKRGKDCSKAENWRPITIGSLLARLFSGIIEKGFRNCITINKRQKGFTLENGCFNNIFALSEIIKFAKTHKGASCAVLDISKAFDMIPHAAIKDALTRLGLPNHTRELVMSMHENIYTEIKSGNDKIAVNIKRGVKQGDPLSPLLFNCVLDPLLEQLESTGEGISIGSQSVSVLAFADDLVVFGRTPQDLQKKLNMTSQFLSDLGMHVAVEKCSSFQISVRGKSWILLDPKVEISGKMLPQCGPDGHFDYLGLRFSPWKGFEHKKVVGDLHGCLPNIKKLRLKPTQKLELLKRFIIPHYLYRLTVDPPSQGDLQGLDKALRNFTREIFHLPHSTSSAFLHTSPGNGGLGLPRLERVAFYSFLKSMARCRDSGDPVLEALWEQSNVSNRVAEMAHRANIRGPLNIKAIESAKRRAVEDEFRRWASCASQGMGATMFRKDTIGNSWLWKPHLLKGNSRYIDALRLRSNTFGCRAALARATPMSDITCRRCHSANETLGHVLGQCTFVKPQRIHRHNEIVSLCRSEFIDKHPAGRYMIESSFTVDGKRLKPDLILWDAEESYIVDVTVRLEQGNSLGKANMEKILKYECLYPEVLNITGATHCRVLPIVVGSRGSLPPKTLSNLSLLSKRPKHTGLTSVLVALRTSIEMSNRFLDG

SEQ ID NO: 2510 - protein, 1018 aa, Ctenocephalides felis
MSGLSQHERHVHPGVRNDRRQLDRPRSARPEGSPRLRVWTDEDIETLRRVNDQYLNSPNVNVKIRDEHLPHMTRTQISDKRGELGLRTRTGQIIDDPVVGSLAVIAPEHPGGNDHETRHQAAVQVVASQQERERDDLKSWAQHFLVEWEKWQDMEIAEELNEASAQLEDLKQSLEAGVEPGDVYERIDNLVECVLTPVLVNKPPQTSGRKGRKVHGRRRNQGQRRNQRRFNYARHQNLYHNCPNKLVESIISGCNMVDNNIRPPTGDIKTLYDGLWGTAWEGSFPSVEPRPAISVLESLPVIAPNTIRERIKRINAKKAVGPSGVSKADLTRLKGTETVLARLFNIIVWSRYFPKSWRVCTTTLIPKKGKDCSKVENWRPITIASLLARLFSGVIENGFRRCITLNNRQKGFTLENGCFLNIFALSELTKFAKRHNGLSCAVLDISKAFDTIPHAAIRDALARLGLPSHTRELVMSMHENIRTEIKLGNDKITADIKRGVKQGDPLSPLLFNCVLDPLLEQLESNGDDVSIGSLSISVLAFADDLVVFGKTPQDLQAKLDIATKFLADLGMHVAVEKCSTFQFQIRGKSWILSDPQVGISGKTLPQCEPDGHFDYLGLKFSPWKGFEHKKVVGDLHHSLPKIKRLRLKPTQKLELLKRFIIPHYLYRLTVDPPSQGDLQGLDKALRNFVREIFHLPHSTGSAFLHTSPGNGGLGLPRLERVATYSFLRSMVRVRDSGDPFLEALWEQNNVGTKVAEMAYRAGIRGPLTIKGIESAKREAIEDEFRRWASCASQGLGAPCFRKDRIGNSRLWRPHLLKGNSRYIDALRLRTNTFGCKAALARATPMNDIKCQRCHSANETLGHVLGQCSFVKPQRIHRHNEIVTLCRNDFIDKYPAGHYMTEATFTVDGKRLRPDLVLWDGDRSYIVDITVRFEQGNSLGKAYSEKIQKYECLYPEVLNVTGTTHCRVLPIVVGSRGALPPSTLLNISLLSKHPNSTGLTSSLVALRTSIEMSNRFLDG

SEQ ID NO: 2511 - protein, 947 aa, Ctenocephalides felis
MTRTQISDKRGELGLRTRTGQIIDDPVVGSLAVVAPEHPGGNDHETRHQAAVQVVASQQERERDDLKSWAQHFLVEWEKWQDMEIAEELNEASAQLEDLKQSLEAGVEPGDVYERIDNLVECVLTPVLVNKPPQTSGRKGRKVHGRRRNQGQRRNQRRFNYARHQDLYHNCPNKLVESIISGCNMVDNNIRPPTGDIKTLYDGLWGTAWEGSFPSVEPRPAISVLESLPVIAPNTIRERIKRINAKKAVGPSGVSKADLTRLKGTETVLARLFNIIVWSRYFPKSWRVCTTTLIPKKGKDCSKAENWRPITIASLLARLFSGVIENGFRRCITLNNRQKGFTLENGCFLNIFALSELTKFAKRHNGLSCAVLDISKAFDTIPHAAIRDALARLGLPSHTRELVMSMHENIRTEIKLGNDKITVDIKRGVKQGDPLSPLLFNCVLDPLLEQLESNGDDVSIGSQSISVLAFADDLVVFGKTPQDLQAKLDIATKFLADLGMHVAVEKCSTFQFQIRGKSWILSDPQVGISGKTLPQCGPDGHFDYLGLKFSPWKGFEHKKVVGDLHHSLPRIKRLRLKPTQKLELLKRFIIPHYLYRLTVDPPSQGDLQGLDKALRNFVREIFHLPHSTGSAFLHTSPGNGGLGLPRLERVATYSFLRSMVRCRDSGDPFLEALWEQNNVGTKVAEMAYRAGIRGPLTIKAIESAKRGAIEDEFRRWASCASQGLGAPCFRKDRIGNSWLWRPHLLKGNSRYIDALRLRTNTFGCKAALARATPMNDIKCRRCHSANETLGHVLGQCSFVKPQRIHRHNEIVTLCRNDFIDKYPAGHYMTEATFTVDGKRLRPDLVLWDGDRSYIVDITVRFEQGNSLGKAYSEKIQKYECLYPEVLNVTGTTHCRVLPIVVGSRGALPPSTLLNISLLSKHPKSTGLTSSLVALRTSIEMSNRFLDG

SEQ ID NO: 2512 - protein, 949 aa, Ctenocephalides felis
MTILISQISDKRGELGPRTKSGRIDEPAVGCQALVNPEQLDDDDCETRHQLVETQVAASQQDRDGDDLKPWAQQLLKDWEDWRDIEIDEKLNEASAQLEDLRKRLEAGCRPSDVVRHIDNLVECVLTPALTKRPQSTTGKKGSKAHGRRRQNGQRKNRRKFNYARHQDLYNNCPNKLVESIVSGCNAVDNNIRPPTGDIKSLYDGLWGTEWKGSFSFNDPRPEVSVLDSIPIITPNNIRERVMRINAKKAVGPNDVRKADLTRLKGTEAVLARLFNLIVWSGYFPKSWRVCSTTLIPKRGKDCSKAENWRPITIGSLLARLFSGIIEKGFWICITINKRQKGFTLENGCFNNIFALSKIIRFAKTHKGASCAVLDISKAFDMIPHAAIKDALTRLGLPNHTRELVMSMHENIYTEIKSGNDKIAVNIKRGVKEGDPLSPLLFSCVLDPLLEQLENTGEGISIGSQSVSVLAFADDLVVFGRTPQDLQKKLNMTSQFLSDLGMHVAVEKCSSFQISVRGKSWILLDPKVEISGKMLPQCGPDGHFDYLGLRFSPWKGFEHKKVVGDLHGCLPNIKKLRLKPTQKLEMLKRFIIPHYLYRLTVDPPSQGDLQGLDKALRNFTREIFHLPHSTSSAFLHTSPGNGGLGLPRLERVAFYSFLKSMARCRDSGDPVLEALWEQSNVSNRVAEMAHRANIRGPLNIKAIESAKRRAVEDEFRRWASCASQGMGATMFRKDTIGNSWLWKPHLLKGNSRYIDALRLRSNTFGCRAALARATPMSDITCRRCHSANETLGHVLGQCTFVKPQRIHRHNEIVSLCRNEFIDKHPAGRYMIESSFTVDGKRLKPDLILWDAEESYIVDVTVRLEQGNSLGKANMEKILKYECLYPEVLNITGATHCRVLPIVVGSRGSLPPKTLSNLSLLSKRPKHTGLTSVLVALRTSIEMSNRFLDG

SEQ ID NO: 2513 - protein, 1140 aa, Ctenocephalides felis
MANNNNDMIGAGFGTCENASRSEPGEHSDGSGSQIDQDIVVWWPFVAVACPFCPGVCVLASASEVSRHLRRFHPDRKARYVCSNCQQVCGSQGGLTVHARSCKGPRPEEAYKCSECTASFPSKSGLSQHERHAHPGVRNDRRQLNRPRSARPEGSPRLRVWTDEDIETLRRVNDQYLNSPNVNVKIRDEHLPHMTRTQISDKRGELGLRTRTGQIIDDPVVGSLAVVAPEHPGGNDHETRHQAAVQVVASQQERERDDLKSWTQHFLVEWEKWQDMEIAEELNEASAQLEDLKQSLEAGVEPGEVYERIDNLVECVLTPVLVNKPPQTSGRKGRKVHGRRRNRGQRRNQRRFNYARHQDLYHNCPNKLVESIISGCNMVDNNIRPPTGDIKTLYDGLWGTAWEGSFPIVKPKPAISVLESLPVIAPNTIRERIKRINAKKAVGPSGVSKADLTRLKGTETVLAQLFNIIVWSRYFPKSWGVCTTTLIPKKGKDCSKAENWRPITIASLLARLFSGVIENGFRRCITLNNRQKGFTLENGCFLNIFALSELTKFAKRHNGLSCAVLDISKAFDTIPNAAIRDALARLGLPSHTRELVMSMHENIRTEIKLGNDKITVDIKRGVKQGDPLSPLLFNCVLDPLLEQLESNGDGVSIGSQSISVLAFADDLVVFGKTPQDLQAKLDIATKFLADLGMHVAVKKCSSFQFQIRGKSWILSDPQVGISGKTLPQCGPDGPFDYLGLKFSPWKGFEHKKVVGDLHHSLPRIKRLRLKPTQKLELLKRFIIPHYLYRLTVDPPSQGDLQGLDKALRNFVREIFHLPHSTGSAFLHTSPGNGGLGLPRLERVATYSFLRSMVRCRDSGDPFLEALWEQNNVGTKVAEMAYRAGIRGPLTIKAIESAKRGAIEDEFRRWASCASQGLGAPCFRKDRIGNSWLWRPHLLKGNSRYINALRLRTNTFGCKAALARATPMNDIKCRRCHSANETLGHVLGQCFFVKPQRIHRHNEIVTLCRNDFIDKYPAGHYMTEATFTVDGKRLRPDLVLWDGDRSYIVDITVRFEQGNSLGKAYSEKIQKYECLYPEVLNVTGTTHCRVLPIVVGSCGALPPSTLLNISLLSKHPKSTGLTSSLVALRTSIEMSNRFLDG

SEQ ID NO: 2514 - protein, 1140 aa, Ctenocephalides felis
MANNNNDMIGAGFGTCENASRSEPGEHSDGSGSQIDQDIVVWWPFVAVACPFCPGACVLASASEVSRHLRRFHPDRKARYVCSNCQQVCGNQGGLTVHARSCKGPRPEEAHKCSECTASFPSKSGLSQHERHAHPGVRNDRRQLDRPRSARPEGSPRLRVWTDEDIETLRRVNDQYLNSPNVNVKIRDEHLPHMTRTQISDKRGELGLRTRAGQIIDDPVVGSLAVVAPEHPGGNDHETRHQAAVQVVASQQERERDDLKSWAQHFLVEWEKWQDMEIAEELNEASAQLEDLKQSLEAGVEPGDVYERIDNLVECVLTPVLVNKPLQTSGRKGREVHGRRRNRGQRRNQRRFNYARHQDLYHNCPNKLVESIISGCNMVDNNIRPPTGDIKTLYDGLWGTAWEGSFPIVEPKPAISVLESLPVIAPNTIRERIKRINAKKAVGPSGVSKADLTRLKGTETVLARLFNIIVWSRYFPKSWRVCTTTLIPKKGKDCSKAENWRPITIASLLARLFSGVIENGFRRCITLNNRQKGFTLENGCFLNIFALSELTKFAKRHNGLSCAVLDISKAFDTIPHAAIRDALARLGLPSHTRELVMSMHENIRTEIKLGNDKITVDIKRGVKQGDPLSPLLFNCVLDPLLEQLESNGDGVSIGSQSISVLAFADDLVVFGKTPQDLQAKLDIATKFLADLGMHVAVEKCSSFQFQIRGKSWILSDPQVGISGKTLPQCGPDGHFDYLGLKFSPWKGFEHKKVVGDLHHSLPRIKRLRLKPTQKLELLKRFIIPHYLYRLTVDPPSQGDLQGLDKALRNFVREIFHLPHSTGSAFLHTSPGNGGLGLPRLERVATYSFLRSMVRCRDSGDPFLEALWEQNNVGTKVAEMAYRAGIRGPLTIKAIESAKRGAIEDEFRRWASCASQGLGAPCFRKDRIGNSWLWKPHLLKGNSRYIDALRLRTNTFGCKAALARATPMNDIKCRRCHSANETLGHVLGQCSFVKPQRIHRHNEIVTLCRNDFIDKHPAGHYMTEATFTVDGKRLRPDLVLWDGDRSYIVDITVRFEQGNSLGKAYSEKIQKYECLYPEVLNVTGTTHCRVLPIVVGSRGALPPSTLLNISLLSKHPKSTGLTSSLVALRTSIEMSNRFLDG

SEQ ID NO: 2515 - protein, 947 aa, Ctenocephalides felis
MTRTQISDKRGELGLRTKSGRIDEPAVGSQALVNPEQLDDDDCETRHQLVETQVAASQQDRDGDDLKSWAQQLLKDWEDWRDIEIDEKLNEASAQLEDLRKRLEAGCRPSDVVRHIDNLVECVLTPALTKRPQSTTGKKGSKAHGRRRQNGQRKNRRKFNYARHQDLYNNCPNKLVESIVSGCNAVDNNIRPPTGDIKSLYDGLWGTEWKGSFSYNDPRPEVSVLDSIPIITPNNIRERVMRINAKKAVGPSGVRKADLTRLKGTEAVLARLFNLIVWSGYFPKSWRVCSTTLIPKRGKDCSKAENWRPITIGSLLARLFSGIIEKGFRNCITINKRQKGFTLENGCFNNIFALSEIIKFAKTHKGASCAVLDISKAFDMIPHAAIKDALTRLGLPNHTRELVMSMHENIYTEIKSGNDKIAVNIKRGVKQGDPLSPLLFNCVLDPLLEQLESTGEGISIGSQSVSVLAFADDLVVFGRTPQDLQKKLNMTSQFLSDLGMHVAVEKCSSFQISVRGKSWILLDPKVEISGKMLPQCGPDGHFDYLGLRFSPWKGFEHKKVVGDLHGCLPNIKKLRLKPTQKLELLKRFIIPHYLYRLTVDPPSQGDLQGLDKALRNFTREIFHLPHSTSSAFLHTSPGNGGLGLPRLERVAFYSFLKSMARCRDSGDPVLEALWEQSNVSNRVAEMAHRANIRGPLNIKAIESAKRRAVEDEFRRWASCASQGMGATMFRKDTIGNSWLWKPHLLKGNSRYIDALRLRSNTFGCRAALARATPMSDITCRRCHSANETLGHVLGQCTFVKPQRIHRHNEIVSLCRSEFIDKHPAGRYMIESSFTVDGKRLKPDLILWDAEESYIVDVTVRLEQGNSLGKANMEKILKYECLYPEVLNITGATHCRVLPIVVGSRGSLPPKTLSNLSLLSKRPKHTGLTSVLVALRTSIEMSNRFLDG

SEQ ID NO: 2516 - protein, 951 aa, Blattella germanica
MSSEDQNNNSNIDSMTACHFSGKCYKGIKIHISKAHPERYRSLLLNPTLPCSVPTSTIKSSNNQTSPLPDSCKYTKELVKWLDKFDATFDDLTFNNNYDSFVEFLSTATDLMPGPKNPAKKYIEARKNGHFKNNNRQYSDSSNPQRASKNDRLRRKAKFDYDLIQYEYYYQRRKAVRKVLSSTCNNTSSLDKHEVDTYFRTTFETLNNCTRDSYDSLVSPEDSIHLPAPEITRDMVLNSIKKIAIDTSPGPDKILMKAIKTPIAAEIISKILNRMITTGFVPTKLKEAHTILIFKGGDSQDLSRWRPISISSVIRRVISRTLDCIIRHNISLNPYQRGFMMTPGTFININIVDGILHSAASKHQSAALVFLDISRAFDNIGHAHLCATLKHSNLPLSIQQLLINLLINNTTCIELAGKKTNPIKLQCGVMQGDLISPILFNLSINHILNELSDRTLSEKLGFHLTSETDPLSVLCFTDDLVIIGKDVEAASQLVTLTISLLQEIGLNINTKKSQAIILHNGILQEGVIQTTIGDIKSISADEEIKYLGVSFKQALQFNQNDVLTKLKTNLDKLASTHLLQAQQKLTVLNQFICPTLIYPFQAIAIDLIPKSFLLKADKMIRSCVKEILQLPSDTPSSMIYCSNKHKGLSILRASWEAFLQQLNINTTLKSVNDQHVNIIRNYDSIQQKCLSELQLEQEVEHKTVRQLRTILRDKEFSIWCSYPHKGKGVELFKEVPAANNWILQKKGLSSSEWRDIIKMNAMVVPVRSIPGRSSGTTHCRHCSEYETLPHVLGKCPQGELLRIKRHNSIRSLLAAALREKGLEVHEEVHCLADEGSSRRIDIIAINRSKMEAEIIDPTVRFEINSVQPLEVDAEKKQIYEPTCSYFIKKYNIKSINVTGLFFGSRGTITKFFVNWRHKYKLPNSLQEDIVHIIIKSSVAIMKNHLYNLTSI

SEQ ID NO: 2517 - protein, 782 aa, Dermanyssus gallinae
MAERKLAEGDVRSAARILLSTDSFAPFNDHTEQELRKKHPPPLAEASERLGSLQAPVTTRGHTVHHKLVVDAVRSFAVASGPGLDGLRPRHLRDMLDNSVPSSGRLLEEVCSLVASALNGSLPSSCLTTFYGANLTALKKKDGSIRPIACGLTIRRLVAKVAIAISKASVTKALGPRQVGVSIKGGAEAAVHAVRAYIETDGPVRVLAKLDFSNAFNTIRRDVILEEVRLHVPELFPLVWQCYRDPSLLSWCDKEPLKSTNGVQQGDPLGPALFSLGISSLVARMRSPLNIWYLDDGTLGGPAEVVAADILKVIEFANEGGTILNLSKCEVITVGGDIQERDEARKTIAAVLPGCKQVNPAELEVLGAPLSPQSIYKTLTEKRRALLQTRPRLLAMHSQAALCLWRYSLGSPKFNYTLRTSPTSQCPDALQAYDDSTRDILSEVLNIDFTDDTWRRASLPIREGGLGVRSAVELAPICYAASVLEFSPLAEALVDPSAHHRLHIAKQEAESLVKLKLDPGPWEKRVTQRVLDNYRCKVIAREITESLESSTEKAVFLAARDTFSGGFLRALPSPQLGTMLDNVSFRMVSALRIGGSICEPHICKACGKPVEKNGLHPLSCIKSQGRAPRHTEINAVIQRALRRAGIPSMLEPRLGLHDDKRPDGVTIPPWKKGKCLVWDATVSCTIAPSYVCHSATEAGWVAEHAEKEKWRKYTELESRYNFVPIAMETMGPVSRRTRTFIKDLSDRIQANTGDAREGDFLRQLLSLAVCRGNAASILGAMG

SEQ ID NO: 2518 - protein, 975 aa, Dermanyssus gallinae
MSSQPSAHINPDQPQLRSQQSYTCEMCKKSLRSLRGLRMHMTRLHPTYTRSSSSQLIRDSSSPASLSAQDDPNRQLDANLDSITLIRSLAQVHRNIKLVKVIPRGVREICCAAYAKALSNFNTTKDNASWEKLLIMPILMLRIPARRHNDRTLCQIIRNNVTESRWKTLASLLDECNRNIIQNDTPLDTDHDRGKMAERKLAEGDVRSAARILHSTDSFAPFSDHTEQELRRKHPLPLSDASEHLGSLQAPSTTGRHTIHHKLVFDAVRSFAVASGLDGLRPRHLRDMLDNSVPSSGRLLEEVCSLVASALNGSLPSLCLTIFYGANLTALKKKDGSIRPIACGLTIRRLVAKVAIAITKTSILKALGPKQVGVSIKGGAEAAVHAVRAYMETDGPVRVLVKLDFSNAFNTIRRDVILEEVRLHVPELLPLVWQSYRDPSLLSWYDKEPLKSTNGVQQGDPLGPALFSLGISSLVSQMRSPLNIWYLDDGTLGGPAELVAADILKVLQFANEGGTVLNISKCEVITVGADTKEQDEAYKIIVAVLPGCRRVNPVELEVLGAPLSPQSIFKTLRDKRRALLQTRPRLLAMHSQAALCLWRYSLGSPKFNYTLRTSPTSQCPDALQSYDDSTRDILSEVLNIDFTDSTWRRASLPIREGGLGIRSAAELAPICYAASLLEFGQLAETLVDPSAHHRLYIAKQTAESLVKLRLDPGPWEKHTTQRVLDNYRCKVIAREIIESLESPTEKAVFLAARDTFSGGFLRALPSPQLGTMLDNISFRMVSALRIGGPICEPHICKACGKPVEKDGLHPLSCIKRQGRAPRHTEINAIIQRALRRAGIPSMLEPRLGLHDDKRPDGVTIPPWEKGKCLVWDATVSCTAAPSYLCHSATEAGWVAEHAEKEKWRKYKELEPRYNFVPIAMETMGPVSRSTRKFIKDLGDRIRANTGDLREDEFLRQLLSLAVCRGNAASILGAMG

SEQ ID NO: 2519 - protein, 977 aa, Dermanyssus gallinae
MSSLPSAHTNPDQPQLRSQQSYTCEICRKCLRSLRGLRMHTTRLHPADTRPPLSQPLRNTSSPASLSAQDDPNRQSDTTLDSITLIRSLARVHRNIKLVKVIPRGVREICCAAYAEALSNFNTRKDNASWEKLLIMPMLLLRIPALRNNDRSLCQIIRKNVTESRWKTLASLLDECNRNIIQYDTSLDTDHDRGKMAERKLAEGDVRSAARILLSTDSFAPFNDHTEQELRKKHPPPLADASERLGSLQAPVTTRGHTVHHKLVVDAVRSFAVASGPGLDGLRPRHLRDMLDNSVPSSGRLLEEVCSLVASALNGSLPSSCLTTFYGANLTALKKKDGSIRPIACGLTIRRLVAKVAIAISKGSITKALGPRQVGVSIKGGAEAAVHAVRAYIETDGPVRVLVKLDFSNAFNTIRRDVILEEVRLHVPELFPLVWQCYRDPSLLSWCDKEPLKSTNGVQQGDPLGPALFSLGISSLVARMRSPLNIWYLDDGTLGGPAEVVAADILKVIEFANEGGTILNLSKCEVITVGGDTQERDEARKAIAAVLPGCKQVNPAELEVLGAPLSPQSIYKTLTEKRRALLQTRPRLLAMHSQAALCLWRYSLGSPKFNYTLRTSPTSQCPDALQAYDDSTRDILSEVLNIDFTDDTWRRASLPIREGGLGVRSAVELAPICYAASVLEFSPLAEALVDPSAHHRLHIAKQEAESLVKLKLDPGPWEKRVTQRVLDNYRCKVIAREITESLESSTEKAVFLAARDTFSGGFLRALPSPQLGTMLDNVSFRMVSALRIGGSICEPHICKACGKPVEKNGLHPLSCIKSQGRAPRHTEINAVIQRALRRAGIPSMLEPRLGLHDDKRPDGVTIPPWKKGKCLVWDATVSCTIAPSYVCHSATEAGWVAEHAEKEKCRKYTELESRYNFVPIAMETMGPVSRRTRTFIKDLSDRIQANTGDAREGDFLRQLLSLAVCRGNAASILGAMG

SEQ ID NO: 2520 - protein, 977 aa, Dermanyssus gallinae
MSSLPSAHTNPDQPQLRSQQSYTCEICRKCLRSLRGLRMHTTRLHPADTRPPLSQPLRNTSSPASLSAQDDPNRQSDTTLDSITLIRSLARVHRNIKLVKVIPRGVREICCAAYAEALSNFNTRKDNASWEKLLIMPILLLRIPALRNNDRSLCQIIRKNVTESRWKTLASLLDECNRNIIQYDTSLDTDHDRGKMAERKLAEGDVRSAARILLSTDSFAPFNDHTEQELRKKHPPPLADASERLGSLQAPVTTRGHTVHHKLVVDAVRSFAVASGPGLDGLRPRHLRDMLDNSVPSSGRLLEEVCSLVASALNGSLPSSCLTTFYGANLTALKKKDGSIRPIACGLTIRRLVAKVAIAISKGSVTKALGPRQVGVSIKGGAEAAVHAVRAYIETDGPVRVLVKLDFSNAFNTIRRDVILEEVRLHVPELFPLVWQCYRDPSLLSWCDKEPLKSTNGVQQGDPLGPALFSLGISSLVARMRSPLNIWYLDDGTLGGPAEVVAADILKVIEFANEGGTILNLSKCEVITVGGDTQERDEARKTIAAVLPGCKQVNPAELEVLGAPLSPQSIYKTLTEKRRALLQTRPRLLAMHSQAALCLWRYSLGSPKFNYTLRTSPTSQCPDALQAYDDSTRDILSEVLNIDFTDDTWRRASLPIREGGLGVRSAVELAPICYAASVLEFSPLAEALVDPSAHHRLHIAKQEAESLVKLKLDPGPWEKRVTQRVLDNYRCKVIAREITESLESSTEKAVFLAARDTFSGGFLRALPSPQLGTMLDNVSFRMVSALRIGGSICEPHICKACGKPVEKNGLHPLSCIKSQGRAPRHTEINAVIQRALRRAGIPSMLEPRLGLHDDKRPDGVTIPPWKKGKCLVWDATVSCTIAPSYVCHSATEAGWVAEHAEKEKWRKYTELESRYNFVPIAMETMGPVSRRTRTFIKDLSDRIQANTGDAREGDFLRQLLSLAVCRGNAASILGAMG

SEQ ID NO: 2521 - protein, 977 aa, Dermanyssus gallinae
MSSQPSAHINPDQPQLRSQQSYTCEMCKKSLRSLRGLRMHMTRLHPTYTRSSSSQLIRDSSSPASLSAQDDPNRQLDANLDSITLIRSLAQVHRNIKLVKVIPRGVREICCAAYAEALSNFNTTKDNASWEKLLIMPILMLRIPARRHNDRTLCQIIRNNVTESRWKTLASLLDECNRNIIQNDTPLDTDHDRGKMAERKLAEGDVRSAARILHSTDSFAPFSDHTEQELRRKHPLPLSDASEHLGSLQAPSTTGRHTIHHKLVFDAVRSFAVASGSGLDGLRPRHLRDMLDNSVPSSGRLLEEVCSLVASALNGSLPSLCLTIFYGANLTALKKEDGSIRPIACGLTIRRLVAKVAIAITKTSILKALGPKQVGVSIKGGAEAAVHAVRAYMETDGPVRVLVKLDFSNAFNTIRRDVILEEVRLHVPELLPLVWQSYRDPSLLSWYDKEPLKSTNGVQQGDPLGPALFSLGISSLVSQMRSPLNIWYLDDGTLGGPAELVAADILKVLQFANEGGTVFNISKCEVITVGADTKEQDEAYKTIVAVLPGCRRVNPVELEVLGAPLSPQSIFKTLRDKRRALLQTRPRLLAMHSQAALCLWRYSLGSPKFNYTLRTSPTSQCPDALQSYDDSTRDILSEVLNIDFTDSTWRRASLPIREGGLGIRSAAELAPICYAASLLEFGQLAETLVDPSAHHRLYIAKQTAESLVKLRLDPGPWEKHTMQRVLDNYRCKVIAREIIESLESPTEKAVFLAARDTFSGGFLRALPSPQLGTMLDNISFRMVSALRIGGPICEPHICKACGKPVEKDGLHPLSCIKSQGRAPRHTEINAIIQRALRRAGIPSMLEPRLGLHDDKRPDGVTIPPWEKGKCLVWDATVSCTAAPSYLCHSATEAGWVAEHAEKEKWRKYKELEPRYNFVPIAMETMGPVSRSTRKFIKDLGDRIRANTGDIREDEFLRQLLSLAVCRGNAASILGAMG

SEQ ID NO: 2522 - protein, 977 aa, Dermanyssus gallinae
MSSQPSAHINPDQPQLRSQQSYTCEMCKKSLRSLRGLRMHMTRLHPTYTRSSSSQLIRDSSSPASLSAQDDPNRQLDANLDSITLIRSLAQVHRNIKLVKVIPRGVREICCAAYAEALSNFNTTKDNASWEKLLIMPILMLRIPARRHNDRTLCQIIRNNVTESRWKTLASLLDECNRNIIQNDTPLDTDHDRGKMAERKLAEGDVRSAARILHSTDSFAPFSDHTEQELRRKHPLPLSDASEHLGSLQAPSTTGRHTIHHKLVFDAVRSFAVASGSGLDGLRPRHLRDMLDNSVPSSGRLLEEVCSLVASALNGSLPSLCLTIFYGANLTALKKKDGSIRPIACGLTIRRLVAKVAIAITKTSILKALGPKQVGVSIKGGAEAAVHAVRAYMETDGPVRVLVKLDFSNAFNTIRRDVILEEVRLHVPELLPLVWQSYRDPSLLSWYDKEPLKSTNGVQQGDPLGPALFSLGISSLVSQMRSPLNIWYLDDGTLGGPAELVAADILKVLQFANEGGTVLNISKCEVITVGADTKEQDEAYKTIVAVLPGCRRVNPVELEVLGAPLSPQSTFKTLRDKRRALLQTRPRLLAMHSQAALCLWRYSLGSPKFNYTLRTSPTSQCPDALQSYDDSTRDILSEVLNIDFTDSTWRRASLPIREGGLGIRSAAELAPICYAASLLEFGQLAETLVDPSAHHRLYIAKQTAESLVKLRLDPGPWEKHTTQRVLDNYRCKVIAREIIESLESPTEKAVFLAARDTFSGGFLRALPSPQLGTMLDNISFRMVSALRIGGPICEPHICKACGKPVEKDGLHPLSCIKSQGRAPRHTEINAIIQRALRRAGIPSMLEPRLGLHDDKRPDGVTIPPWEKGKCLVWDATVSCTAAPSYLCHSATEAGWVAEHAEKEKCRKYKELEPRYNFVPIAMETMGPVSRSTRKFIKDLGDRIRANTGDIREDEFLRQLLSLAVCRGNAASILGAMG

SEQ ID NO: 2523 - protein, 977 aa, Dermanyssus gallinae
MSSLPSAHTNPDQPQLRSQQSYTCEICRKSLRSLRGLRMHTTRLHPADTRPPLSHPLRDTSSPASLSAQDDPNRPSDTTLDSITLIRSLARVHRNVKLVKVIPRGVREICCAAYAEALSNFNTRKDNASWEKLLIMPILLLRIPALRNNDRSLCQIIRKNVTESRWKTLASLLDECNRNIIQYDTYLDTDHGRGKMAERKLAEGDVRSAARILLSTDSFAPFNDHTEQELRKKHPPPLADASERLGSLQAPVTTRGHTVHHKLVVDAVRSFAVASGPGLDGLRPRHLRDMLDNSVPSSGRLLEEVCSLVASALNGSLPSSCMTTFYGANLTALKKKDGSIRPIACGLTIRRLVAKVAIAISKGSITKALGPRQVGVSIKGGAEAAVHAVRAYIETDGPVRVLVKLDFSNAFNTIRRDVILEEVRLHVPELFPLVWQCYRDPSLLSWCDKEPLKSTNGVQQGDPLGPALFSLGISSLVARMRSPLNIWYLDDGTLGGPAEVVAADILKVIEFANEGGTILNLSKCEVITVGGDTQERDEARKTIAAVLPGCKQVNRAELEVLGAPLSPQSINKTLTEKRRALLQTRPRLLAMHSQAALCLWRYSLGSSKFNYTLRTSPTSQCPDALQAYDDSTRDILSEVLNIDFTDDTWRRASLPIREGGLGVRSAVELAPICYAASVLEFSPLAEALVDPSAHHRLHIAKQEAESLVKLKLDPGPWEKRVTQRVLDNYRCKVIAREITESLESSTEKAVFLAARDTFSGGFLRALPPPQLGTMLDNVSFRMVSALRIGGSICEPHICKACGKPVEKNGLHPLSCIKSQGRAPRHTEINAVIQRALRRAGIPSMLEPRLGLHDDKRPDGVTIPPWKKGKCLVWDATVSCTAAPSYVCHSATEAGWVAEHAEKEKWRKYTELESRYNFVPIAMETMGPVSRRTRTFIKDLSDRIQANTGDAREGDFLRQLLSLAVCRGNAASILGAMG

SEQ ID NO: 2524 - protein, 842 aa, Dermanyssus gallinae
MPMLLLRIPALRNNDRSLCQIIRKNVTESRWKTLASLLDECNRNIIQYDTSLDTDHDRGKMAERKLAEGDVRSAARILLSTDSFAPFNDHTEQELRKKHPPPLADASERLGSLQAPVTTRGHTVHHKLVVDAVRSFAVASGPGLDGLRPRHLRDMLDNSVPSSGRLLEEVCSLVASALNGSLPSSCLTTFYGANLTALKKKDGSIRPIACGLTIRRLVAKVAIAISKGSITKALGPRQVGVSIKGGAEAAVHAVRAYIETDGPVRVLVKLDFSNAFNTIRRDVILEEVRLHVPELFPLVWQCYRDPSLLSWCDKEPHKSTNGVQQGDPLGPALFSLGISSLVARMRSPLNIWYLDDGTLGGPAEVVAADIHKVIEFANEGGTILNLSKCEVITVGGDTQERDEARKAIAAVLPGCKQVNPAELEVLGAPLSPQSIYKTLTEKRRALLQTRPRLLAMHSQAALCLWRYSLGSPKFNYTLRTSPTSQCPDALQAYDDSTRDILSEVLNIDFTDDTWRRASLPIREGGLGVRSAVELAPICYAASVLEFSPLAEALVDPSAHHRLHIAKQEAESLVKLKLDPGPWEKRVTQRVLDNYRCKVIAREITESLESSTEKAVFLAARDTFSGGFLRALPSPQLGTMLDNVSFRMVSALRIGGSICEPHICKACGKPVEKNGLHPLSCIKSQGRAPRHTEINAVIQRALRRAGIPSILEPRLGLHDDKRPDGVTIPPWKKGKCLVWDATVSCTIAPSYVCHSATEAGWVAEHAEKEKCRKYTELESRYNFVPIAMETMGPVSRRTRTFIKDLSDRIQANTGDARKGDFLRQLLSLAVCRGNAASILGAMG

SEQ ID NO: 2525 - protein, 906 aa, Dermanyssus gallinae
MSSLPSAHTNPDQPQLRSQQSYTCEICRKCLRSLRGLRMHTTRLHPADTRPPLSQPLRNTSSPASLSAQDDPNRQSDTTLDSITLIRSLARVHRNIKLVKVIPRGVREICCAAYAEALSNFNTRKDNASWEKLLIMPILLLRIPALRNNDRSLCQIIRKNVTESRWKTLASLLDECNRNIIQYDTSLDTDHDRGKMAERKLAEGDVCSAARILLSTDSFAPFNDHTEQELRKKHPPPLADASERLGSLQAPVTTRGHTVHHKLVVDAVRSFAVASGPGLDGLRPRHLRDMLDNSVPSSGRLLEEVCSLVASALNGSLPSSCLTTFYGANLTALKKKDGSIRPIACGLTIRRLVAKVAIAISKGSITKALGPRQVGVSIKGGAEAAVHAVRAYIETDGPVRVLVKLDFSNAFNTIRRDVILEEVRLHVPELFPLVWQCYRDPSLLSWCDKEPLKSTNGVQQGDPLGPALFSLGISSLVARMRSPLNIWYLDDGTLGGPAEVVAADILKVIEFANDGGTILNLSKCEVITVGGDTQERDEARKTIAAVLPGCKQVNPAELEVLGAPLSPQSIYKTLTEKRRALLQTRPRLLAMHSQVALCLWRYSLGSPKFNYTLRTSPTSQCPDALQAYDDSTRDILSEVLNIDFTDDTWRRASLPIREGGLGVRSAVELAPICYAASVLEFSPLAEALVDPSAHHRLHIAQQEAESLVKLKLDPGPWEKRVTQRVLDNYRCKVIAREITESLESSTEKAVFLAARDTFSGGFLRALPSPQLGAMLDNVSFRMVSALRIGGSICEPHICKACGKPVEKNGLHPLSCIKSQGRAPRHTEINAVIQRALRRAGIPSMLEPRLGLHDDKRPDGVTIPPWKKGKCLVWDATVSCTIAPSYVCHSATEPGWVAEHAEKETIK

SEQ ID NO: 2526 - protein, 977 aa, Dermanyssus gallinae
MSSQPSAHINPDQPQLRSQQSYTCEMCKKSLRSLRGLRMHMTRLRPTYTRSSSSQLIRDSSSPASLSAQDDPNRQLDANLDSITLIRSLARVHRNIKLVKVIPRGVREICCAAYAEALSNFNTTKDNASWEKLLIMPILMLRIPARRHNDRTLCQIFRNNVTESRWKTLASLLDECNRNIIQNDTPLDTDHDRGKMAERKLAEGDVRSAARILHSTDSFAPFSDHTEQDLRRKHPLPLSDASEHLGFLQAPSTTGRHTIHHKLVFDAVRSFAVASGSGLDGLRPRHLRDMLDNSVPSSGRLLEEVCSLVASALNGSLPSLCLTIFYGANLTALKKKDGSIRPIACGLTIRRLVAKVAIAITKTSIMIALGPKQVGVSIKGGAEAAVHAVRAYMETDGPVRVLVKLDFSNAFNTIRRDVILEEVRLHVPELLPLVWQSYRDPSLLSWYDKEPLKSTNGVQQGDPLGPALFSLGISSLVSQMRSPLNIWYLDDGTLGGPAEVVAADILKVLRFANEGGTVLNISKCEVITVGADTKEQDEAYKTIVAVLPGCRRVNPVELEVLGAPLSPQSIFKTLRDKRRALLQTRPRLLAMHSQAALCLWRYSLGSPKFNYTLRTSPTSQCPDALQSYDDSTRDILSEVLNIDFTDSTWRRASLPIREGGLGIRSATELAPICYVASLMEFGQLAETLVDPSAHHQLYIAKQTAESLVKLRLDPGPWEKHTTQRVLDNYRCKVIAREIIESLESPIEKAVFLAARDTFSGGFLRTLPSPQLGTMLDNISFRMVSALRIGGPICEPHICKACGKPVEKDGLHPLSCIKSQGRAPRHIKINAIIQRTLRRAGIPSMLEPRLGLHDDKRPDGVTIPPWEKGKCLVWDATVSCTAAPSYLCHSATKAGWVAEHAEKEKWRKYTELEPRYNFVPIAVETMGPVSRSTRKFIKDLGDRIRANTGDIREDEFLRQLLSLAVCRGNAASILGAMG

SEQ ID NO: 2527 - protein, 977 aa, Dermanyssus gallinae
MSSQPSAHINPDQPQLRSQQLYTCEMCKKSLRSHRGLRMHMTRLHPTYTRSSSSQLIRDSSSPASLSAQDDPNRQLDANLDSITLIRSLAQVHRNIKLVKVIPRGVREICCAAYAEALSNFNTTKDNASWEKLLIMPTLMLRIPARRHNDRTLCQIIRNNVTESRWKTLESLLDECNRNIIQNDTPLDTDHDRGKMAERKLAEGDVRSAARILHSTDSFAPFSDHTEQELRRKHPLSLSDASEHLGSLQAPSTTGRHTIHHKLVFDAVRSFAVASGSGLDGLRPRHLRDMLDNSVPSSGRLLEEVCSLVASALNGSLPSLCLTIFYGANLTALKKKDGSIRPIACGLTIRRRVAKVAIAITKPSIMKALGPKQVGVSIKGGAEAAVHAVRAYMETDGPVRVLVKLDFSNAFNTIRRDVILEEVRLHVPELLPLVWQSYRDPSLLSWYDKEPLKSTNGVQQGDPLGPALFSLGISSLVSQMRSPLNIWYLDDGTLGGPAEVVAADILKVLQFANEGGTVLNISKCEVITVGADTKEQDKAYKTIVAVLPGCRRVNPVDLEVLGAPLSPQSIFKTVRDKRRALLQTRPRLLAMHSQAALCLWRYSLGSPKFNYTLRTSPTSQCPDALQSYDDSTRDILSEVLNIDFTDSTWRRASLPIREGGLGIRSATELAPICYAASLLEFGQLAETLVDPSAHHRLYIAKQTAESLVKLRLDPGPWEKHTTQRVLDNYRCKVIAREIIESLESPTEKAVFLAARDTFSGGFLRALPSPQLGTMLDNISFRIVSALRIGGPICEPHICKACGKPVEKDGLHPLSCIKSQGRAPRHTEINAIIQRALRRAGIPSMLEPRLGLHDDKRPDGVTIPPWEKGKRLVWDATVSCTAAPSYLCHSATEAGWVAEHAEKEKWRKYTELEPRYNFVPIAMETMGPASKSTRKFIKDLGDRIRANTGDIREDEFLRQLLSLAVCRGNAASILGSMG

SEQ ID NO: 2528 - protein, 977 aa, Dermanyssus gallinae
MSSQPSAHINPDQPQLRSQQSYTCEMCKKSLRSLRGLRMHMTRLHPTYTRSSSSQLIRDSSSPASLSAQDDPNRQLDANLDSITLIRSLAQVHRNIKLVKVIPRGVREICCAAYAEALSNFNTTKDNASWEKLLIMPILMLRIPARRHNDRTLCQIIRNNVTESRWKTLASLLDECNRNIIQNDTPLDTDHDRGKMAERKLAEGDVRSAARILHSTDSFAPFSDHTEQELRRKHPLPLSDASEHLGSLQAPSTTGRHTIHHKLVFDAVRSFAVASGSGLDGLRPRHLRDMLDNSVPSSGRLLEEVCSLVASALNGSLPSLCLTIFYGANLTALKKKDGSIRPIACGLTIRRLVAKVAIAITKTSILKALGPKQVGVSIKGGAEAAVHAVRAYMETDGPVRVLVKLDFSNAFNTIRRDVILEEVRLHVPELLPLVWQSYRDPSLLSWYDKEPLKSTNGVQQGDPLGPALFSLGISSLVSQMRSPLNIWYLDDGTLGGPAELVAADILKVLQFANEGGTVLNISKCEVITVGADTKEQDEAYKTIVAVLPGCRRVNPVELEVLGAPLSPQSIFKTLRDKRRALLQTRPRLLAMHSQAALCLWRYSLGSPKFNYTLRTSPTSQCPDALQSYDDSTRDILSEVLNIDFTDSTWRRASLPIREGGLGIRSAAELAPICYAASLLEFGQLAETLVDPSAHHRLYIAKQTAESLVKLRLDPGPWEKHTTQRVLDNYRCKVIAREIIESLESPTEKAVFLAARDTFSGGFLRALPSPQLGTMLDNISFRMVSALRIGGPICEPHICKACGKPVEKDGLHPLSCIKSQGRAPRHTEINAIIQRALRRAGIPSMLEPRLGLHDDKRPDGVTIPPWEKGKCLVWDATVSCTAAPSYLCHSATEAGWVAEHAEKEKWRKYKELEPRYNFVPIAMETMGPVSRSTRKFIKDLGDRIRANTGDIREDEFLRQLLSLAVCRGNAASILGAMG

SEQ ID NO: 2529 - protein, 977 aa, Dermanyssus gallinae
MSSLPSAHTNPDQPQLRSQQSYTCEICRKCLRSLRGLRMHTTRLHPADTRPPLSQPLRNTSSPASLSAQDDPNRQPDTTLDSITLIRSLARVHRNIKLVKVIPRGVREICCAAYAEALSNFNTRKDNASWEKLLIMPILLLRIPALRNNDRSLCQIIRKNVTESRWKTLASLLDECNRNIIQYDTSLDTDHDRGKMAERKLAEGDVRSAARILLSTDSFAPFNNHTEQELRKKHPPPLADASERLGSLQAPVTTRGHTVHHKLVVDAVRSFAVASGPGLDGLRPRHLRDMLDNSVPSSGRLLEEVCSLVASALNGSLPSSCLTTFYGANLTALKKKDGSIRPIACGLTIRRLVAKVAIAISKGSIAKALGPRQVGVSIKGGAEAAVHAVRAYIETDGPVRVLVKLDFSNAFNTIRRDVILEEVRLHVPELFPLVWQCYRDPSLLSWCDKEPLKSTNGVQQGDPLGPALFSLGISSLVARMRSPLNIWYLDDGTLGGPAEVVAADILKVIEFANEGGTILNLSKCEVITVGGDTQERDEARKTIAAVLPGCKQVNPAELEVLGAPLSPQRVYKTLTEKRRALLQTRPRLLAMHSQAALCLWRYSLGSPKFNYTLRTSPTSQCPDALQAYDDSTRDILSEVLNIDFTDDTWRRASLPIREGGLGVRSAVELAPICYAASVLEFSPLAEALVDPSAHHRLHIAKQEAESLVKLKLDPGPWEKRVTQRVLDNYRCKVIAREITESLESSTEKAVFLAARDTFSGGFLRALPSPQLGTMLDNVSFRMVSALRIGGSICEPHICKACGKPVEKNGLHPLSCIKSQGRAPRHTEINAVIQRALRRAGIPSMLEPRLGLHDDKRPDGVTIPPWKKGKCLVWDATVSCTIAPSYVCHSATEAGWVAEHAEKEKWRKYTELESRYNFVPIAMETMGPVSRRTRTFIKDLSDRIQANTGDAREGDFLRQLLSLAVCRGNAASILGAMG

SEQ ID NO: 2530 - protein, 977 aa, Dermanyssus gallinae
MSSLPSAHTNPDQPQLRSQQSYTCEICRKCLRSLRGLRMHTTRLHPADTRPPLSQPLRNTSSPASLSAQDDPNRQSDTTVDSITLIRSLARVHRNIKLVKVIPRGVREICCAAYAEALSNFNTRKDNASWEKLLIMPMLLLRIPALRNNDRSLCQIIRKNVTESRWKTLASLLDECNRNIIQYDTSLDTDHDRGKMAERKLAEGDVRSAARILLSTDSFAPFNDHTEQELRKEHPPPLADASERLGSLQAPVTTRRHTVHHKLVVDAVRSFAVASGPGLDGLRPRHLRDMLDNSVPSSGRLLEEVCSLVASALNGSLPSSCLTTFYGANLTALKKKDGSIRPIACGLTIRRLVAKVAIAISKGSITKALGSRQVGVSIKGGAEAAVHAVRAYIETDGPVRVLVKLDFSNAFNTIRRDLILEEVRLHVPELFPLVWQCYRDPSLLSWCDKEPLKSTNGVQQGDPLGPALFSLGISSLVARMRSPLNIWYLDDGTLGGPAEVVAADILKVIEFANEGGTILNLSKCEVITVGGDTQERDEARKTIAAVLPGCKQVNPAELEVLGAPLSPQSIYKTLTEKRRALLQTRPRLLAMHSQAALCLWRYSLGSPKFNYTLRTSPTSQCPDALQAYDDSTRDILSEVLNIDFTDDTWRRASLPIREGGLGVRSAVELAPICYAASVLEFSPLAKALVDPSAHHRLHIAKQEAESLVKLKLDPGPWEKRVTQRVLDNYRCKVIAREITESLESSMEKAVFLAARDTFSGGFLRALPSPQLGTMLDNVSFRMVSALRIGGSICEPHICKACGKPVEKSGLHPLSCIKSQGRAPRHTEINAVIQRALRRAGIPSMLEPRLGLHDDKRPDGVTIPPWKKGKCLVWDATVSCTIAPSYVCHSATEAGWVAEHAEKEKCRKYTELESRYNFVPIAMETMGPVSRRTRTFIKDLSDRIQANTGDAREGDFLRQLLSLAVCRGNAASILGAMG

SEQ ID NO: 2531 - protein, 977 aa, Dermanyssus gallinae
MSSLPSAHTNPDQPQLRSQQSYTCEICRKCLRSLRGLRMHTTRLHPADTRPPLSQPLRNTSSPASLSAQDDPNRQPDTTLDSITLIRSLARVHRNIKLVKVIPRGVREICCAAYAEALSNFNTRKDNASWEKLLIMPILLLRIPALRNNDRSLCQIIRKNVTESRWKTLASLLDECNRNIIQYDTSLDTDHDRGKMAERKLAEGDVRSAARILLSTDSFAPFNNHTEQELRKKHPPPLADASERLGSLQAPVTTRGHTVHHKLVVDAVRSFAVASGPGLDGLRPRHLRDMLDNSVPSSGRLLEEVCSLVASALNGSLPSSCLTTFYGANLTALKKKDGSIRPIACGLTIRRLVAKVAIAISKGSIAKALGPRQVGVSIKGGAEAAVHAVRAYIETDGPVRVLVKLDFSNAFNTIRRDVILEEVRLHVPELFPLVWQCYRDPSLLSWCDKEPLKSTNGVQQGDPLGPALFSLGISSLVARMRSPLNIWYLDDGTLGGPAEVVAADILKVIEFANEGGTILNLSKCEVITVGGDTQERDEARKTIAAVLPGCKQVNPAELEVLGAPLSPQRVYKTLTEKRRALLQTRPRLLAMHSQAALCLWRYSLGSPKFNYTLRTSPTSQCPDALQAYDDSTRDILSEVLNIDFTDDTWRRASLPIREGGLGVRSAVELAPICYAASVLEFSPLAEALVDPSAHHRLHIAKQEAESLVKLKLDPGPWEKRVTQRVLDNYRCKVIAREITESLESSTEKAVFLAARDTFSGGFLRALPSPQLGTMLDNISFRMVSALRIGGQICEPHICKACGKPVEKDGLHPLSCIKSQGRAPRHTELNSIIQRALRKAGIPSMLEPRLGLHDDKRPDGVTIAPWEKGKCLVWDATVSCTAAPSYLCHSATEAGWVAEHAEKEKWRKYTELEHRYNFVPIAMETLGPVSRSTRKFIKDLGDRIRANTGDIREDEFLRQLLSLAVCRGNAASILSAMG

SEQ ID NO: 2532 - protein, 977 aa, Dermanyssus gallinae
MSSLPSAHTNPDQPQLRSQQSYTCEICRKCLRSLRGLRMHTTRLHPADTRPPLSQPLRNTSSPASLSAQDDPNRQSDTTLDSITLIRSLARVHRNIKLVKVIPRGVREICCAAYAEALSNFNTRKDNASWEKLLIMPILLLRIPALRNNDQSLCQIIRKNVTESRWKTLASLLDECNRNIIQYDTSLDTDHDRGKMAERKLAEGDVRSAARILLSTDSFAPFNDHTEQELRKKHPPPLADASERLGSLQAPVTTRGHTVHHKLVVDAVRSFAVASGPGLDGLRPRHLRDMLDNSVPSSGRLLEEVCSLVASALNGGLPSSCLTTFYGANLTALKKKDGSIRPIACGLTIRRLVAKVAIAISKGSITKALGPRQVGVSIKGGAEAAVHAVRAYIETDGPVRVLVKLDFSNAFNTIRRDVILEEVRLHVPELFPLVWQCYRDPSLLSWCDKEPLKSTNGVQQGDPLGPALFSLGISSLVARMRSPLNIWYLDDGTLGGPAEVVAADILKVIEFANEGGTILNLSKCEVITVKGDTQERDEARKTIAAVLPGCKQVNPAELEVLGAPLSPQSIYKTLTEKRRALLQTRPRLLAMHSQAALCLWRYSLGSPKFNYTLRTSPTSQCPDDLQAYDDSTRDILSEVLNIDFTDDTWRRASLPIREGGLGVRSAVELAPICYAASVLEFSPLAEALVDPSAHHRLHIAKQEAESLVKLKLDPGPWEKRVTQRVLDNYRCKVIAREITESLESSTEKAVFLAARDTFSGGFLRALPSPQLGTMLDNVSFRMVSALRIGGSICEPHICKACGKPVEKNGLHPLSCIKSQGRAPRHTEINAVIQRALRRAGIPSMLEPRLGLHDDKRPDGVTIPPWKKGKCLVWDATVSCTIAPSYVCHSATEAGWVAEHAEKEKWRKYTELESRYNFVPIAMETMGPVSRRTRTFIKDLSDRIQANTGDAREGDFLRQLLSLAVCRGNAASILGAMG

SEQ ID NO: 2533 - protein, 977 aa, Dermanyssus gallinae
MSSLPSAHTNPDQPQLRSQQSYTCEICRKCLRSLRGLRMHTTRLHPADTRPPLSQPLRNTSSPASLSAQDDPNRQSDTTLDSITLIRSLARVHRNIKLVKVIPRGVREICCAAYAEALSNFNTRKDNASWEKLLIMPILLLRIPALRNNDRSLCQIIKQNVTESRWKTLASLLDECNRNIIQYDTSLDTEDDRGKMAERKLAEGDVRSAARILLSTDSFAPLNDHTEQELRKKHPPPLADASKRLGSLQAPVTTRGHTVHHKLVVDAVRSFAVASGPGLDGLRPRHLRDMLDNSVPSSGRLLEEVCSLVASALNGSLPSSCLTTFYGANLTALKKKDGSIRPIACGLTIRRLVAKVAIAISKGSVTKALGPRQVGVSIKGGAEAAVHAVRAYIETDGPVRVLVKLDFSNAFNTIRRDVILEEVRLHVPELFPLVWQCYRDPSLLSWCDKEPLKSTNGVQQGDPLGPALFSLGISSLVARMRSPLNIWYLDDGTLGGPAEVVAADILKVIEFANEGGTILNLSKCEVITVGGDTQERDEARKTIAAVLPGCKQANPAELEVLGAPLSPQSIYKTLTEKRRALLQTRPRLLAMHSQAALCLWRYSLGSPKFNYTLRTSPTSQCPDALQAYDDSTRDILSEVLNIDFTDDTWRRASLPIREGGLGVRSAVELAPICYAASVLEFSPLAEALVDPSAHHRLHIAKQEAESLVKLKLDPGPWEKRVTQRVLDNYRCKVIAREITESLESSTEKAVFLAARDTFSGGFLRALPSPQLGTMLDNVSFRMVSALRIGGSICKPHICKACGKPVEKNGLHPLSCIKSQGRAPRHTEINAVIQRALRRAGIPSMLEPRLGLHDDKRPDGVTIPPWKKGKCLVWDATVSCTIAPSYVCHSATEAGWVAEHAEKEKWRKYTEFESRYNFVPIAMETMGPVSRRTRTFIKDLSDRIQANTGDAREGDFLRQLLSLAVCRGNAASILGAMG

SEQ ID NO: 2534 - protein, 842 aa, Dermanyssus gallinae
MPILLLRIPALRSNDRSLCQIIRKNVTESRWKTLASLLDECNRNNIQYDTSLDIDHDRGKMAERKLAEGDVRSAARILLSTDSFAPFNDHTEQELRKKHPPPLADASERLGSLQAPVTTRGHTVYHKLIVDAVRSFAVASGPGLDGLRPRHFRDMLDNSVPSSGRLLEEVCSLVASALNGSLPSSCLKTFYGANLTALKKKDGSIRPIACGLTIRRLVAKVAIAISKGSITKALGPSRVGVSIKGGAETAVHAVRAYIETDGPVRVLVKLDFSNAFNTIRRDVILEEVRLHVPELFPLVWQCYRDPSLLSWCDKEPLKSTNGVQQGDPLGPALFSLGISSLVARMRSPLNIWYLDAGTLGGPAEVVAADILKVIEFANEGGTILNLSKCEVITVGGDTQERDEARKTIAAVLPGCKQVNPAELEVLGAPLSPQSIYKTLTEKRRALLQTRPRLLAMHSQAALCLWRYSLGSPKFNYTLRTSPTSQCPDALQAYDDSTRDILSEVLNIDITDDTWRRASLPIREGGLGVRSAVELAPICYAASVLEFSPLAEALVDPSAHHRLHIAKQEAESLVKLKLDPGPWEKRVTQRVLDNYRCKVIAREITESLESSTEKAVFLAARDTFSGGFLRALPSPQLGTMLDNVSFRMVSALRIGGSICEPHICKACGKPVEKNGLHPLSCIKSQGRAPRHTEINTVIQRALRRAGIPSMLEPRLGLHDDKRPDGVTIPPWKKGKCLVWDATVSCTAAPSYVCHRATEAGWVAEHAEKEKWRKYTELESRYNFVPIAVETMGPVSRRTRTFIKDLSDRIQANTGDVREGDFLRQLLSLAVCRGNAASILGAMG

SEQ ID NO: 2535 - protein, 977 aa, Dermanyssus gallinae
MSSLPSAHTNPDQPQLRSQQSYTCEICRKCLRSLRGLRMHTTRLHPADTRPPLSQPLRNTSSPASLSAQDDPNRQPDTTLDSITLIRSLARVHRNIKLVKVIPRGVREICCAAYAEALSNFNTRKDNASWEKLLIMPILLLRIPALRNNDRSLCQIIRKNVTESRWKTLASLLDECNRNIIQYDTSLDTDHDRGKMAERKLAEGDVRSAARILLSTDSFAPFNNHTEQELRKKHPPPLADASERLGSLQAPVTTRGHTVHHKLVVDAVRSFAVASGPGLDGLRPRHLRDMLDNSVPSSGRLLEEVCSLVASALNGSLPSSCLTTFYGANLTALKKKDGSIRPIACGLTIRRLVAKVAIAISKGSIAKALGPRQVGVSIKGGAEAAVHAVRAYIETDGPVRVLVKLDFSNAFNTIRRDVILEEVRLHVPELFPLVWQCYRDPSLLSWCDKEPLKSTNGVQQGDPLGPALFSLGISSLVARMRSPLNIWYLDDGTLGGPAEVVAADILKVIEFANEGGTILNLSKCEVITVGGDTQERDEARKTIAAVLPGCKQVNPAELEVLGAPLSPQSIYKTLTEKRRALLQTRPRLLAMHSQAALCLWRYSLGSPKFNYTLRTSPTSQCPDALQAYDDSTRDILSEVLNIDFTDDTWRRASLPIREGGLGVRSAVELAPICYAASVLEFSPLAEALVDPSAHHRLHIAKQEAESLVKLKLDPGPWEKRVTQRVLDNYRCKVIAREITESLESSTEKAVFLAARDTFSGGFLRALPSPQLGTMLDNVSFRMVSALRIGGSICEPHICKACGKPVEKNGLHPLSCIKSQGRAPRHTEINAVIQRALRRAGIPSMLEPRLGLHDDKRPDGVTIPPWKKGKCLVWDATVSCTIAPSYVCHSATEAGWVAEHAEKEKWRKYTELESRYNFVPIAMETMGPVSRRTRTFIKDLSDRIQANTGDAREGDFLRQLLSLAVCRGNAASILGAMG

SEQ ID NO: 2536 - protein, 977 aa, Dermanyssus gallinae
MSSQPSAHINPDQPQLRSQQSYTCEMCKKSLRSLRGLRMHMTRLHPTYTRSSSSQLIRDSSSPASLSAQDDPNRQLDANLDSITLIRSLAQVHRNIKLVKVIPRGVREICCAAYAEALSNFNTTKDNASWGKLLIMPILMLRIPARRHNDRTLCQIIRNNVTESRWKTLASLLDECNRNIIQNDTPLDTDHDRGKMAERKLAEGDVRSAARILHSTDSFAPFSDHTEQELRRKHPLPLSDASEHLGSLQAPSTTERHTIHHKLVFDAVRSFAVASGSGLDGLRPRHLRDMLDNSVPSSGRLLEEVCSLVASALNGSLPSLCLTIFYGANLTALKKKDGSIRPIACGLTIRRLVAKVAIAITKTFILKALGPKQVGVSIKGGAEAAVHAVRAYMETDGPVRVLVKLDFSNAFNTIRRDVILEEVRLHVPELLPLVWQSYRDPSLLSWYDKEPLKSTNGVQQGDPLGPALFSLGISSLVSQMRSPLNIWYLDDGTLGGPAEVVAADILKVLQFANEGGTVLNISKCEVITVGADTKEQDQAYKTIVAVLPGCRRVNPVELEVLGAPLSPQSIFKTLRDKRRALLQTRPRLLAMHSQAALSLWRYSLGSPKFNYTLRTSPTSQCPDALQSYDDSTRDILSEVLNIDFTDSTWRRASLPIREGGLGIRSAAELAPICYAASLLEFGQLAETLVDPSAHHRLYIAKQTAESLVKLRLDPGPWEKHTTQRVLDNYRCKVIAREIIESLESPTEKAVFLAARDTFSGGFLRALPSPQLGTMLDNISFRMVSALRIGGPICEPHICKACGKPVEKDGLHPLSCIKSQGRAPRHTEINAIIQRALRRAGIPSMLEPRLGLHDDKRPDGVTIPPWEKGKCLVWDATVSCTAAPSYLCHSATEAGWVAEHAEKEKWRKYKELEPRYNFVPIAMETMGPVSRSTRKFIKDLGDRIRANTGDIREDEFLRQLLSLAVCRGNAASILGAMG

SEQ ID NO: 2537 - protein, 910 aa, Dermanyssus gallinae
MSSLPSAHTNPDQPQLRSQQSYTCEICRKCLRSLRGLRMHTTRLHPADTRPPLSQPLRNTSSPASLSAQDDPNRQSDTTLDSITLIRSLARVHRNIKLVKVIPRGVREICCAAYAEALSNFNTRKDNASWEKLLIMPMLLLRIPALRNNDRSLCQIIRKNVTESRWKTLASLLDECNRNIIQYDTSLDTDHDRGKMAERKLAEGDVRSAARILLSTDSFAPFNDHTEQELRKKHPPPLADASERLGSLQAPVTTRGHTVHHKLVVDAVRSFAVASGPGLDGLRPRHLRDMLDNSVPSSGRLLEEVCSLVASALNGSLPSSCLTTFYGANLTALKKKDGSIRPIACGLTIRRLVAKVAIAISKGSITKALGPRQVGVSIKGGAEAAVHAVRAYIETDGPVRVLVKLDFSNAFNTIRRDVILEEVRLHVPELFPLVWQCYRDPSLISWCDKEPLKSTNGVQQGDPLGPALFSLGISSLVARMRSPLNIWYLDDGTLGGPAEVVAADILKVIEFANEGGTILNLSKCEVITVGGDTQERDEARKAIAAVLPGCKQVNPAELEVLGAPLSPQSIYKTLTEKRRALLQTRPRLLAMHSQAALCLWRYSLGSPKFNYTLRTSPTSQCPDALQAYDDSTRDILSEVLNIDFTDDTWRRASLPIREGGLGVRSAVELAPICYAASVLEFSPLAEALVDPSAHHRLHIAKQEAESLVKLKLDPGPWEKRVTQRVLDNYRCKVIAREITESLESSTEKAVFLAARDTFSGGFLRALPSPQLGTMLDNVSFRMVSALRIGGSICEPHICKACGKPVEKNGLHPLSCIKSQGRAPRHTEINAVIQRALRRAGIPSMLEPRLGLHDDKRPDGVTIPPWKKGKCLVWDATVSCTIAPSYVCHSATEAGWVPNTQRKKSVVNTQS

SEQ ID NO: 2538 - protein, 977 aa, Dermanyssus gallinae
MSSLPSAHTNPDQPQLRSQQSYTCEICRKCLRSLRGLRMHTTRLHPADTRPPLSQPLRNTSSPASLSAQDDPNRQSDTTLDSITLIRSLARVHRNIKLVKVIPRGVREICCAAYAEALSNFNTRKDNASWEKLLIMPILLLRIPALRNNDRSLCQIIRKNVTESRWKTLASLLDECNRNMIQYDTSLDTDHDRGKMAERKLAEGDVRSAARILLSTDSFAPFNDHTEQELRKKHPPPLADASERLGSLQAPVTTRGHTVHHKLVVDAVRSFAVASGPGLDGLRPRHLRDMLDNSVPSSGRLLEEVCFLVASALNGSLPSSCLTTFYGANLTALKKKDGSIRPIACGLTIRRLVAKVAIAISKGSITKALGPRQVGVSIKGGAESAVHAVRAYIETDGPVRVLVKLDFSNAFNTIRRDVILEEVRLHVPELFPLVWHCYRDPSLLSWCDKEPLKSTNGVQQGDPLGPALFSLGISSLVARMRSPLNIWYLDDGTLGGPAEVVAADILKVIEFANEGGTILNLSKCEVITVGGDTQERDEARKTIAAVLPGCKQVNPAELEVLGAPLSPQSIYKTLTEKRRALLQTRPRLLAMHSQAALCLWRYSLGSPKFNYTLRTSPTSQCPDALQAHDDSTRDILSEVLNIDFTDDTWRRASLPIREGGLGVRSAVELAPICYAASVLEFSPLAEALVDPSAHHRLHIAKQEAESLVKLKLDPGPWEKRVTQRVLDNYRCKVIAREITESLESSTEKAVFLAARDTFSGGFLRALPSPQLGTMLDNVSFRMVSALRIGGSICEPHICKACGKPVEKNGLHPLSCIKSQGRAPRHTEINAVIQRALRKAGIPSMLEPRLGLHDDKRPDGVTIPPWKKGKCLVWDATVSCTIAPSYVCHSATEAGWVAEHAEKEKWRKYTELESRYNFVPIAMETMGPVSRRTRTFIKDLSDRIQANTGDAREGDFLRQLLSLAVCRGNAASILGAMG

SEQ ID NO: 2539 - protein, 960 aa, Dermanyssus gallinae
MNNHDRIAQDGEAPRTTSTTIKCPLCDGRYTRRGLTRHISAKHPTATDASSSISTTSEPPRLQPAQILEDIQAVMRQIRLIRIVPKSVRRQVAEAFTRVLTAVSSDNDVEAWYSLFSFAPVVLRLPRARSDASSLSVIIRNNLRDFHRNMRLSDVIATSHSRVSTLKPFKNDIVRQSIIKLSEGDVIVSTDTITPGIDRIEALREQHPPAPENLEWPTLTRNPMPYVTSKEDIQAAIKSFSKSSAAGLDFIRPRLLMDLLSPSLEDVAASLLSALAKVVDILLWGNPPSCLQPLIFGARLFALKKKDKSVRPIACSSSLRRLAAKIGCNHNKAVISHATGAHQLGFATPAGTEVAIHATRAFLDSREPPGVLVKLDFKNAFNNIRRDHLMKAVASHAPHLLNHVGLAYRHPSHLVLPEHVISSATGLQQGDPLAPPLFCLGIKDLVDSFRSPLNLWYLDDGLLGGNVCTVADDIRRVLNFSVTSGLELNPAKCEICLLGPTIEAPEIQSLRDLLPGCKMTVKNDLELLGVPICPEGLPAAIERWRLNLENAAARLPLLGAHRGLFLLRSSFSSSRLIHLLRGADLSNQADELQRLNDLTLSTLESLLNTSLPPSAREQALLPVSKGGLGVPNLLTLAGPAIVSSMLSAENRATPLLDSAGVDQFRNRLAHLQENLEARCGGRPENVLSQRDWSSPLHDEVQRRLFNEAADDTARARLNAVSAKDSGAWLHALPSAPIGTLLDDESVRIAVGLRLGADIVSPHRCQCGHPVDKLGHHGLSCIILLSDYSAGRRSRHAAINETFSRALRSCGRPCILEPPGLCAEDGKRPDGMTLTPFERGKMLVWDATVTDSLAPSMVGGGASEAGYAAHLAEANKLRKYSSIGYPHEFCPLAFETLGAPGVRTKQLIRKVGTLLNLSSGDNRSSSFLKQRLDLDIQRGNAASVRGTLLKWSRPGLIETDT

SEQ ID NO: 2540 - protein, 961 aa, Dermanyssus gallinae
MNDHDRTAQDGAASHPIPATIKCPLCDGRYTRRGLTRHISVKHPTATEASFSTTSTSVPSRLQPAQILEDIQAVMGRIRLIRIVPKSIRRQVAEALTRVLSAVSSDNDVEAWYGLFSFAPVVLRLPRARNDALSLSVIIRNNLRDFSQNMRLSDVIATSHPRTSTSKPFKNDTVRQSIIKLSEGDVSGAARLIVSTDTLTPGIDRIEALREQHPLAPEDLEWPTLTRSPLPFVTSKEDIQAAIKSFSKSSAAGLDFMRPRLLMDLLSPSLEGVAASLLSALAKVVDILLWGSPPPCLRPLIFGARLFALQKKDGSVRPIACSSALRRLAAKIGCNHNKDAISHATGAHQLGFATPAGTEVAIHAARAFLDSREPPGVFVKLDFKNAFNCIRRDHLMKAVAFHAPHLLNYVELAYRHPSHLVLPEHVISSATGLQQGDPLAPPLFCLGIKDLVDSFRSPLNLWYLDDGLLGGNVCTVAEDIQRVLDFSVTSGLELNPAKCEICLFGPTLEAPEVQSLRNLLPGCKLTVKDDLELLGVPICPEGLPAAIERWRLKLENAAARLPLLGAHRGLFLLRSSFSSSRLIHLLRGADLSNRSDELQRLNDLTLSTLESLLNTSLPPSAREQALLPISKGGLGVPNLLTLAGPAIVSSMLSAQNRATPLLDSAGVDQFRNRLAHLQENLEARCGGRPENVLSQRDWSSPLHDEVQRRLFNEAADDTARARLNAVSAKDSGAWLHALPSAPIGTLLDDESIRIAVGLRLGADIVSPHRCQCGHPVDKLGHHGLSCIISAGRRSRHAAINETFSRALRSCGRPCILEPPGLCAEDGKRPDGMTLTPFERGKMLVWDATVTDSLAPSMVGGGASEAGYAAHLAETNKLRKYSSIGYPHEFCPLAFETLGAPGVRTKQLIRKVGTLLNLSSGDNRSSSFFKQRLDLDIQRGNAASVRGTLLKWSRPGLIETDT

SEQ ID NO: 2541 - protein, 961 aa, Dermanyssus gallinae
MNNHDRIAQDGEAPRTTSTTIKCPLCDGRYTRRGITRHISAKHPTATDASSSISTTSEPPRLQPAQILEDIQAVMRQIRLIRIVPKSVRRQVAEAFTRVLTAVSSDNDVEAWYSLFSFAPVVLRLPRARSDASSLSVIIRNNLRDFHRNMRLSDVIATSHSRVSTLKPFKNDIVRQSIIKLSEGDVSGAARLIVSTDTITPGIDRIEALREQHPPAPENLEWPTLTRNPMPYVTSKEDIQAAIKSFSKSSAAGLDFIRPRLLMDLLSPSLEDVAASLLSALAKVVDILLWGNPPSCLQPLIFGARLFAFKKKDGSVRPIACSSSLRRLAAKIGCNHNKAVISHATGAHQLGFATPAGTEVAIHATRAFLDSREPPGVLVKLDFKNAFNNIRRDHLMKAVASHAPHLLNHVGLAYRHPSHLVLPEHVISSATGLQQGDPLAPPLFCLGIKDLVDSFRSPLNLWYLDDGLLGGNVCTVADDIRRVLNFSVTSGLELNPAKCEICLLGPTIEAPEIQSLRDLLPGCKMTVKNDLELLGVPICPEGLPAAIERWRLNLENAAARLPLLGAHRGLFLLRSSFSSSRLIHLLRGADLSNQADELQRLNDLTLSTLESLLNTSLPPSAREQALLPVSKGGLGVPNLLTLAGPAIVSSMLSAENRATPLLDSAGVDQFRNRLAHLQENLEARCGGRPENVLSQRDWSSPLHDEVQRRLFNEAADDTARARLNAVSAKDSGAWLHALPSAPIGTLLDDESVRIAVGLRLGADIVSPHRCQCGHLVDEPGHHGLSCIISAGRRSRHAAINETFSSALRSCGRPCILEPPGLCAEDGKRPDGMTLTPFEHGKMLVWDATVTDSLAPSMVGGGASEAGYAAHLAEANKLKKYSSIGYPHEFCPLAFETLGAPGVRTKQLIYKVGTLLNLSSGDNRSSSFLKQRLDLDIQRGNAASVRGTLLKWSRPGLIETDT

SEQ ID NO: 2542 - protein, 961 aa, Dermanyssus gallinae
MNDHDRTAQDGAASHPIPATIKCPLCDGRYTRRGLTRHISVKHPTATEASFSTTSTSVPSRLQPEQILEDIQAVMGRIRLIRIVPKSIRRQVAEALTRVLSAVSSDNDVEAWYGLFSFAPVVLRLPRVRNDALSLSVIIRNNLRDFSQNMRLSDVIATSHPRTSTSKPFKNDTVRQSIIKLSEGDVSGAARLIVSTDTLTPGIDRIEALREQHPLAPEDLEWPTLTRSPLPFVTSKEDIQAAIKSFSKSSAAGLDFMRPRLLMDLLSPSLEGVAASLLSALAKVVDILLWGSPPPCLRPLIFGARLFALQKKDGSVRPIACSSALRRLAAKIGCNHNKDAISHATGAHQLGFATPAGTEVAIHAARAFLDSRELPGVFVKLDFKNAFNCIRRDHLMKAVAFHAPHLLNYVELAYRHPSHLVLPEHVISSATGLQQGDPLAPPLFCLGIKDLVDSFRSPLNLWYLDDGLLGGNVCTVAEDIQRVLDFSVTSGLELNPAKCEICLFGPTLEAPEVQSLRNILPGCKLTVKDDLELLGVPICPEGLPAAIERWRLKLENAAARLPLLGAHRGLFLLRSSFSSSRLIHLLRGADLSNRSDELQRLNDLTLSTLESLLNTSLPPSAREQALLPISKGGLGVPNLLTLARPAIVSSMLSAQNRATPLLDSAGVDQFRNRLAHLQENLEARCGGRPENVLSQRDWSSPLHDEVQRRLFNEAADDTARARLNAVSAKDSGAWLHALPSAPIGTLLDDESIRIAVGLRLGADIVSPHRCQCGHPVDKLGHHGLSCIISAGRRSRHAAINETFSRALRSCGRPCILEPPGLCAEDGKRPDGMTLTPFERGKMLVWDATVTDSLAPSMVGGGASEAGYAAHLAETNKLRKYSSIGYPHEFCPLAFETLGAPGVRTKQLIRKVGTLLNLSSGDNRSSSFFKQRLDLDIQRGNAASVRGTLLKWSRPGLIETDT

SEQ ID NO: 2543 - protein, 961 aa, Dermanyssus gallinae
MNDHDRTAQDGAASHPIPATIKCPLCDGRYTRRGLTRHISVKHPTATEASFSTTSTSVPSRLQPEQILEDIQAVMGRIRLIRIVPKSIRRQVAEALTRVLSAVSSDNDVEAWYGLFSFAPVVLRLPRARNDALSLSVIIRNNLRDFSQNMRLSDVIATSHPRTSTSKPFKNDTVRQSIIKLSEGDVSGAARLIVSTDTLTPGIDRIEALREQHPLAPEDLEWPTLTRSPLPFVTSKEDIQAAIKSFSKSSAAGLDFMRPRLLMDLLSSSLEGVAASLLSALAKVVDILLWGSPPPCLRPLIFGARLFALQKKDGSVRPIACSSALRRLAAKIGCNHNKDAISHATGAHQLGFATPAGTEVAIHAARAFLDSRELPGVFVKLDFKNAFNCIRRDHLMKAVAFHAPHLLNYVELAYRHPSHLVLPEHVISSATGLQQGDPLAPPLFCLGIKDLVDSFRSPLNLWYLDDGLLGGNVCTVTEDIQRVLDFSVTSGLELNPAKCEICLFGPTLEAPEVQSLRNLLPGCKLTVKDDLELLGVPICPEGLPAAIERWRLKLENAAARLPLLGAHRGLFLLRSSFSSSRLIHLLRGADLSNRSDELQRLNDLTLSTLESLLNTSLPPSAREQALLPISKGGLGVPNLLTLAGPAIVSSMLSAQNRASPLLDSAGVDQFRNRLAHLQENLEARCGGRPENVLSQRDWSSPLHDEVQRRLFNEAADDTARARLNAVSAKDSGAWLHALPSAPIGTLLDDESIRIAVGLRLGADIVSPHRCQCGHPVDKLGHHGLSCIISAGRRSRHAAINETFSRALRSCGRPCILEPPGLCAEDGKRPDGMTLTPFERGKMLVWDATVTDSLAPSMVGGGASEAGYAAHLAETNKLRKYSSIGYPHEFCPLAFETLGAPGVRTKQLIRKVGTLLNLSSGDNRSSSFFKQRLDLDIQRGNAASVRGTLLKWSRPGLIETDT

SEQ ID NO: 2544 - protein, 961 aa, Dermanyssus gallinae
MNDHDRTAQHGAASHPIPATIKCPLCDGRYTRRGLTRHISAKLPTAPEASFSTTTTSVPSRLQPAQILEDIQAVMGRIRLIRIVPKSIRRQVAEALTCVLSAVSSDNDVEAWYGLFSFAPVVLRLPRARKDALSLSVIIRNNLRDFSQNMRLSDVIATSHPRTSTSKPFKNDTVRQSIIKLSEGDVSGAARLIVSTDIVTPGIDRIEALREQHPLAPEDLEWPTLTRSPLPFVTSKEDIQAAIKSFSKSSAAGLDFMRPRLLMDLLSPSLEGVAASLLSALAKVVDILLWGTPPPCLRPLIFGARLFALQKKDGSVRPIACSSALRRLAAKIGCNHNKDAISHATGAHQLGFATPAGTEVAIYAARAFRDSREPPGVFVKLDFENAFNCIRRNHLMKTVASHAPHLLNYVELAYRHPSHLVLPEHVISSATGLQQGDPLAPPLFCLGIKDLVDSFRSPLNLWYLDDGLLGGNVCTVAEDIQRVLDFSVTSGLELNPAKCEICLFGPTLEAPEIQSLRNLLPGCKLTVKDDLELLGVPICPEGLPAAIKRWRLKLENAAARLPLLGAHRGLFLLRSSFSSSRLIHLLRGADLSNRSDELQRLNDLTLSTLESLLNTSLPPSAREQALLPVLKGGLGVPNLLTLAGPAIVSSMLSAQNRATPLLDSAGVDHFRNRLARLQENLEARCRGRPENVLSQRDWSSPLHDEVQRHLFNKAADDTARTRLNAVSAKDSVAWLHALPSAPIGTLLDDESIRIAVGLRLGADIVSPHRCQCGHPVDKLGHHGLSCIISAGRRSRHAAINETFSRALRSCGRPCILEPPGLCAEDGKRPDSMTLIPFERGKMLVWDATVTDSLAPSMVGGGASEAGYAAHLAKTNKLRKYSSIGYPHGFCPLAFETLGAPGVRTKQLIRKVGTLLNLSFGDNRSSSFFQQRLDLDIQRGNAASIRGTLLKWSRPGLIETDT

SEQ ID NO: 2545 - protein, 887 aa, Dermanyssus gallinae
MGRIRLIRIVPKSIRRQVAEALTRVLSAVSSDNDVEAWYGLFSFAPVVLRLPRVRNDALSLSVIIRNNLRDFSQNMRLSDVIATSHPRTSTSKPFKNDTVRQSIIKLSEGDVSGAARLIVSTDTLTPGIDRIEALREQHPLAPEDLEWPTLTRSPLPFVTSKEDIQAAIKSFSKSSAAGLDFMRPRLLMDLLSPSLEGVAASLLSALTKVVDILLWGSPPPCLRPLIFGARLFALQKKDGSVRPIACSSALRRLAAKIGCNHNKDAISHATGAHQLGFATPAGTEVAIHAARAFLDSRELPGVFVKLDFKNAFNCIRRDHLMKAVAFHAPHLLNYVELAYRHPSHLVLPEHVISSATGLQQGDPLAPPLFCLGIKDLVDSFRSPLNLWYLDDGLLGGNVCTVAEDIQRVLDFSVTSGLELNPAKCEICLFGPTLEAPEVQSLRNLLPGCKLTVKDDLELLGVPICPEGLPAAIERWRLKLENAAARLPLLGAHRGLFLLRSSFSSSRLIHLLRGADLSNRSDELQRLNDLTLSTLESLLNTSVPPSAREQALLPISKGGLGVPNLLTLAGPAIVSSMLSAQNRATPLLDSAGVDQFRNRLAHLQENLEARCGGRPENVLSQRDWSSPLHDEVQRRLFNEAADDTARARLNAVSAKDSGAWLHALPSAPIGTLLDDESIRIAVGLRLGADIVSPHRCQCGHPVDKLGHHGLSCIISAGRRSRHAAINETFSRALRSCGRPCILEPPGLCAEDGKRPDGMTLTPFERGKMLVWDATVTDSLAPSMVGGGASEAGYAAHLAETNKLRKYSSIGYPHEFCPLAFETLGAPGVRTKQLIRKVGTLLNLSSGDNRSSSFFKQRLDLDIQRGNAASVRGTLLKWSRPGLIETDT

SEQ ID NO: 2546 - protein, 961 aa, Dermanyssus gallinae
MNDHDRTAQDGAASHPIPATIKCPLCDGRYTRRGLTRHISVKHPTATEASFSTTSTSVPSRLQPEQILEDIQAVMGRIRLIRIVPKSIRRQVAEALTRVLSAVSSENDVEAWYGLFSFAPVVLRLPRVRNDALSLSVIIRNNLRDFSQNMRLSDVIATSHFRTSTSKPFKNDTVRQSIIKLSEGDVSGAARLIVSTDTLTPGIDRIEALREQHPLAPEDLEWPTLTRSPLPFVTSKEDIQAAIKSFSKSSAAGLDFMRPRLLMDLLSPSLEGVAASLLSALAKVVDILLWGSPPPCLRPLIFGARLFALQKKDGSVRPIACSSALRRLAAKIGCNHNKDAISHATGAHQLGFATPAGTEVAIHAARAFLDSRELPGVFVKLDFKNAFNCIRRDHLMKAVAFHAPHLLNYVELAYRHPSHLVLPEHVISSATGLQQGDPLAPPLFCLGIKDLVDSFRSPLNLWYLDDGLLGGNVCTVAEDIQRVLDFSVTSGLELNPAKCEICLFGPTLEAPEVQSLRNLLPGCKLTVKDDLELLGVPICPEGLPAAIERWRLKLENAAARLPLLGAHRGLFLLRSSFSSSRLIHLLRGADLSNRSDELQRLNDLTLSTLESLLNTSLPPSAREQALLPISKGGLEVPNLLTLAGPAIVSSMLSAQNRATPLLDSAGVDQFRNRLAHLQENLEARCGGRPENVLSQRDWSSPLHDEVQRRLFNEAADDTARARLNAVSAKDSGAWLHALPSAPIGTLLDDESIRIAVGLRLGADIVSPHRCQCGHPVDKLGHHGLSCIISAGRRSRHAAINETFSRALRSCGRPCILEPPGLCAEDGKRPDGMTLTPFERGKMLVWDATVTDSLAPSMVGGGASKAGYAAHLAETNKLRKYSSIGYPHEFCPLAFETLGAPGVRTKQLIRKVGTLLNLSSGDNRSSSFFKQRLDLDIQRGNAAYVRGTLLKWSRPGLIETDT

SEQ ID NO: 2547 - protein, 961 aa, Dermanyssus gallinae
MNDHDRTAQDGAASHPIPATIKCPLCDGRYTRRGLTRHISVKHPTATEASFSTTSTSVPSRLQPAQILEDIQAVMGRIRLIRIVPKSIRRQVAEALTRVLSAVSSDNDVEAWYGLFSFAPVVLRLPRARNDALSLSVIIRNNLRDFSQNMRLSDVIATSHPRTSTSKPFKNDTVRQSIIKLSEGDVSGAARLIVSTDTLTPGIDRIQALREQHPLAPEDLEWPTLTRSPLPFVTSKEDIQAAIKSFSKSSAAGLDFMRPRLLMDLLSPSLEGVAASLLSALAKVVDILLWGSPPPCLRPLIFGARLFALQKKDGSVRPIACSSALRRLAAKIGCNHNKDAISHATGAHQLGFATPAGTEVAIHAARAFLDSREPPAVFVKLDFKNAFNCIRRDHLMKAVAFHAPHLLNYVELAYRHPSHLVLPEHVISSATGLQQGDPLAPPLFCLGIKDLVDSFRSPLNLWYLDDGLLGGNVCTVAEDIQRVLDFSVTSGLELNPAKCEICLFGPTLEAPEVQSLRNLLPGCKLTVKDDLELLGVPICPEGLPAAIEHWRLKLENAAARLPLLGAHRGIFLLRSSFSSSRLIHLLRGADLSNRSDELQRLNDLTLSTLESLLNTSLPPSAREQALLPISKGGLGVPNLLTLAGPAIVSSMLSAQNRATPLLDSAGVDQFRNRLAHLQENLEARCGGRPENVLSQRDWSSPLHDEVQRRLFNEAADDTARARLNAVSAKDSGAWLHALPSAPIGTLLDDESIRIAVGLRQGADIVSPHRCQCGHPVDKLGHHGLSCIISAGRRSRHAAINETFSRALRSCGRPCILEPSGLCAEDGKRPDGMTLTPFERGKMLVWDATVTDSFAPSMVGGGASEAGYAAHLAETNKLRKYSSIGYPYEFCPLAFETLGAPGVQTKQLIRKVGTLLNLSSGGNRSSSFFKQRLDLDIQRGNAASVRGTLLKWSRPGLIETDT

SEQ ID NO: 2548 - protein, 966 aa, Dermanyssus gallinae
MNNHDRIAQDGEAPRTTSTTIKCPLCDGRYTRRGLTRHISAKHPTATDASSSISTTSEPPRLQPAQILEDIQAVMRQIRLIRIVPKSVRRQVAEAFTRVLTAVSSDNDVEAWYSLFSFAPVVLRLPRARSDASSLSVIIRNNLRDFHRNMRLSDVIATSHSRVSTLKPFKNDIVRQSIIKLSEGDVSGAARLIVSTDTITPGIDRIEALREQHPPAPENLEWPTLTRNPMPYVTSKEDIQAAIKSFSKSSAAGLDFIRPRLLMDLLSPSLEDVAASLLSALGKVVDILLWGNPPSCLQPLIFGARLFALKKKDGSVRPIACSSSLRRLAAKIGCNHNKAVISYATGAHQLGFATPAGTEVAIHATRAFLDSREPPGVLVKLDFKNAFNNIRRDHLMKAVASHAPHLLNHVGLAYRHPSHLVLPEHVISSATGLQQGDPLAPPLFCLGIKDLVDSFRSPLNLWYLDDGLLGGNVCTVADDIRRVLNFSVTSGLELNPAKCEICLLGPTIEAPEIQSLRDLLPGCKMTVKNDLELLGVPICPEGLPAAIERWRLNLENAAARLPLLGAHRGLFLLRSSFSSSRLIHLLRGADLSNQADELQRLNDLTLSTLESLLNTSLPPSAREQALLPVSKGGLGVPNLLTLAGPAIVSSMLSAENRATPLLDSAGVDQFRNRLAHLQENLEARCGGRPENVLSQRDWSSPLHDEVQRRLFNEAADDTARARLKAVSAKDSGAWLHAFPSAPIGTLLDDESIRIAVGLRLGADIVSPHRCQCGHPVDKLGHHGLSCIISAGRRSRHAAINETFSRALRSCGRPCILEPPGLCAEDGKRPDGMTLTPFERGKMLVWDATVTDSLAPSMVGGGASEAGYAAHLAEANKLRKYSSIGYPHEFCPLAFETLGAPGVRTKQLIRKVGTLLNLSSGDNRSSTFLKQRLDLDIQRGNAASVRGTLLKWSRPGLIETLMCVTYT

SEQ ID NO: 2549 - protein, 961 aa, Dermanyssus gallinae
MNDHDRTAQDGAASHPIPATIKCPLCDGRYTRRGLTRHISVKHPTATEASFSTTTTSVPSRLQPAQILEDIQGVMGRIRLIRIVPKSIRRQVAEALTRVLSAVSSDNDVEAWYGLFSFAPVVLRLPRARNDALSLSVIIRNNLRDFSQNMRLSDVIATSLPRTSTSKPFKNDTVRQSIIKLSEGDVSGAARLIVSTDTLTPGIDRIEALREQHPLAPEDLEWPTLIRSPLPFVTSKEDIQAAIKSFSKSSAAGLDFMRPGLLMDLLSPSLEGVAASLLSALAKVVDILLWGSPPPCLRPLIFGARLFALQKKDGSVRPIACSSALRRLAAKIGCNHNKDAISHATGAHQLGFATPAGTEVAIHAARAFLDSRELSGVFVKLDFKNAFNCIRCDHLMKAVASHAPHLLNYVELAYRHPSHLVLPEHVSSSATGLQQGDPLAPPLFCLGIKDLVDSFRSPLNLWYLDDGLLGGNVCTVTEDIQRVLDFSVTSGLELNPAKCEICLFGPTLEAPEIQSLRNLLPGCKLTVKDHLELLGVPICPEGLPAAIERWRLKLENAAARLPLLGAHRGLFLLRSSFSSSRLIHLLRGADLSNRSDDLQRLNDLTLSTLESLLNTSLPPSAREQALLPVSKGGLGVPNLLTLAGPAIVSSMLSAQSRATPLLDSAGVDQFRNRLAHLQENLEARCGGRPENVLSQRDWSSPLHDEVQRRLFNEAADDTARARLNAVSAKDSGAWLHALPSAPIGTLLDDESIRIAVGLRLGADIVSPHRCQCGHPVDKLGHHGLSCIISAGRRSRHAAINETFSRALRSCGRPCILEPPGLCAEDGKRPDGMTLTPFERCKMLVWDATVTDSLAPSMVDGGASEAGYAAHLAETNKLRKYSSIGYPHEFCPLAFETLGAPGVRTKQLIRKVGTLLNLSTGDNRSSSFFKQRLDLDIQRGNAASVRGTLLKWSRPGLIETDT

SEQ ID NO: 2550 - protein, 961 aa, Dermanyssus gallinae
MNDHDRTAQDGAASHPIPATIKCPLCDGRYTRRGLTRHISVKHPTATEASFSTTSTSVPSRLQPAQILEDIQAVMGRIRLIRIVPKSIRRQVAEALTRVLSAVSSDNDVEAWYGLFSYAPVVLRLPRTRNDALSLSVIIRNNLRDFSQKMRLSDVIATSHPSTSTSKPFKNDTVRQSIIKLSEGDVSGAARLIVSTDTLTPGIDRIEALREQHPLAPEDLEWPTLTRSPLPFVTSKEDIQAAIKSFFKSSAAGLDFMRPRLLMDLLSPSLEGVAASLLSAYAKVVDILLWGSPPPCLRPLIFGARLFALQKKDGSVHPIACSSALRRLAAKIGCNHNKDAISHATGAHQLGFATPAGTEVAIHAARAFLDSREPPGVFVKLDFKNAFNCIRRDHLMKAVAFHAPNLLNYVELAYRHPSHLVLPEHVISSTTGLQQGDPLAPPLFCLGIKDLVDSFRSPLNLWYLDDGLLGGNVCTVAEDIQRVLDFSVTSGLELNPAKCEICLFGPTLEAPEVQSLRNLLPGCKLTVKDDLELLGVPICPEGLPAAIDRWGLKLENAAARLPLLGAHRGLFLLRSSFSSSRLIHLLRGADLSNRSDELQRLNDLTLSTLESLLNTSLPPSAREQALLPISKGGLGVPNLLTLAGPAIVSSMLSAQNRATPLLDSAGVDQFRNRLAHLQENLEARCGGRPENVLSQRDWSSPLHDEVQRRLFNEAADDTARARLNAVSAKDSGAWLHALPSAPIGTLLDDESIRIAVGLRLGADIVSPHRCQCGHPYDKLGHHGLSCIISAGRRSRHAAINETFSRALRSCGRPCILEPPGLCAEDGKRPDGMTLTPFERGKMLVWDATVTDSLAPSMVGGGASEAGYAAHLAETNKLRKYSSIGYPHEFCPLAFETLGAPGVRTKQLIRKVGTLLNLSSGDNRSSSFFKQRLDLDIQRGNPASVRGTLLKWSRPGLIETDT

SEQ ID NO: 2551 - protein, 961 aa, Dermanyssus gallinae
MNNHDRIAQDGEAPRTTSTTIKCPLCDGRYTRRGLTRHISAKHPTATDASSSISTTSEPPRLQPAQILEDIQAVMRQIRLIRIVPKSVRRQVAEAFTRVLTAVSSDNDVEAWYSLFSFAPVVLRLPRARSDASSLSVIIRNNLRDFHRNMRLSDVIATSHSRVSTLKPFKNDIVRQSIIKLSEGDVSGAARLIVSTDTITPGIDRIEALREQHPPAPENLEWPTLTRNPMPYVTSKEDIQAAIKSFSKSSAAGLDFIRPRLLMDLLSPSLEDVAASLLSALGKVVDILLWGNPPSCLQPLIFGARLFALKKKDGSVRPIACSSSLRRLAAKIGCNHNKAVISHATGAHQLGFATPAGTEIAIHATRAFLDSREPPGVLVKLDFKNAFNNIRRDHLMKAVASHAPHLLNHVGLAYRHPSHLVLPEHVISSATGLQQGDPLAPPLFCLGIKDLVDSFRSPLNLWYLDDGLLGGNVCTVADDIRRVLNFSVTSGLELNPAKCEICLLGPTIEAPEIQSLRDLLPGCKMTVKNDLELLGVPICPEGLPAAIERWRLNLENAAARLPLLGAHRGLFLLRSSFSSSRLIHLLRGADLSNQADELQRLNDLTLSTLESLLNTSLPPSAREQALLPVSKGGLGVPNLLTLAGPAIVSSMLSAENRATPLLDSAGVDQFRNRLAHLQENLEARCGGRPENVLSQRDWSSPLHDEVQRRLFNEAADDTARARLKAVSAKDSGARLHALPSAPIGTLLDDESIRIAVGLRLGADIVSPHRCQCGHPVDKLGHHGLSCIISAGRRSRHAAINETFSRALRSCGRPCILEPPGLCAEDGKRPDGMTLTPFERGKMLVWDATVTDSLAPSMVGGGASEAGYAAHLAEANKLRKYSSIGYPHEFCPLAFETLGAPGVRTKQLIRKVGTLLNLSSGDNRSSTFLKQRLDLDIQRGNAASVRGTLLKWSRPGLIETDT

SEQ ID NO: 2552 - protein, 887 aa, Dermanyssus gallinae
MTQIRLIRIVPKSVRRQVAEAFTRVLTAVSSDNDVDAWYSLFSFAPVVLRLPRARSDASSLSVIIRNNLRDFHRNMRLSDVIATSHSRVSTLKPFKNDIVRQSIIKLSEGDVSGAARLIVSTDTITPGIDRIEALREQHPPAPENLEWPTLTRNPMPYVTSKEDIQAAIKSFSKSSAAGLDFIRPRLLMDLLSPSLEDVAASLLSALAKVVDILLWGNPPSCLQPLIFGARLFALKKKDGSVRPIACSSSLRRLAAKIGCNPNKAVISHATGAHQLGFATPAGTEVAIHATRAFLDSREPPGVLVKLDFKNAFNNIRRDHLMKAVASHAPHLLNHVGLAYRHPSHLVLPEHVISSATGLQQGDPLAPPLFCLGIKDLVDSFRSPLNLWYLDDGLLGGNVCTVADDIRRVLNFSVTSGLELNPAKCEICLLGPTIEAPEIQSLRDLLPGCKMTVKNDLELLGVPICPEGLPAAIERWRLNLENAAARLPLLGAHRGLFLLRSSFSSSRLIHLLRGADLSNQADELQRLNDLTLSTLESLLNTSLPPSAREQALLPVSKGGLGVPNLLTLAGPAIVSSMLSAENRATPLLDSAGVDQFRNRLAHLQENLEARCGGRPENVLSQRDWSSPLHDEVQRRLFNEAADDTARARLNAVSAKDSGAWLHALPSAPIGTLLDDESIRIAVGLRLGADIVSPHRCQCGHPVDKLGHHGLSCIISAGRRSRHAAINETFSRALRSCGRPCILEPPGLCAEDGKRPDGMTLTPFERGKMLVWDATVTDSLAPSMVGGGASEAGYAAHLAEANKLRKYSSIGYPHEFCPLAFETLGAPGVRTKQLIRKVGTWLNLSSGDNRSSSFLKQRLDLDIQRGNAASVRGTLLKWSRPGLIETDT

SEQ ID NO: 2553 - protein, 961 aa, Dermanyssus gallinae
MNDHDRTAQDGAASHPIPATIKCPLCDGRYTRRGLTRHISVKHPTATEASFSTTSTSVPSRLQPAQILEDIQAVMGRIRLIRIVPKSIRRQVAEALTRVLSAVSSDNDVEAWYGLFSFAPVVLRLPRARNDALSLSVIIRNNLRDFSQNMRLSDVIATLHPRTSTSKPFKNDTVRQSIIKLSEGDVSGAARLIVSTDTLTPGIDRIEALREQHPLASEDLEWPTLTRSPLPFVTSKEDIQAAIKSFSKSSAAGLDFMRPRLLMDLLSPSLEGVAASLLSALAKVVDILLWGSPPPCLRPLIFGARLFALQKKDGSVHPIACSSALRRLAAKIGCNHNKDAISHAIGAHQLGFATPAGTEVAIHAACAFLDSREPPGVFVKLDFKNAFNCIRRDHLMKAVAFHAPNLLNYVELAYRHPSHLVLPEHVISSTTGLQQGDPLAPPLFCLGIKDLVDSFRSPLNLLYLDDGLLGGNVCTVAEDIQRVLDFSVTSGLELNPAKCEICLFGPTLEAPEVQSLRNLLPGCKLTVKDDLELLGVPICPEGLPAAIERWRLKLENAAARLPLLGAHRGLFLLRSSFSSSRLIHLLRGADLSNRSDELQRLNDLTLSTLESLLNTSLPPSAREQALLPISKGGLGIPNLLTLAGPAIVSSMLSAQNRATPLLDSAGVDQFRNRLAHLQEILEARCGGRPENVLSQRDWSSPLHDEVQRRLFNEAADDTARARLNAVSAKDSGAWLHALPSAPIGTLLDDESIRIAVGLRLGADIVSPHRCQCGHPVDKLGHHGLSCIISAGRRSRHAAINETFSRALRSCGRPCILEPPGLCAEDGKRPDGMTLTPFERGKMLVWDATVTDSLAPSMVGGGASEAGYAAHLAETNKLRKYSSIGYPHEFCPLAFETLGAPGVRTKQLIRKVRTLLNLSSGDNRSSSFFKQRLDLDIQRGNAASVRGTLLKWSRPGLIETDT

SEQ ID NO: 2554 - protein, 961 aa, Dermanyssus gallinae
MNDHDRTAQDGAASHPIPATIKCPLCDGRYTRRGLTRHISVKHPTATEASFSTTSTSVPSRLQPEQILEDIQAVMGRIRLIRIVPKSIRRQVAEALTRVLSAVSSDNDVEAWYGLFSFAPVVLRLPRVRNDALSLSVIIRNNLRDFSQNMRLSDVIATSHPRTSTSKPFKNDTVRQSIIKLSEGDVSGAARLIVSTDTLTPGIDRIEALREQHPLAPEDLEWPTLTRSPLPFVTSKEDIQAAIKSFSKSSAAGLDFMRPRLLMDLLSPSLEGVAASLLSALAKVVDILLWGSPPPCLRPLIFGARLFALQKKDGSVRPIACSSALRRLAAKIGCNHNKDAISHATGAHQLGFATPAGTEVAIHAARAFLDSRELPGVFVKLDFKNAFNCIRRDHLMKAVAFHAPHLLNYVELAYRHPSHLVLPEHVISSATGLQQGDPLAPPLFCLGIKDLVDSFRSPLNLWYLDDGLLGGNVCTVAEDIQRVLDFSVTSGLELNPAKCEICLFGPTLEAPEVQSLRNLLPGCKLTVKDDLELLGVPICPEGLPAAIERWRLKLENAAARLPLLGAHRGLYLLRSSFSSSRLIHLLRGADLSNRSDELQRLNDLTLSTLESLLNTSLPPSAREQALLPISKGGLGVPNLLTLAGPAIVSSMLSAQNRATPLLDSAGVDQFRNRLAHLQENLEARCGGRPENVLSQRDWSSPLHDEVQRRLFNEAADDTARARLNAVSAKDSGAWLHALPSAPIGTLLDDESIRIAVGLRLGADIVSPHRCQCGHPVDKLGHHGLSCIISAGRRSRHAAINETFSRALRSCGRPCILEPPGLCAEDGKRPDGMTLTPFKRGKMLVWDATVTDSLAPSMVGGGASEAGYAAHLAETNKLRKYSSIGYPHEFCPLAFETLGAPGVRTKQLIRKVGTLLNLSSGDNRSSSFFKQRLDLDIQRGNAASVRGTLLKWSRPGLIETDT

SEQ ID NO: 2555 - protein, 961 aa, Dermanyssus gallinae
MNNHDRIAQDGEAPRTTSTTIKCPLCDERYTRRGLTRHISAKHPTATDASSSISTTSEPPRLQPAQILEDIQAVMRQIRLIRIVPKSVRRQVAEVFTRVLTAVSSDNDVEAWYSLFSFAPVVLRLPRARSDASSLSVIIRNNLRDFHRNMRLSDVIATSHSRVSTLKPFKNDIVRQSIIKLSEGDVSGAARLIVSTDTITPGIDRIEALREQHPPAPENLEWPTLTRNPMPYVTSKEDIQAAIKSFSKSSAAGLDFIRPRLLMDLLSPSLEDVAASLLSALAKVVDILLWGNPLSCLQPLIFGARLFALKKKDGSVRPIACSSSLRRLAAKIGCNHNKAVISHATGAHQLGFATPAGTEVAIHATRAFLDSREPPGVLVKLDFKNAFNNIRRDHLMKAVASHAPHLLNHVGLAYRHPSHLVLPEHVISSATGLQQGDPLAPPLFCLGIKDLVDSFRSPLNLWYLDDGLLGGNVCTVADDIRRVLNFSVTSGLELNPAKCEICLLGPTIEAPEIQSLRDFLPGCKMTVKNDLELLGVPICPEGLPAAIERWRLNLENAAARLPLLGAHRGLFLLRSSFSSSRLIHLLRGADLSNQADELQRLNDLTLSTLESLLNTSLPPSAREQALLPVSKGGLGVPNLLTLAGPAIVSSMLSAENRATPLLDSAGVDQFRNRLAHLQENLEARCGGRPENELSQRDWSSPLHDEVQRRLFNKAADDTARARLNAVSAKDSGAWLHALPSAPIGTLLDDESIRIAVGLRLGADIVSPHRCQCGHPVDKLGHHGLSCIISAGRRSRHAAINETFSRALRSCGRPCILEPPGLCAEDGKRPDGTTLTPFERGKMLVWDATVTDSLAPSMVGGGASEAGYAAHLAEANKLRKYSSIGYPHEFCPLAFETLGAPGVRTKQLIRKVGTLLNLSSGDNRSSSFLKQRLDLDIQRGNAASVRGTLLKWSRPGLIETDT

SEQ ID NO: 2556 - protein, 916 aa, Dermanyssus gallinae
MNNHDRIAQDGEAPRTTSTTIKCPLCDGRYTRRGLTRHISAKHPTATDASSSISTTSEPPRLQLAQILEDIQAVMRQIRLIRIVPKSVRRQVAEAFTRVLTAVSSDNDVEAWYSLFSFAPVVLRLPRARSDASSLSVIIRNNLRDFHRNMRLSDVIATSHSRVSTLKPFKNDIVRQSIIKLSEGDVSGAARLIVSTDTITPGIDRIEALREQHPPAPENLEWPTLTRNPMPYVTSKEDIQAAIKSFSKSSAAGLDFIRPRLLMDLLSPSLEDVAASLLSALAKVVDILLWGNPPSCLQPLIFGARLFALKKKDGSVRPIACSSSLRRLAAKIGCNHNKAVISHATGAHQLGFATPAGTEVAIHATRAFLDSREPPGVLVKLDFKNAFNNIRRDHLMKAVASHAPHLLNHVGLAYRHPSHLVLPEHVISSATGLQQGDPLAPPLFCLGIKDLVDSFRSPLNLWYLDDGLLGGNVCTVVNDIRRVHNFSVTSGLELNPAKCEICLLGPTIEAPEIQSLRDLLPGCKMTVKNDLELLGVPICPEGLPAAIERWRLNLENVAARLPLLGAHRGLFLLRSSFSSSRLIHLLRGADLSNQADELQRLNDLTLSTLESLLNTSLPPSAREQALLPVSKGGLGVPNLLTLAGPAIVSSMLSAENRATPLLDSAGVTQFRNRLAHLQENLEARCGGRPENVLSQRDWSSPLHDEVQRRLFNEAADDTARARLNAVSAKDSGAWLHALPSAPIGTLLDDESIRIAVGLRLGADIVSPHRCQCGHPVDKLGHHGLSCIISAGRRSRHAAINETFSRALRSCGRPCILEPPGLCAEDGKRPDGMTLTPFERGKMLVWDATVTDSLAPSMVGGGASEAGYAAHLAEANKLRKYSSIGYPHEFCPLAFETWRSDQAADPQSRDLVKPVIR

SEQ ID NO: 2557 - protein, 961 aa, Dermanyssus gallinae
MNDHDRTAQDGAASHPIPATIKCPLCDGRYTRRGLTRHISVKHPTATEASFSTTSTSVPSRLQPAQILEDIQAVLGRIRLIRIVPKSIRRQVAEVLTRVLSAVSSDNDVEAWYGLFSFAPVVLRLPRARNDALSLSVIIRNNLRDFSQNMRLSDVIATSHPRTSTSKPFKNDTVRQSIIKLSEGDVSGAARLIVSTDTLTPGIDRIEALREQHPLAPEDLEWPTRTRSPLPFVTSKEDIQAAIKSFSKSSAAGLDFMRPRLLMDLLSPSLEGVAASLLSALAKVVDILLWGSPPPCLRPLIFGARLFALQKKDGSVRPIACSSALRRLAAKIGCNHNKDAISHATGAHQLGFATPAGTKVAIHAACAFLDSREPPGVFVKLDFKNAFNCIRRDHLMKAVAFHAPHLLNYVELAYRHPSHLVLPEHVISSATGLQQGDPLAPPLFCLGIKDLVDSFRSPLNLWYLDDVLLGGNVCTVAEDIQRVLDFSVTSGLELNPAKCEICLFGPTLEAPEVQSLRNLLPGCKLTVKDDVELLGVPICPEGLPAAIERWRLKLENAAARLPLLGAHRGLFLLRSSFSSSRLIHLLRGADLSNRSDELQRLNDLTLSTLESLLNTSLPPSAREQALLPISKGGLGVPNLLTLAGPAMVSSMLSAQNRATPLLDSAGVDQFRNRLAHLQENLEARCGGRPENVLSQRDWSSPLHDEVQRRLFNEAADDTARARLNAVSAKDSGAWLHALPSAPIGTLLDDESIRIAVGLRLGADIVSPHRCQCGHPVDKLGHHGLSCIISAGRRSRHAAINETFSRALRSCGRPCILEPPGLCAEDGKRPDGMTLTPFERGKMLVWDGTVTDSLAPSMVGGGASEAGYAAHLAETKQLRKYSSIGYPHEFCPLAFETLGAPGVRTKQLIRKVGTLLNLSSGDNRSSSFFKQRLDLDIQRGNAASVRGTLLKWSRPGLIETDT

SEQ ID NO: 2558 - protein, 961 aa, Dermanyssus gallinae
MNNHDHIAQDGEAPRTTSTTIKCPLCDGRYTRRGLTRHISAKHPTATDASSSISTTSEPPRLQPAQILEDIQAVMRQIRLIRIVPKSVRRQVAEAFTRVLTAVSSDNDVEAWYSLFSFAPVVLRLPRARSDASSLSVIIRNNLRDFHRNMRLSDVIATSHSRVSTLKPFKNDIVRQSIIKLSEGDVSGAARLIVSTDTITPGIDRIEALREQHPPAPENLEWPTLTRNPMPYVTSKEDIQAAIKSFSKSSAAGLDFIRPRLLMDLLSPSLEDVAASLLSALGKVVDILLWGNPPSCLQPLIFGARLFALKKKDGSVRPIACSSSLRRLAAKIGCNHNKAVISHATGAHQLGFATPAGTEVAIHATRAFLDSREPPGVLVKLDFKNAFNNIRRDHLMKAVASHAPHLLNHVGLAYRHPSHLVLPEHVISSATGLQQGDPLAPPLFCLGIKDLVDSFRSPLNLWYLDDGLLGGNVCTVADDIRRVLNFSVTSGLELNPAKCEICLLGPTIEAPEIQSLRDLLPGCKMTVKNDLELLGVPICPEGLPAAIERWRLNLENAAARLPLLGAHRGLFLLRSSFSSSRLIHLLRGADLSNQADELQRLNDLTLSTLESLLNTSLPPSAREQALLPVSKGGLGVPNLLTLAGPAIVSSMLSAENRATPLLDSAGVDQFRNRLAHLQENLEARCGGRPENVLSQRDWSSPLHDEVQRRLFNEAADDTARARLKAVSAKDSGAWLHALPSAPIGTLLDDESIRIAVGLRLGADIVSPHRCQCGHPVDKLGHHGLSCIISAGRRSRHAAINETFSRALRSCGRPCILEPPGLCAEDGKRPDGMTLTPFERGKMLVWDATVTDSLAPSMVGGGASEAGYAAHLAEANKLRKYSSIGYPHEFCPLAFETLGAPGVRTKQLIRKVGTLLNLSSGDNRSSTFLKQRLDLDIQRGNAASVRGTLLKWSRPGLIETDT

SEQ ID NO: 2559 - protein, 962 aa, Dermanyssus gallinae
MNDYDRTAHGAEASRATSSTTKCPLCDGRYTRRGLTRHISAKHPTATVASSSIPTTSDTPRLQPAQILEDIQAVMGQIRLIRIVPKSVRRQVAEALTRVLSAVSSDNDVEAWYGLFSFAPVVLRLPRARNDASSLSVIIRNNLRDFSQGMRLSDVIATSHARVSTPKPFRNDTVRQSIIKLSEGDVSGAARLIVSTDTITPGIDRIEALREQHPLAPEDLEWPTLTRTPMPYVTSKEDIQVAIKSFSKSSAAGLDFMRPRLLMDLLSPSLNDVAASLLSALAKAVDILLWGNPPSCLQPLIFGARLFALKKKDGSVRPIACSSTLRRLAAKIGCNHNKAVISGATGAHQLGFATPGGTEVAIHATRAFLDSRERSGVLVKLDFRNAFNSMRRDHLMKIVASHAPHLLHHVGLAYRHPSHLVLPEHAISSATGLQQGDPLAPALFCLGIKDLVDSFKSPLNLWYLDDGLLGGNVHTVAEDIRRVLNFGVISGLELNPAKCEVCTLGSTGETSPDIQLLRDLLPGCKVTAKDDLELLGVPLCPEGLTAAIERWRLKLENAAARLPLLGAHRGLFLLRSSISSLRLIHLLRGADLSNRVDDLQALNELTLSTLEALLNTSLPPSARQQALLPVSQGGLGVPNLQTLAGPAIVSSMLSAENRATPLLDTAGVGQFRSRSARLQENLEARCGGRPDNILSQHDWSAPLHAEVQRRLFNEAADDTTRARLNAVSAKDSGAWLHALPSAPIGTLLDDETIRIAVGLRLGTDLVSPHRCQCGHPVDKLGHHGLSCIISAGRRPRHAAINETFSRALRSCGRPCILEPPGLCVEDGRRPDGMTLTPFERGKMLVWDATVTDSLAPSMVGGGASEAGYAAHLAETSKLRKYSSIGYPHEFWPLAFETMGGPGVRTRQLIRKVGTLLDQSTGDNRSSSFFKQRLDLDIQRGNAASIRGTLLKWSRPSLDEADT

SEQ ID NO: 2560 - protein, 962 aa, Dermanyssus gallinae
MNDYDRTAHGAEASRATSSTTKCPLCDGRYTRRGLTRHISAKHPTATVASSSIPTTSDPPRLQPAQILEDIQAVMGQIRLIRIVPKSVRRQVAEALTRVLSAVSSDNDVEAWYGLFSFAPVVLRLPRARNDASSLSVIIRNNLRDFSQGMRLSDVIATSHARVSTPKPYRNDTVRQSIIKLSEGDVSGAARLIVSTDTITPGIDRIEALREQHPLAPEDLEWPTLTRTPMPYVTSKEDIQVAIRSFSKSSAAGLDFMKPRLLMDLLSPSLNDVAASLLSALAKAVDILLWGNPPPCLKPLIFGARLFALKKKNGSVRPIACSSTLRRLAAKIGCNHNKAVISNATGAHQLGFATPGGTEVAIHATRAFLDSRERSGVLVKLDFRNAFNSMRRDHLMKVVASHAPHLLHHVGLAYRHPSHLVLPEHVISSATGLQQGDPLAPPLFCLGIKDLVDSFKSPLNLWYLDDGLLGGNVHTVAEDIRRVLNYGVISGLELNPAKCEVCTLGSTGEASPDIQLLRDLLPGCKVTAKDDLELLGVPLCPEGLTAAIERWRVKLENAASRLPLLGAHRGLFLLRSSFSSLRLIHLLRGADLSNRVDDLQALNELTLSTLEALLNTSLPPSARQQALLPVSQGGLGVPNLQTLAGPAIVSSMLSAENRATPLLDTAGVGQFRSRLAQLQGNLEARCGGRPDNILSQHDWSAPLHAEVQRRLFNEAPDDTTRARLNAVSAKDSGAWLHALPSAPIGTLLDDETIRIAVGLRLGTDLVSPHRCQCGHPVDKLGHHGLSCIISAGRRPRHAAINETFSRALRSCGRPCILEPPGLCVEDGRRPDGMTLTPFEQGKMLVWDATVTDSLAPSMVGGGASEAGYAAHLAETSKLRKYSSIGYPHEFWPLAFETMGGPGVRTRQLIRKVGTLLDQSTGDNRSSSFFKQRLDLDIQRGNAASVRGTLLKWSRPSLDEADT

SEQ ID NO: 2561 - protein, 949 aa, Dermanyssus gallinae
MNDYDRTAHGAEASRATSSTTKCPLCDGRYTRRGLTRHISAKHPTATVASSSIPTTSDPPRLQPAQILEDIQAVMGQIRLIRIVPKSVRRQVAEALTRVLSAVSSDNDVEAWYGLFSFAPVVLRLPRARNDASSLSVIIRNNLRDFSQGMRLSDVIATSHARVSTPKPFRNDTVRQSIIKLSEGDVSGAARLIVSTDTITPGIDRIEALREQHPLAPEDLEWPTLTRTPMPYVTSKEDIQVAIRSFSKSSAAGLDFMRPRLLMDLLSPSLNDVAASLLSALAKAVDILLWGNPPPCLQPLIFGARLFALKKKNGSVRPIACSSTLRRLAAKIGCNHNKAVISNATGAHQLGFATPGGTEVAIHATRAFLDSRERSGVLVKLDFRNAFNSMRRDHLMKVVASHAPHLLHHVGLAYRHPSHLVLPEHVISSATGLQQGDPLAPPLFCLGIKDLVDSFKSPLNLWYLDDGLLGGNVHTVAEDIRRVLNYGVISGLELNPAKCEVCTLGSTGEASPDIQLLRDLLPGCKVTAKDDLELLGVPLCPEGLTAAIERWRVKLENAAARLPLLGAHWGLFLLRSSFSSLRLIHLLREADLSNRVDDLQALNELTLSTLEALLNTSLTPSARQQALLPVSQGGLGVPNLQTLAGPAIVSSMLSAENRATPLLDTAGVGQFRSRLAQLQGNLEARCGGRPDNILSQHDWSAPLHAEVQRRLFNEAPDDTTRARLNAVSAKDSGAWLHALPSAPIGTLLDDETIRIAVGLRLGTDLVSPHRCQCGHPVDKLGHHGLSCIISAGRRPRHAAINETFSRALRSCGRPCILEPPGLCVEDGRRPDGMTLTPFEQGKMLVWDATVTDSLAPSMVGGGASEAGYAAHLAETSKLRKYSSIGYPHEFWPLAFETMGGPGVRTRQLIRKVGTLLNQSTGDNRSSSFLNNVWISTYNVETRPPFGAHF

SEQ ID NO: 2562 - protein, 866 aa, Dermanyssus gallinae
MNDYNHSAQGGEASRATPSTIKCPLCDSRYTRRGLTRHISAKHSTATNTTSRDMRLSDVIATPHSRVSAPKPFRNDTVRQSIIKLSEGDVSGAARLIASTDTITPGIDRIEALQEQHPLPPENLEWPTLIRTPMPYVTSKEDIQVAIKSFSKSSAAGLDFMRPRLLMDLLSPSLEDVAANLLSALAKVVDILLWGNPPSCLQPLIFGARLFALMKKDGSVRPIACSSTLRRLAAKIGCKHNKAVISHATGAHQLGFATPGGTEVAIHATRAFLDSREPPGVPVKLDFRNAFNSMRRDHLMKAVASHAPHLLHHVGLAYRHPSHLVLPEHVISSATGLQQGDPLAPPLFCLGIKDLVDSFKSPLNLWYLDDGLLGGNVHTVAEDIRRVLDFGVTSGLELNPAECEVCILGSTHEASPDIQLLQDLFPGCKVTAKDDLELLGVPLRPEGLTAAIKRWRLKLENAAARLPLLGAHRGLFLLRSSFSSLRLIHLLRGADLSNRAEDLQALNESTLSTLEALLNTSLPSSARQQALLPVSKGGLGVPNLETLAGPAIVSSMLSAENRAIPLLDTPGVGQFRSRLAQLQENLEARCGGRPDNVLSQRDWSAPLHAEVQRRLLNEAADDTTRARLNAVSAKDSGAWLHALPSAPIGTLLDAETIRIAVRLRLGTDLVSPHRCQCGHPVDKLGHHGLSCIISAGRRSRHAAINDTFSRALRSCGRPCILEPTGLCAEDGRRPDGMTLTPFERGKMLVWDATVTDSLTPSMVGGGASEAGYAAHLAETNKLRKYSSIGYPHEFWPLAFETLGAPGVRTRQLIHKVGTMLNMLTGDSRSSSFFKQRLDLDVQRGNAASVRGTLLKWSRPSLDEADT

SEQ ID NO: 2563 - protein, 959 aa, Dermanyssus gallinae
MNDYNHSAQGGEASRATPSTIKCPLCDGRYTRRGLTRHISAKHSTATDTTSPTSEPPRLQPTQILEDIQAVMGRTRLIRIVPKSVRRQVAEALTRVLTAVSSDNDVEAWYSLFSFAPVVLRLPRARNDASSLSVIIRNNLRDFSRDMRLSDVIATPHSRVSAPKPFRNDTVRQSIIKLSEGDVSGAARLIASTDTITPGIDRIEALQEQHPLPPENLEWPTLIRTPMPYVTSKEDIQVAIKSFSKSSAAGLDFMRPRLLMDLLSPSLEDVAANLLSALAKVVDILLWGNPPSCLQPLIFGARLFALMKKDGSVRPIACSSTLRRLAAKIGCKHNKAVISHATGAHQLGFATPGGTEVAIHATRAFLDSREPPGVLVKLDFRNAFNSMRRDHLMKAVASHAPHLLHHVGLAYRHPSHLVLPEHVISSATGLQQGDPLAPPLFCLGIKDLVDSFKSPLNLWYLDDGLLGGNVHTVAEDIRRVLDFGVTSGLELNPAKCEVCILGSTHEASPDIQLLQDLLPGCKVTAKDDLELLGVPLRPEGLTAAIKRWRLKLENAAARLPLLGAHRGLFLLRSSFSSLRLIHLLRGADLSNRAEDLQALNESTLSTLEALLNTSLPSSARQQALLPVSKGGLGVPNLETLAGPAIVSSMLSAENRAIPLLDTPGVGQFRSRLAQLQENLEARCGGRPDNVLSQRDWSAPLHAEVQRRLFNEAADDTTRARLNAVSAKDSGAWLHALPSAPIGTLLDDETIRIAVGLRLGTDLVSPHRCQCGHPVDKLGHHGLSCIISAGRRSRHAAINDTFSRALRSCGRPCILEPTGLCAEDGRRPDGMTLTPFERGKMLVWDATVTDSLAPSMVGGGASEAGYAAHLAETNKLRKYSSIGYPHEFWPLAFETLGAPGVRTRQLIHKVGTMLNMSTGDSRSSSFFKQRLDLDVQRGNAASVRGTLLKWSRPSLDEADT

SEQ ID NO: 2564 - protein, 962 aa, Dermanyssus gallinae
MNDYDRTAHGAEASRATSSTTKCPLCDGRYTRRGLTRHISAKHPTATVASSSIPTTSNPPRLQPAQILEDIQAVMGQIRLIRIVPKSVRRQVAEALTRVLSAVSSDNDVEAWYGLFSFAPVVLRLPRARNDASSLSVIIRNNLRDFSQGMRLSDVIATSHARVSTPKPFRNDTVRQSIIKLSEGDVSGAARLIVSTDTITPGIDRIEALREQHPLAPEDLEWPTLTRTPMPYVTSKEDIQVAIRSFSKSSAAGLDFMRPRLLMDLLSPSLNDVAASLLSALAKAVDILLWGNPPPCLKPLIFGARLFALKKKNGSVRPIACSSTLRRLAAKIGCNHNKAVISNATGAHQLGFATPGGTEVAIHATRAFLDSRERSGVLVKLDFRNAFNSMRRDHLMKVVASHAPHLLHHVGLAYRHPSHLVLPEHVISSATGLQQGDPLAPPLFCLGIKDLVDSFKSPLNLWYLDDGLLGGNVHTVAEDIQRVLNYGVISGLELNPAKCEVCTLGSTGEASPDIQLLRDLLPGCKVTAKDDLELLGVPLCPEGLTAAIERWRVKLENAASRLPLLGAHRGLFLLRSSFSSLRLIHLLRGADLSNRVDDLQALNELTLSTLEALLNTSLPPSARQQALLPVSQGGLGVPNLQTLAGPAIVSSMLSAENRATPLLDTAGVGQFRSRLAQLQGNLEARCGGRPDNILSQHDWSAPLHAEVQRRLFNEAPDDTTRARLNAVSAKDSGAWLHALPSAPIGTLLDDETIRIAVGLRLGTDLVSPHRCQCGHPVDKLGHHGLSCIISAGRRPRHAAINETFSRALRSCGRPCILEPPGLCVEDGRRPDGMTLTPFEQGKMLVWDATVTDSLAPSMVGGGASEAGYAAHLAETSKLRKYSSIGYPHEFWPLAFETMGGPGVRTRQLIRKVGTLLDQSTGDNRSSSFFKQRLDLDIQRGNAASVRGTLLKWSRPSLDEADT

SEQ ID NO: 2565 - protein, 913 aa, Dermanyssus gallinae
MVATDIYIYMSPPRLQPTQILEDIQAVMGRTRLIRIVPKSVRRQVAEALTRVLTAVSSDNDVEAWYSLFSFAPVVLRLPRARNDASSLSVIIRNNLRDFSRDMRLSDVIATPHSRVSAPKPFRNDTVRQSIIKLSEGDVSGAARLIASTDTITPGIDRIEALQEQHPLPPENLEWPTLIRTPMPYVTSKEDIQVAIKSFSKSSAAGLDFMRPRLLMDLLSPSLEDVAANLLSALAKVVDILLWGNPPSCLQPLIFGARLFALMKKDGSVRPIACSSTLRRLAAKIGCKHNKAIISHATGAHQLGFATPGGTEVAIHATRAFLDSREPPGVLVKLDFRNAFNSMRRDHLMKASHAPHLLHHVGLAYRHPSHLVLPEHVISSATGLQQGDPLAPPLFCLGIKELVDSFKSPLNLWYLDDGLLGGNVHTVAEDIRRVLDFSVTSGLELNPAKCEVCILGSTHEASPDIQLLQDLLPGCKVTAKDDLELLGVPLRPEGLTAAIKRWRLKLENAAARLPLLEAHRGLFLHRSSFSSLRLIHLLRGADLSNRAEDLQALNESTLSTLEALLNTSLPSSARQQALLPVSKGDLGVPNLETLAGPAIVSSMLNAENRAIPLLDTPGVGQFRSRLAQLQENLEARCGGRPDNVLSQRDWSAPLHAEVQRRLFNEAADDTTRARLNAVSAKDSGAWLHALPSAPIGTLLDDETIRIAVGLRLGTDLVSPHRCQCGHPVDKLGHHGLSCIISAGRRSRHAAINDTFSRALRSCGRPCILEPTGLCAEDGRRPDGMTLTPFERGKILVWDATVTDSLAPSMVGGGASEAGYAAHLAETNKLRKYSSIGYPHEFWPLAFETLGAPGVRTRQLIHKVGTMLNMSTGDSRSSSFFKQRLDLDVQRGNAASVRGTLLKWSRPSLDEADT

SEQ ID NO: 2566 - protein, 959 aa, Dermanyssus gallinae
MNDYNHSAQGGEASRATPSTIKCPLCDGRYTRRGLTRHISAKHSTATNTTSPTSEPPRLQPTQILEDIQAVMGRTRLIRIVPKSVRRQVAEALTRVLTAVSSDNDVEAWYSLFSFAPVVLRLPRARNDASSLSVIIRNNLRDFSRDMRLSDVIATPHSRVSAPKPFRNDTVRQSIIKLSEGDVSGAARLIASTDTITLGIDRIEVLQEQHSLPPENLEWPTLIRTPMPYVTSKEDIQVAIKSFSKSSAAGLDFMRPRLLMDLLSPSLEDVAANLLSALAKVVDILLWGNPPSCLQPLIFGARLFALMKKDGSVRPIACSSTLRRLAAKIGGKHSKAVISHATGAHQLGFATPGGTEVAIHATRAFLDSREPPGVLVKLDFRNAFNSMRRDHLMKAVASHAPHLLHHVGLAYRHPSHLVLPEHVISSATGLQQGDPLAPPLFCLGIKDLVDSFKSPLNLWYLDDGLLGGNVHTVAEDIRQVLDFGVTSGLELNPAKCEVCILGSTHEASPDIQLLQDLLPGCKVTAKDDLELLGVPLRPEGLTAAIKRWRLKLENATARLPLLGAHRGLFLLRSSFSSLRLIHLLRGADLSNRAEDLQALNESTLSTLEALLNTSLPSSARQQALLPVSKGGLGIPNLETLAGPAIVSSMLSAENRAIPLLDTPGVGQFRSRLAQLQENLEARCGGRPDNVLSQRDWSAPLHAEVQRRLFNEAADDTTRARLNAVSAKDSGAWLHALPSAPIGTLLDDETIRIAVGLRLGTDLVSPHRCQCGHPVDKLGHHGLSCIISAGRRSRHAAINDTFSRALRSCGRPCILEPTGLCAEDGRRPDGMTLTPFERGKMLVWDATVTDSLAPSMVGGGASEAGYAAHLAETNKLRKYSSIGYPHEFWPLAFETLGAPGVRTRQLIHKVGTMLNMSTGDSRSSSFFKQRLDLDVQRGNAASVRGTLLKWSRPSLDEADT

SEQ ID NO: 2567 - protein, 962 aa, Dermanyssus gallinae
MNDYDRTAHGAEASRATSSTTKCPLCDGRYTRRGLTRHISAKHPTATVASSSIPTTSDTPRLQPAQILEDIQAVMGQIRLIRIVPKSVRKQVAEALTRVLSAVSSDNDVEAWYGLFSFAPVVLRLPRARNDASSLSVIIRNNLRDFSQGMRLSDVIATSHARVSTPKPFRNDTVRQSIIKLSEGDVSGAARLIVSTDTITPGIDRIEALREQHPLAPEDLEWPTLTRTPMPYVTSKEDIQVAIKSFSKSAAAGLDFMRPRLLMDLLSPSLNDVAASLLSALAKAVDILLWGNPPSCLQPLIFGARLFALKKKDGSVRPIACSSTLRRLAAKIGCNHNKAVISGATSAHQLGFATPGGTEVAIHATRAFLDSRERSGVLVKLDFRNAFNSMRRDHLMKVVASHAPHLLHHVGLAYRHPSHLVLPEHAISSATGLQQGDPLAPALFCLGIKDLVDSFKSPLNLWYLDDGLLGGNVHTVAEDIRRVLNFGVISGLEVNPAKCEVCTLGSTGETSPDIQLLRDLLPGCKVTAKDDLELLGVPLCPEGLTAAIERWRLELENAAARLPLLGAHRGLFLLRSSFSSLRLIHLLRGADLSNRVDDLQALNELTLSTLEALLNTSLPPSARQQALLPVSQGGLGVPNLQTLAGPAIVSSMLSAENRATPLLDTAGVGQFRSCSARLQENLEARCGGRPDNILSQHDWSAPLHAEVQRRLFNEAADDTTRARLNAVSAKDSGAWLHALPSAPIGTLLDDETIRIAVGLRLGTDLVSPHRCQCGHPVDKLGHHGLSCIISAGRRPRHAAINETFSRALRSCGRPCILEPPGLCVEDGRRPDGMTLTPFERGKMLVWDATVTDSLAPSMVGGGASEAGYAAHLAETSKLRKYSSIGYPHEFWPLAFETMGGPGVRTRQLIRKVGTLLDQSTGDNRSSSFFKQRLDLDIQRGNAASVRGTLLKWSRPSLDEADT

SEQ ID NO: 2568 - protein, 962 aa, Dermanyssus gallinae
MNDYDRTAHGAEASRATSSTTKCPLCDGRYTRRGLTRHISAKHPTATVASSSIPTTSDTPRLQPAQILEDIQAVMGQIRLIRIVPKSVRRQVAEALTRVLSAVSSDNDVEAWYGLFSFAPVVLRLPRARNDASSLSVIIRNNLRDFSQGMRLSDVIATSHARVSTPKPFRNDTVRQSIIKLSEGDVSGAARLIVSTDTITPGIDRIEALREQHPLAPEDLEWPTLTRTPMPYVTSKEDIQVAIKSFSKSSAAGLDFMRPRLLMDLLSPSLSDVAASLLSALAKAVDILLWGNPPSCLQPLIFGARLFALKKKDGSVRPIACSSTLRRLAAKIGCNHNKAVISGATGAHQLGFATPGGTEVAIHATRAFLDSRERSGVLVKLDFRNAFNSMRRDHLMKVVASHARHLLHHVGLAYRHPSHLVLPEHAISSATGLQQGDPLAPALFCLGIKDLVDSFKSPLNLWYLDDGLLGGNVHTVAEDIRRVLNFGVISGLELNPAKCEVCTLGSTGETSPDIQLLRDLLPGCKVTAKDDLELLGVPLCPEGLTAAIERWRLKLENAAARLPLLGAHRALFLLRSSFSSLRLIHLLRGADLSNRVDDLQALNELTLSTLEALLNTSLPPSARQQALLPVSQGGLGVPNLQTLAGPAIVSSMLSAENRATPLLDTAGVGQFRSRSARLQENLEARCGGRPDNILSQHDWSAPLHAEVQRRLLNEAADDTTRARLNAVSAKDSGAWLHTLPSAPIGTLLDDETIRIAVGLRLGTDLVSPHRCQCGHPVDKLGHHGLSCIISAGRRPRHAAINETFSRALRSCGRPCILEPPGLCVEDGRRPDGMTLTPFERGKMLVWDATVTDSLAPSMVGGGASEAGYAAHLAETSKLRKYSSIGYPHEFWPLAFETMGGPGVRTRQLIRKVGTLLDQSTGDNRSSSFFKQRLDLDIQRGNAASVRGTLLKWSRPSLDEAYT

SEQ ID NO: 2569 - protein, 890 aa, Dermanyssus gallinae
MNDYNHSAQGGEASRATPSTIKCPLCDGRYTRRGLTRHISAKHSTATDTTSPTSEPPRLQPTQILEDIQAVMGRTRLIRIVPKSVRRQVAEALTRVLTAVSSDNDVEAWYSLFSFAPVVLRLPRARNDASSLSVIIRNNLRDFSRDMRLSDVIATPHSRVSALKPFRNDTVRQSIIKLSEGDVSGAARLIASTDTITPSIDRIEALQEQHPLPPENLEWPTLIRTPMPYVTSKEDIQVAIKSFSKSSAAGLDFMRPRLLMDLLSPSLEDVAANLLSALAKVVDILLWGNPPSCLQPLIFGARLFALMKKDGSVRPIACSSTLRRLAAKIGCKYNKAVISHATGAHQLGFATPGGTEVAIHATRAFLDSRESPGVLVKLDFRNAFNSMRRDHLMKAVASHAPHLLHHVGLAYRHPSHLVLPEHVISSATGLQQGDPLAPPLFCLGIKDLVDSFKSPLNLWYLDDGLLGGNVHTVAEDIRRVLDFGVTSGLELNPAKCEVCILGSTHEASPNIQLLQDLLPGCKVTAKDDLELLGVPLRPEGLTAAIKRWKLKLENAAARLPLLGAHRGLFLLGSSFSSLRLIHLLRGADLSNRAEDLQALNESTLSTLEALLNTSLPSSARQQALLPVSKGGLGVPNLETLAGPAIVSSMLSAENRAIPLLDTPGVGQFRSRLAQLQENLEARCGGRPDNVLSQRDWSALLHAEVQRRLFNEAADDTTRARLNAVSAKDSGAWLHALPSAPIGTLLDDEAIRIAVGLRLGTDLVSPHRCQCGHPVDKLGHHGLSCIISAGRRSRHAAINDTFSRALRSCGRPCILEPTGLCAEDGRRPDGMTLTPFERGKMLVWDATVTDSLAPSMVGGGRSWLCSPSCGDQQAKKILINWVSPRILASRV

SEQ ID NO: 2570 - protein, 962 aa, Dermanyssus gallinae
MNDYDRTAHGAEASRATSSTTKCPLCDGRYTRRGLTRHISAKHPTATVASSSIPTTSDTPRLQPAQILEDIQAVMGQIRLIRIVPKSVRRQVGEALTRVLSAVSSDNDVEAWYGLFSFAPVVLRLPRARNDASSLSVIIRNNLRDFSQGMRLSDAIATSHARVSTPKPFRNDTVRQSIIKLSEGDVSGAARLIVSTDTITPGIDRIEALREQHPLAPEDLEWPTLTRTPMPYVTSKEDIQVAIKSFSKSSAAGLDFMRPRLLMDLLSPSLNDVAASLLSALAKAVDILLWGNPPSCLQPLIFGARLFALKKKDGSVRPIACSSTLRRLAAKIGCNHNKAVISGATGAHQLGFATPGGTEVAIHATRAFLDSRERSGVLVKLDFRNAFNSMRRDHLMKVVASHAPHLLHHVGLAYRHPSHLVLPEHAISSATGLQQGDPLAPALFCLGIKDLVDSFKSPLNLWYLDDGLLGGNVHTVAEDIRRVLNFGVISGLELNPAKCEVCTLGSTGETSPDIQLLRDLLPGCKVTAKDDLELLGVPLCPEGLTAAIERWRLKLENAAARLPLLGAHRGLFLLRSSFSSLRLIHLLRGADLSNRVDDLQALNELTLSTLEALLNTSLPPSARQQALLPVSQGGLGVPNLQTLAGPAIVSSMLSAENRATPLLDTAGVGQFRSRSARLQENLEARCGGRPDNILSQHDWSAPLHAEVQRRLFNEAADDTTRARLNAVSAKDSGAWLHALPSAPIGTLLDDETIRIAVGLRLGTDLVSPHRCQCGHPVDKLGHHGLSCIISAGRRPRHAAINETFSRALRSCGRPCILEPPGLCVEDGRRPDGMTLTPFERGKMLVWDATVTDSLAPSMVGGGASEAGYAAHLAETSKLRKYSSIGYPHEFWPLAFETMGGPGVRTRQLIRKVGTLLDQSTGDNRSSSFFKQRLDLDIQRGNAASVRGTLLKWSRPSLDEADT

SEQ ID NO: 2571 - protein, 962 aa, Dermanyssus gallinae
MNDYDRTAHGAEASRATSSTTKCPLCDGRYTRRGLTRHISAKHPTATVASSSIPTTSDPPRLQPAQILEDIQAVMGQIRLIRIVPKSVRRQVAEALTRVLSAVSSDNDVEAWYGLFSFAPVVLRLPRARNDASSLSVIIRNNLRDFSQGMRLSDVIATSHARVSTPKPFRNDTVRQSIIKLSEGDVSGAARLIVSTDTITPGIDRIEALREQHPLAPEDLEWPALTRTPMPYVTSKEDIQVAIKSFSKSSAAGLDFMRPRLLMDLLSPSLNDAAASLLSALAKAVDILLWGNPPPCLQPLIFGARLFALKKKNGSVRPIACSSTLRRLAAKIGSNHNKAVISNATGAHQLGFATPGGTEVAIHATRAFLDSRERSGVLVKLDFRNAFNSMRRDHLMKVVASHAPHLLHHVGLAYRHPSHLVLPEHVISSATGLQQGDPLAPPLFCLGIKDLVDSFKSPLNLWYLDDGLLGGNVHTVAEDIRRVLNYGVISGLELNPAKCEVCTLGSTGEASPDIQLLRDLLPGCKVTAKDDLELLGVPLCPEGLTAAIERWRVKLENAAARLPLLGAHRGLFLLRSSFSSLRLIHLLRGADLSNRVDDLQALNELTLSTLEALLNTSLPPSARQQALLPVSQGGLGVPNLQTLAGPAIVSSMLSAENRATPLLDTAGVGQFRSRLAQLQGNLEARCGGRPDNILSQHDWSAPLHAEVQRRLFNEAPDDTTRARLNAVSAKDSGAWLHALPSAPIGTLLDDETIRIAVGLRLGTDLVSPHRCQCGHPVDKLGHHGLSCIISAGRRSRHAAINETFSRALRSCGRPCILEPPGLCVEDGRRPDGMTLTPFEQGKMLVWDATVTDSLAPSMVGGGASEAGYAAHLAETSKLRKYSSIGYPHEFWPLAFETMGGPGVRTRQLIRKVGTLLDQSTGDNRSSSFFKQRLDLDIQRGNAASVRGTLLKWSRPSLDEADT

SEQ ID NO: 2572 - protein, 962 aa, Dermanyssus gallinae
MNDYDRTAHGAEASRATSSTTKCPLCDGRYTRRGLTRHISAKHPTATVASSSIPTTSDTPRLQPAQILEDIQAVMGQIRLIRIVPKSVRRQVAEALTRVLSAVSSDNDVEAWYGLFSFAPVVLRLPRARNDASSLSVIIRNNLRDFSQGMRLSDVIATSHARVSTPKPFRNDTVRQSIIKLSEGDVSGAARLIVSTDTITPGIDRIEALREQHPLAPEDLEWPTLTRTPMPYVTSKEDIQVAIKSFSKSSAAGLDFMRPRLLMDLLSPSLNDVAASLLSALAKAVDILLWGNPPSCLQPLIFGARLFALKKKDGSVRPIACSSTLRRLAAKIGCNHNKAVISGATGAHQLGFATPGGTEVAIHATRAFLDSRERSGVLVKLDFRNAFNSMRRDHLMKVVASHAPHLLHHVGLAYRHPSHLVLPEHAISSATGLQQGDPLAPALFCLGIKDLVDSFKSPLNLWYLDDGLLGGNVHTVAEDIRRVLNFGVISGLELNPAKCEVCTLGSTGETSPDIQLLRDLLPGCKVTAKDDLELLGVPLCPEGLTAAIERWRLKLENAAARLPLLGAHRGLFLLRSSFSSLRLIHLLRGADLSNRVDDLQALNELTLSTLEALLNTSLPPSARQQALLPVSQGGLGVPILQTLAGPAIVSSMLSAENRATPLLDTAGVGQFRSRSARLQENLEARCGGRPDNILSQHDWSAPLHAEVQRRLFNEAADDTTRARLNAVSAKDSGAWLHALPSAPIGTLLDDETIRIAVGLRLGTDLVSPHRCQCGHPVDKLGHHGLSCIISAGRRPRHAAINETFSRALRSCGRPCILEPPGLCVEDGRRPDGMTLTPFERGKMLVWDATVTDSLAPSMVGGGASEAGYAAHLAETSKLRKYSSIGYPHEFWPLAFETMGGPGVRTRQLIRKVGTLLDQSTGDNRSSSFFKQRLDLDIQRGNAASVRGTLLKWSRPSLDEADT

SEQ ID NO: 2573 - protein, 962 aa, Dermanyssus gallinae
MNDYDRTAHGAKASRATSSTTKCPLCDGRYTRRGLTRHISAKHPTATVASSSIPTTSDPPRLQPAQILEDIQAVMGQIRLIRIVPKSVRRQVAEALTRVLSAVSSDNDVEAWYGLFSFAPVVLRLRRARNDASSLSVIIRNNLRDFSQGVRLSDVIATSHARVSTPKPFRNDTVRQSIIKLPEGDVSGAARLIVSTDTITPGIDRIEALREQHPLAPEDLEWPTLTRTPMPYVTSKEDIQVAIKSFSKSSAAGLDFMRPRLLMDLLSPSLNDVAASLLSALAKAVDILLWGNPPSCLQPLIFGARLFALKKKNGSVRPIACSSTLRRLAAKIGCNHNKAVISNATGAHQLGFATPGGTEVAIHATRAFLDSRERSGVLVKLDFRNAFNSMRRDHLMEVVASHAPHLLHHVGLAYRHPSHLVLPEHVISSATGLQQGDPLAPPLFCLGIKDLVDSFKSPLNLWYLDDGLLGGNVHTVAEDTRRVLNYGVISGLELNPAKCEVCTLGSTGEASPDIQLLRDLLPGCKVTAKDDLELLGVPLCPEGLTAAIERWRLKLENAAARLPLLGAHRGLFLLRSSFSSLRLIHLLRGADLSNRVDDLQALNELTLSTLEALLNTSLPPSARQQALLPVSQGGLGVPNLQTLAGPAIVSSMLSAENRATPLLDTAGVGQFRSRLAQLQENLEARCGGRPDNILSQHDWSAPLHAEVQRRLFNEAPDDTTRAHLNAVSAKDSGAWLHALPSAPIGTLLDGETIRIAVGLRLGTDLVSPHRCQCGHPVDKLGHHGLSCIISAGQRPRHAAINETFSRALRSCGRPCILEPPGLCVEDGRRPDGMTLTPFEQGKMLVWDATVTDSLAPSMIGGGASEAGYAAHLAETSKLRKYSSIGYPHEFWPLAFETMGGPGVRTRQLIRKVGTLLDQSTGDNRSSSFFKQRLDLDIQRGNAASVRGTLLKWSRPNLDEADT

SEQ ID NO: 2574 - protein, 959 aa, Dermanyssus gallinae
MNDYNHSAQGGEASRATPSTIKCPLCDGRYTRRGLTRHISAKHSTATDTTSPTSEPPRLQPTQILEDIQAVMGRTRLIRIVPKSVRRQVAEALTRVLTAVSSDNDVEAWYSLFSFAPVVLRLPRARNDASSLSVIIRNNLRDFSRDMRLSDVIATPHSRVSAPKPFRNDTVRQSIIKLSEGDVSGAARLIASTDTITPGIDRIEALQEQHPLPPENLEWPTLIRTPMPYVTSKEDIQVAIKSFSKSSAAGLDFMRPRLLMDLLSPSLEDVAANLLSALAKVVDILLWGNPPSCLQPLIFGARLFALMKKDGSVRPIACSSTLRRLAAKIGCKHNKAVISHATGAHQLGFATPGGTEVAIHATRAFLDSREPPGVLVKLDFRNAFNSMRRDHLMKAVASYAPHLLHHVGLAYRHPSHLVLPEHVISSATGLQQGDPLAPPLFCLGIKDLVDSFKSPLNLWYLDDGLLGGNVHTVAEDIRRVLDFGVTSGLELNPAKCEVCILGSTHEASPDIQLLQDLLPGCKVTAKDDLELLGVPLRPEGLTAAIKRWRLKLENAAARLPLLGAHRGLFLLRSSFSSLRLIHLLRGADLSNRAEDLQALNESTLSTLEALLNTSLPSSARQQALLPVSKGGLGVPNLETLAGPAIVSSMLSAENRAIPLLDTPGVGQFRSRLAQLQENLEARCGGKPDNVLSQRDWSAPLHAEVQRRLFNEAADDTTRARLNAVSAKDSGAWLHALPSAPIGTLLDDETIRIAVGLRLGTDLVSPHRCQCGHPVDKLGHHGLSCIISAGRRSRHAAINDTFSRALRSCGRPCIPEPTGLCAEDGRRPDGMTLTPFERGKMLVWDATVTDSLAPSMVGGGASEAGYAAHLAETNKLRKYSSIGYPHEFWPLAFETLGAPGVRTRQLIHKVGTMLNMSTGDSRSSSFFKQRLDLDVQRGNAASVRGTLLKWSRPSLDEADT

SEQ ID NO: 2575 - protein, 962 aa, Dermanyssus gallinae
MNDYDRTAHGAEASRATSSTTKCPLCDGRYTRRGLTRHISAKHPTATVASSSIPTTSDTPRLQPAQILEDIQAVMGQIRLIRIVPKSVRRQVAEALTRVLSAVSSDNDVEAWYGLFSFAPVVLRLPRARNDASSLSVIIRNNLRDFSQGMRLSDVIATSHARVSTPKPFRNDTVRQSIIKLSEGDVSGAARLIVSTDTITPGIDRIEALREQHPLAPEDLEWPTLTRTPMPYVTSKEDIQVAIKSFSKSSAAGLDFMRPRLLMDLLSPSLNDVAASLLSALAKAVDILLWGNPPSCLQPLIFGARLFALKKKDGSVRPIACSSTLRRLAAKIGCNHNKAVISGATGAHQLGFATPGGTEVAIHATRAFLDSRERSGVLVKLDFRNAFNSMRRDHLMKVVASHAPHLLHHVGLAYRHPSHLVLPEHAISSATGLQQGDPLAPALFCLGIKDLVDSFKSPLNLWYLDDGLLGGNVHTVAEDIRRVLNFGVISGLELNPAKCEVCTLGSTGETSPDIQLLRDLLPGCKVTAKDDLELLGVPLCPEGLTAAIERWRLKLENAAARLPLLGAHRGLFLLRSSFSSLRLIHLLRGADLSNRVDDLQALNELTLSTLEALLNTSLPPSARQQALLPVSQGGLGVPNLQTLAGPAIVSSMLSAENRATPLLDTAGVGQFRSRSARLQENLEARCGGRPDNILSQHDWSAPLHAEVQRRLFNEAADDTTRARLNAVSAKDSGAWLHALPSAPIGTLLDDETIRIAVGLRLGTDLVSPHRCQCGHPVDKLGHHGLSCIISAGRRPRHAAINETFSRALRSCGRPCILEPPGLCVEDGRRPDGMTLTPFERGKMLVWDATVTDSLAPSMVGGGASEAGYAAHLAETSKLRKYSSIGYPHEFWPLAFETMGGPGVRTRQLIRKVGTLLDQSTGDNRSSSFFKQRLDLDIQRGNTASVRGTLLKWSRPSLDEADT

SEQ ID NO: 2576 - protein, 962 aa, Dermanyssus gallinae
MNDYDRTAHGAEASRATSSTTKCPLCDGRYTRRGLTRHISAKHPTATVASSSIPTTSDLPRLQPAQILEDIQAVMGQIRLIRIVPKSVRRQVAEALTRVLSAVSSDNDVEAWYGLFSFAPVVLRLPRARNDASSLSVIIRNNLRDFSQGMRLSDVIATSHARVSTPKPFRNDTVRQSIIKLSEGDVSGAARLIVSTDTITPGIDRIEALREQHPLAPEDLEWPALTRTPMPYVTSKEDIQVAIKSFSKSSAAGLDFMRPRLLMDLLSPSLNDVAASLLSALAKAVDILLWGNPPPCLQPLIFGARLFALKKKNGSVRPIACSSTLRRLAAKIGSNHNKAVISNATGAHQLGFATPGGTEVAIHATRAFLDSRERSGVLVKLDFRNAFNSMRRDHLMKVVASHAPHLLHHVGLAYRHPSHLVLPEHVISSATGLQQGDPLAPPLFCLGIKDLVDSFKSPLNLWYLDDGLLGGNVHTVAEDIRRVLNYGVISGLELNPAKCEVCALGSTGEASPDIQLLRDLLPGCKVTAKDDLELLGVPLCPKGLTAAIERWRVKLENAAARLPLLGAHRGLFLLRSSFSSLRLIHLLRGADLSNRVDDLQALNELTLSTLEALLNTSLPPSARQQALLPVSQGGLGVPNLQTLAGPAIVSSMLSAENRATPLLDTAGVGQFRSRLAQLQGNLEARCGGRPDNILSQHDWSAPLHAEVQRRLFNEAPDDTTRARLNAVSAKDSGAWLHALPSAPIGTLLDDETIRIAVGLRLGTDLVSPHRCQCGHPVDKLGHHGLSCIISAGRRSRHAAINETFSRALRSCGRPCILEPPGLCVEDGRRPDGMTLTPFEQGKMLVWDATVTDSLAPSMVGGGASEAGYAAHLAETSKLRKYSSIGYPHEFWPLAFETMGGPGVRTRQLIRKVGTLLDQSTGDNRSSSFFKQRLDLDIQRGNAASVRGTLLKWSRPSLNEADT

SEQ ID NO: 2577 - protein, 962 aa, Dermanyssus gallinae
MNDYDRTAHGAEASRATSSTTKCPLCDGRYTRRGLTRHISAKHPTATVASSSIPTTSDTPRLQPAQILEDIQAVMGQIRLIRIVPKSVRRQVAEALTRVLSAVSSDNDVEAWYGLFSFAPVVLRLPRARNDASSLSVIIRNNLRDFSQGMRLSDVIATSHARVSTPKPFRNDTVRQSIIKLSEGDVSGAARLIASTDTITPGIDRIEALREQHPLAPEDLEWPTLTRTPMPYVTSKEDIQVAIKSFSKSSAAGLDFMRPRLLMDLLSPSLNDVAASLLSALAKAVDIRLWGNPPSCLQPLIFGARLFALKKKDGSVRPIACSSTLRRLAAKIGCNHNKAVISDATGAHQLGFATPGGTEVAIHATRAFLDSRERSGVLVKLDFRNAFNSMRRDHLMKVVASHAPHLLHHVGLAYRHPSHLVLPEHAISSATGLQQGDPLAPALFCLGIKDLVDSFKSPLNLWYLDDGLLGGNVHTVAEDIRQVLNFGVISGLELNPAKCEVCTLGSTGETSPDIQLLRDLLPGCKVTAKDDLELLGVPLCPEGLTAAIERWRLKLENDAARLPLLGAHRGLFLLRSSFSSLRLIHLLRGADLSNRVDDLQALNKLTLSTLEALLNTSLPPSARQQALLPVSQGGLGVPNLQTLAGPAIVSSMLSAENRATPLLDTAGVGQFRSRSARLQENLEARCGGRPDNILSQHDWSAPLHAEVQRRLFNEAADDTTRARLNAVSAKDSGAWLHALPSAPIGTLLDDETIRIAVGLRLGTDLVSPHRCQCGHPVDKLGHHGLSCIISAGRRPRHAAINETFSRALRSCGRPCILEPPGLCVEDGRRPDGMTLSPFERGKMLVWDATVTDSLAPSMVGGGASEAGYAAHLAETSKLRKYSSIGYPHEFWPLAFETMGGPGVRARQLIRKVGTLLDQSTGDNRSSSFFKQRLDLDIQRGNAASVRGTLLKWSRPSLDEADT

SEQ ID NO: 2578 - protein, 962 aa, Dermanyssus gallinae
MNDYDRTAHGAEASRATSSTTKCPLCDGRYTRRGLTRHISAKHPTATVASSSIPTTSDPPRLQPAPILEDIQPVMGQIRLIRIVPKSVRRQVAEALTRVLSAVSSDNDVEAWYGLFSFAPVVLRLPRARNDASSLSVIIRNNLRNFSQGMRLSDVIATSHARVSTPKPFRNDTVRQSIIKLSEGDVSGAARLIVSTDTITPGIDRIEPLREQHPLAPEDLEWPALTRTPMPYVTSKEDIQVAIKSFSKSSAAGLDFMRPRLLMDLLSPSLNDVAASLLSALAKAVDILLWGNPPPCLQPLIFGARLFALKKKNGSVRPIACSSTLRRLAAKIGSNHNKAVISNATGAHQLGFATPGGTEVAIHATRAFLDSRERSGVLVKLDFRNAFNSMRRDHLMKVVASHAPHLLHHVGLAYRHPSHLVLPEHVISSATGLQQGDPLAPPLFCLGIKDLVDSFQSPLNLWYLDDGLLGGNVHTVAENIRRVLNYGVISGLELNPAKCEVCTLGSTGEASPDIQLLRDLLPGCKVTAKDDLELLGVPLCPEGLTAAIERWRVKLENAAARLPLLGAHRGLFLLRSSFSSLRLIHLLRGADLSNRVDDLQALNELTLSTLEALLNTSLPPSARQQALLPVSQGGLGVPNLQTLAGPAIVSSMLSAENRATPLLDTAGVGQFRSRLAQLQGNLEARCGGRPDNILSQHDWSAPLHAEVQRRLFNEAPDDTTRARLNAVSAKDSGAWLHALPSAPIGTLLDDETIRIAVGLRLGTDLVSPHRCQCGHPVDKLGHHGLSCIISAGRRSRHAAINETFSRALRSCGRPCILEPPGLCVEDGRRPDGMTLTPFEQGKMLVWDATVTDSLAPSMVGGGASEAGYAAHLAETSKLRKYSSIGYPHEFWPLAFETMGGPGVRTRQLIRKVGTLLDQSTGDNRSSSFFKQRLDLDIQRGNAASVRGTLLKWSRPSLDEADT

SEQ ID NO: 2579 - protein, 962 aa, Dermanyssus gallinae
MNDYDRTAHGAETSRATSSTTKCPLCDGRYTRRGLTRHISAKHPTATVASSSIPTTSDTPRLQPAQILEDIQAVMGQIRLIRIVPKSVRRQVAEALTRVLSAVSSDNDIEAWYGLFSFAPVVLRLPRARNDASSLSVIIRNNLRDFSQGMRLSDVIATSHARVSTPKPFRNDTVRQSIIKLSEGDVTGAARLIVSTDTITPGIDRIEALREQHPLAPEDLEWPTLTRTPMPYVTSKEDIQVAIKSFSKSSAAGLDFMRPRLLMDLLSPSLNDVAASLLSALAKAVDILLWGKPPSCLQPLIFGARLFALKKKDGSVRPIACSSTLRRLAAKIGCNHNKAVISNATSAHQLGFATPGGTEVAIHATRAFLDSRERSGVLVKLDFRNAFNSMRRDHLMKVVASHAPHLLHHVGLAYRHPSHLVLPEHAISSATGLQQGDPLAPPLFCLGIKDLVDSFKSPLNLWYLDDGLLGGNVHTVAEDIRRVLNFGVISGLELNPAKCEVCTLGSTGETSPDIQLLRDLLPGCKVTAKDDLELLGVPPCPEGLTAAIERWRLKLENAAARLPLLGAHRGLFLLRSSFSSLRLIHLLRGADLSNRVDDLQALNELTLSTLEALLNTSLPPSARQQALLPVSQGGLGVPNLQTLAGPAIVSSMLSAENRATPLLDTAGVGQFRSRSARLQENLETRCGGRPDNILSQHDWSAPLHAEVQRRLFNEAADDTTRARLNAVSAKDSGAWLHALPSAPIGTLLDDETIRIAVGLRLGTDLVNPHRCQCGHPVDKLGHHGLSCIISAGRRPRHAAINETFSRALRSCGRPCILEPPGLCVEDGRRPDGMTLTPFERGKMLVWDATVTDSLAPSMVGGGASEAGYAAHLAETSKLRKYSSIGYPHEFWPLAFETMGGPGVRTRHLIRKVGTLLDQSTGDNRSSSFFKQRLDLDIQRGNAASVRGTLLKWSRPSLDEADT

SEQ ID NO: 2580 - protein, 1003 aa, Dermanyssus gallinae
MIWFNNAQNDLDKTIYSYLGFIRAFGAAVTAATVSGQPTTNRTTMNDYNHSAQGGEASRATPSTIKCPLCDGRYTRRGLTRHISAKHSTATNTTSPTSEPPRLQPTQILEDIQAVMGRTRLIRIVPKSVRRQVAEALTRVLTAVSSDNDVEAWYSLFSFAPVVLRLPRARNDASSLSVIIRNNLRDFSRDMRLSDVIATPHSRVSAPKPFRNDTVRQSIIKLSEGDVSGAARLIASTDTITPGIDRIEALQEQHPLPPENLEWPTLIRTPMPYVTSKEDIQVAIKSFSKSSAAGLDFMRPRLLMDLLSPSLEDVAANLLSALAKVVDILLWGNPPSCLQPLIFGARLFALMKKDGSVRPIACSSTLRRLAAKIGCKHNKAVISHATGAHQLGFATPGGTEVAIHATRAFLDSREPPGVLVKLDFRNAFNSMRRDHLMKAVASHAPHLLHHVGLAYRHPSHLVLPEHVISSATGLQQGDPLAPPLFCLGIKELVDSFKSPLNLWYLDDGLLGGNVHTVAEDIRRVLDFSVTSGLELNPAKCEVCILGSTHEASPDIQLLQDLLPGCKVTAKDDLELLGVPLRPEGLTAAIKRWRLKLENAAARLPLLGAHRGLFLLRSSFSSLRLIHLLRGADLSNRAEDLQALNESTLSTLEALLNTSLPSSARQQALLPVSRGGLGVPNLETLAGPAIVSSMLSAENRAIPLLDTPGVGQFRSRLAQLQENLEARCGGRPDNVLSQRDWSAPLHAEVQRRLFNEAADDTTRARLNAVSAKDSGAWLHALPSAPIGTLLDDETIRIAVGLRLGTDLVSPHRCQCGHPVDKLGHHGLSCIISAGRRSRHAAINDTFSRALRSCGRPCILEPTGLCAEDGRRPDGMTLTPFERGKMLVWDATVTDSLAPSMVGGGASEAGYAAHRAETNKLRKYSSIGYPHEFWPLAFETLGAPGVRTRQLIHKVGTMLNMSTSDSRSSSFFKQRLDLDVQRGNAASVRGTLLKWSRPSLDEADT

SEQ ID NO: 2581 - protein, 946 aa, Dermanyssus gallinae
MNDYDRTAHGAEASLATSSTTKCPLCDGRYTRRGLTRHISAKHPTATVASSSIPTTSDTPRLQPAQILEDIQAVMGQIRLIRIVPKSVRRQVAEALTRVLSAVSSDNDVEAWYGLFSFAPVVLRLPRARNDASSLSVIIRNNLRDFSQGMRLSDVIATSHARVSTPKPFRNDTVRQSIIKLSEGDVSGAARLIVSTDTITPGIDRIEALREQHPLAPEDLEWPTLTRTPMPYVTSKEDIQVAIKSFSKSSAAGLDFMRPRLLMDLLSPSLNDVAASLLSALAKAVDILLWGNPPSCLQPLIFGARLFALKKKDGSVRPIACSSTLRRLAAKIGCNHNKAVISGATRAHQLGFATPGGTEVAIHATRAFLDSRERSGVLVKLDFRNAFNSMRRDNLMKVVASHAPHLLHHVGLAYRHPSHLVLPEHAISSATGLQQGDPLAPALFCLGIKDLVDSFKSPLNLWYLDDGLLGGNVHTVAEDIRRVLNFGVISGLELNPAKCEVRTLGSTGETSPDIQLLRDLLPGCKVTAKDDLELLGVPLCPEGLTAAIERWRLKLENAAARLPLLGAHRGLFLLRSSFSSLRLIHLLRGADLSNRVDDLQALNELTLSTLEALLNTSLPPSARQQALLPVSQGGLGVPNLQTLAGPAIVSSMLSAENRATPLIDTAGVGQFRSRSARLQENLEARCGGRPDNILSQHDWSAPLHAEVQRRLFNEAADDTTRARLNAVSAKDSGAWLHALPSAPIGTLLDDETIRIAVGLRLGTDLVSPHRCIISAGRRPRHAAINETFSRALRSCGRPCILEPPGLCVEDGRRPDGMTLTPFERGKMLVWDATVTDSLAPSMVGGGASEAGYAAHLAETSKLRKYSSIGYPHEFWPLAFETMGGPGVRTRQLIRKVGTLLDRSTGDNRSSSFFKQRLDLDIQRGNAASVRGTLLKWSRPSLDEADT

SEQ ID NO: 2582 - protein, 962 aa, Dermanyssus gallinae
MNDYDRTAHGAEASRATSSTTKCPLCDGRYTRRGLTRHISAKHPTATVASSSIPTTSDTPRLQPAQILEDIQAVMGQIRLIRIVPKSVRRQVAEALTRVLSAVSSDNDVEAWYGLFSFAPVVLRLPRARNDAQSLSVIIRNNLRDFSQGMRLSDVIATSHARVSTPKPFRNDTVRQSIIKLSEGDVSGAARLIVSTDTITPGIDRIEALREQHPLAPEDLEWPTLARTPMPYVTSKEDIQVAIKSFSKSSAAGLDFMRPRLLMDLLSPSLNDVAASLLSALAKAVDILLWGNPPSCLQPLIFGARLFALKKKDGSVRPIACSSTLRRLAAKIGCNHNKAVISGATGAHQLGFATPGGTEVAIHATRAFLDSRERSGVLVKLDFRNAFNSMRRDHLMKVVASHAPHLLHHVGLAYRHPSHLVLPEHAISSATGLQQGDPLAPALFCLGIKDLVDSFKSPLNLWYLDDGLLGGNVHTVAEDIRRVLNFGVISGLKLNPAKCEVCTLGSTGETSPDIQLLRDLLPGCKVTAKDDLELLGVPLCPEGLTAAIERWRLKLENAAARLPLLGAHRGLFLLRSSFSSLRLIHLLRGADLSNRVDDLQALNELTLSTLEALLNTSLPPSARQQALLPVSQGGLGVPNLQTLAGPAIVSSMLSAENRATPLLDTAGVGQFRSRSARLQENLEARCGGRPDNILSQHDWSAPLHAEVQRRLFNEAADDTTRARLNAVSAKDSGAWLHALPSAPIGTLLDDETIRIAVGLRLGTDLVSPHRCQCGHPVDKLGHHGLSCIISAGRRPRHAAINETFSRALRSCGRPCILEPPGLCVEDGRRPDGMTLTPFERGKMLVWDATVTDSLAPSMVGGGASEAGYAAHLAETSKLRKYSSIGYPHEFWPLAFETMGGPGVRTRQLIRKVGTLLDQSTGDNRSSSFFKQRLDLDIQRGNAASVRGTLLKWSRPSLDEADT

SEQ ID NO: 2583 - protein, 959 aa, Dermanyssus gallinae
MNDYNHSAQGGEASRATPSTIKCPLCDGRYTRRGLTRHISAKHSTATDTTSPTSEPPRLQPTQILEDIQAVMGRTRLIRIVPKSVRRQVAEALTRVLTAVSSDNDVEAWYSLFSFAPVVLRLPRARNDASSLSVIIRNNLRDFSRDMRLSDVIATPHSRVSAPKPFRNDTVRQSIIKLSEGDVSGAARLIASTDTITPGIDRIDALQEQHPLPPENLEWPTLIKTPMPYVTSKEDIQVAIKSFSKSSAAGLDFMRPRLLMDLLSPSLEDVAANLLSALAKVVDILLWGNPPSCLQPLIFGARLFALMKKDGSVRPIACSSTLRRLAAKIGCKHNKAVISHATGAHQLGFATPGGTEVAIHATRAFLDSREPPGVLVKLDFRNAFNSMRRDHLMKAVASYAPHLLHHVGLAYRHPSHLVLPEHVISSATGLQQGDPLAPPLFCLGIKDLVDSFKSPLNLWYLDDGLLGGNVHTVAEDIRRVLDFGVTSGLELNPAKCEVCILGSTHEASPDIQLLQDLLPGCKVTAKDDLELLGVPLRPEGLTAAIKRWRLKLENAAARLPLLGAHRGLFLLRSSFSSLRLIHLLRGADLSNRAEDLQALNESTLSTLEALLNTSLPSSARQQALLPVSKGGLGVPNLETLAGPAIVSSMLSAENRAIPLLDTPGVGQFRSRLAQLQENLEARCGGKPDNVLSQRDWSAPLHAEVQRRLFNEAADDTTRARLNAVSAKDSGAWLHALPSAPIGTLLDDETIRIAVGLRLGTDLVSPHRCQCGHPVDKLGHHGLSCIISAGRRSRHAAINDTFSRALRSCGRPCILEPTGLCAEDGRRPDGMTLTPFERGKMLVWDATVTDSLAPSMVGGGASEAGYAAHLAETNKLRKYSSIGYPHEFWPLAFETLGAPGVRTRQLIHKVGTMLNMSTGDSRSSSFFKQRLDLDVQRGNAASVRGTLLKWSRPSLDEADT

SEQ ID NO: 2584 - protein, 959 aa, Dermanyssus gallinae
MNDYNHSAQGGEASRATPSTIKCPLCDGRYTRRGLTRHISAKHSTATDTTSPTSETPRLQPTQILEDIQAVMGRTRLIRIVPKSVRRQVAEALTRVLTAVSSDNDVEAWYSLFSFAPVVLRLPRARNDASSLSVIIRNNLRDFSRDMRLSDVIATPHSRVSAPKPFRNDTVRQSIIKLSEGDVSGAARLIASTDTITPGIDRIEALQEQHPLPPENLEWPTLIRTPMPYVTSKEDIQVAIKSFSKSSAAGLDFMRPRLLMDLLSPSLEDVAANLLSALAKVVDILLWGNPPFCLQPLIFGARLFALMKKDGSVRPIACSSTLRRLAAKIGCKHNKAVISHATGAHQLGFATPGGTEVAIHATRAFLDSREPPGVLVKLDFRNAFNSMRRDHLMKAVASHAPHLLHYVGLAYRHPSHLVLPEHVISSATGLQQGDPLAPPLFCLGIKDLVDSFKSPLNLWYLDDGLLGGNVHTVAEDIRRVLDFGVTSGLELNPAKCEVCILGSTHETSTDIQLLQDLLPGCKVTAKDDLKLLGVPLRPEGLTAAIKRWRLKLENAAARLPLLGAHRGLFLLRSSFSSLRLIHLLRGADLSNRAEDLQALNESTLSTLEALLNTSLPSSARQQALLPVSKGGLGVPNLETLAGPAIVSSMLSAENRAIPLLDTPGVGQFRSRLAQLQENLEARCGGRPDNVLSQRDWSAPLHAEVQRRLFNEAADDTTRARLNAVSAKDSGAWLHALPSAPIGTLLDDETIRIAVGLRLGTDLVSPHRCQCGHPVDKLGHHGLSCIISAGRRSRHAAINDTFSRALRSCGRPCILEPTGLCAEDGRRPDGMTLTPFERGKMLVWDATVTDSLAPSMVGGGASEAGYAAHLAETNKLRKYSSIGYPHEFWPFAFETLGAPGVRTRQLIHKVGTMLNMSTGDSRSSSFFKQRLDLDVQRGNAASVRGTLLKWSRPSLDEADT

SEQ ID NO: 2585 - protein, 961 aa, Dermanyssus gallinae
MNDYNHSAQGGEASTSRATPSTIKCPLCDSRYTRRGLTRHISAKHPTATDTTSPTSEPPRLQPTQILEDIQAIMGRTRLIRIVPKSVRRQVAEALTRVLTAVSSDNDVEAWYSLFSFAPVVLRLPRARNDASSLSVIIRNNLRDFSRDMRLSDVIATPHSRVSALKPFRNDTVRQSIIKLSEGDVSGAARLIASTDTITPSIDRIEALQEQHPWPPENLEWPTLIRTPMPYVTSKEDIQVAIKSFSKSSAAGLDFMRPRLLMDLLSPSLEDVAANLLSALAKVVDILLWGNPPSCLQPLIFGARLFALMKKDGSVRPIACSSTLRRLAAKIGCKHNKAVISHATGAHQLGFATPGGTEVAIHATRAFLDSREPPGVLVKLDFRNAFNSMRRDHLMKAVASHAPHLLHHVGLAYRHPSHLVLPEDVISSATGLQQGDPLAPPLFCLGIKDLVDSFKSPLNLWYLDDGLLGGNVHTVAEDIRRVLDFGVTSGLELNPAKCEVCILGSTHEASPDIQLLQDLLPDCKVTAKDDLELLGVPLRPEGLTAAIKRWKLKLENAAARLPLLGAHRGLFLLRSSFSSLRLIHLLRGADLSNRAEDLQALNESTLSTLEALLNTSLPSSARQQALLPVSKGGLGVPNLETLAGPAIVSSMLSAENRAIPLLDTPGVGQFRSRLAQLQENLEARSGGRPDNVLSQRDWSAPLHAEVQRRLFNEAADDTTRARLNAVSAKDSGAWLHALPSAPIGTLLDDETIRIAVGLRLGTDLVSPHRCQCGHPVDKLGHHGLSCIISAGRRSRHAAINDTFSRALRSCGRPCILEPTGLCAEDGRRPDGMTLTPFERGKMLVWDATVTDSLAPSMVGGGASEAGYAAHLAETNKLRKYSSIGYPHEFWPLAFETLGAPGVRTRQLIHKVGTMLNMSTGDSRSSSFFKQRLDLDVQRGNAASVRGTLLKWSRPSLDEANT

SEQ ID NO: 2586 - protein, 962 aa, Dermanyssus gallinae
MNDYDCTAHGAEASRATSSTTKCPLCDGRYTRRGLTRHISAKHPTATVASSSIPTTSDPPRLQPAQILEDIQAVMGQIRLIRIVPKSVRRQVAEALTRVLSAVSSDNDVEAWYGLFSFAPVVLRLPRARNDASSLSVIIRNNLRDFSQGMRLSDVIATSHARVSTPKPFRNDTVRQSIIKLSEGDVSGAARLIVSTDTITPGIDRIEALREQHPLAPEDLEWPTLTRTPMPYVTSKEDIQVAIKSFSKSSAAGLDFMRPRLLMDLLSPSLNDVAASLLSALAKAVDILLWGNPPPCLQPLIFGARLFALKKKNGSVRPIACSSTLRRLAAKIGSNHNKAVISNATGAHQLGFATPGGTEVAIHATRAFLDSRERSGVLVKLDFRNAFNSMRRDHLMKVVASHAPHLLHHVGLAYRHPSHLVLPEHVISSATGLQQGDPLAPPLFCLGIKDLVDSFKSPLNLWYLDDGLLGGNVHTVAEDIRRVLNYGVISGLELNPAKCEVCTLGSTGEASPDIQLLRDLLPGCKVTAKDDLELLGVPLCPEGLTAAIERWRVKLENAAARLPLLGAHRGLFLLRSSFSSLRLIHLLRGADLSNRVDDLQALNELTLSTLEALLNTSLPPSARQQALLPVSQGGLGVPNLQTLAGPAIVSSMLSAENRATPLLDTAGVGQFRSRLAQLQGNLEARCGGRPDNILSQHDWSAPLHAEVQRRLFNEAPDDTTRARLNAVSAKDSGAWLHALPSAPIGTLLDDETIRIAVGLRLGTDLVSPHRCQCGHPVDKLGHHGLSCIISAGRRPRHAAINETFSRALRSCGRPCILEPPGLCVEDGRRPDGMTLTPFEQGKMLVWDATVTDSLAPSMVGGGASEAGYAAHLAETSKLRKYSSIGYPHEFWPLAFETMGGPGVRTRQLIRKVGTLLDQSTGDNRSSSFFKQRLDLDIQRGNAASVRGTLLKWSRPSLDEADT

SEQ ID NO: 2587 - protein, 962 aa, Dermanyssus gallinae
MNDYDRTAHGAEASRATSSTTKCPLCDGRYTRRGLTRHISAKHPTATVASSSIPTTSDTPRLQPAQILEDIQAVMGQIRLIRIVPKSVRRQVAEALTRVLSAVSSDNDVEAWYGLFSFAPVVLRLPRARNDASSLSVIIRNNLRDFSQGMRLSDVIATSHARVSTTKPFRNDTVRQSIIKLSEGDVSGAARLIVSTDTITPGIDRIEALREQHPLAPEDLEWPTLTRTPMPYVTSKEDIQVAIKSFSKSSAAGLDFMRPRLLMDLLSPSLNDVAASLLSALAKAVDILLWGNPPSCLQPLIFGARLFALKKKNGSVRPIACSSTLRRLAAKIGCNHNKAVISDATGAHQLGFATPGGTEVAIHATRAFLDSRKRSGVLVKLDFRNAFNSMRRDHLMKVVASHAPYLLHHVGLAYRHPSHLVLPEHAISSATGLQQGGPLAPALFCLGIKDLVDSFKSPLNLWYLDDGLLGGNVHTVAEDIRRVLNFGVISGLELNPAKCELCTLGSTGETSPDIQLLRDLLPGCKVTAKDDLELLDVPLCPEGLTAAIERWRLKLENAAARLPLLGAHRGLFLLRSSFSSLRLIHLLRGADLSNWVDDLQALNELTLSTLEALLNTSLPPSARQQALLPVSQGGLGVPNLQTLAGPAIVSSMLSAENRATPLLDTAGVGQFRSRSARLQENLEARCGGRPDNILSQHDWSAPLHAEVQRRLFNEAADDTTRARLNAVSAKDSGAWLHALPSAPIGTLLDDETIRIAVGLRLGTDLVSPHRCQCGHPVDKLGHHGLSCIISAGRRPRHAAINETFSRALRSCGRPCILEPPGLCVEDGRRPDGMTLTPFERGKMLVWDATVTDSLAPSMVGGGASEAGYAAHLAETSKLRKYSSIGYPHEFWPLAFETMGGPGVRTRQLIRKVGTLLDQSTGDNRSSSFFKQRLDLDIQRGNAASVRGTLLKWSRPSLDEADT

SEQ ID NO: 2588 - protein, 957 aa, Dermanyssus gallinae
MNDYVRTAHDAEASRATSSTTKCPLCDGRYTRRGLTRHISAKHPIATVASSSIPTTSDPPRLQPAQILEDIQGVMGQIRLIRIVPKSVRRQVAEALTRVLSAVSSDNDVEAWYGLFSFAPVVLRLPRARNDASSLSVIIRNNLRDFSQGMRLSDVIATSHARVSTPKPFRNDTVRQSIIKLSEGDVSGAARLIVSTDTITPGIDRIEALREQHPLAPEDLEWPILTRTPMPYVTSKEDIQVAMKSFSKSSAAGLDFMRPRLLMDLLSPSLNDVAASLLSALAKAVDILLWGNPPPCLQPLIFGARLFALKKKNGSVRPIACSPTLRRLAAKIGCNHNKAVISNATGAHQLGFATPGGTEVAIHATRAFLDSRERSGVLVKLDFRNAFNSMRRDHLMKVVASHAPHLLHHVGLAYRHPSHLVLPEHVISSATGLQQGDPLAPPLFCLGIKDLVDSFKSPLNLWYLDDGLLGGNVHTVAEDIRRVLNYGVISGLELNPAKCEVCTLGSTGEASPDIQLLRDKVTAKDDLELLGVPLCPEGLTAAIERWRVKLKNAAARLPLLGAHRGLFLLRSSFSSLRLIHLLRGADLSNRVDDLQALNELTLSTLEALLNTSLPPSARQQALLPVSQGGLGVPNLQTLAGPAIVSSMLSAENRATPLLDTAGVGQFRSRLAQLQGNLEARCGGRPDNILSQHDWSAPLHAEVQRRLFNEAPDDTTRARLNAVSAKGSGAWLHALPSAPIGTLLDDETIRIAVGLRLGTDLVSPHRCQCGHPVDKLGHHGLSCIISAGRRPRHAAINETFSRALRSCGRPCILEPPGLCVEDGRRPDGMTLTPFEQGKMLVWDATVTDSLAPSMVGGGASEAGYAAHLAETSKLRKYSSIGYPHEFWPLAFETMGGPGVRTRQLIRKVGTLLDQSTGDNRSSSFFKQRLDLDIQRGNAASVRGTLLKWSRPSLDEADT

SEQ ID NO: 2589 - protein, 882 aa, Dermanyssus gallinae
MGQIRLIRIVLTSVRRQVAEAFTRVLTAVSSDNDVEAWYSLFSFSPVVLCLPHTHSDASSLSVIIRSKLRDFHRNMRLSDVIATSHSRVSTLTPFKNDIVRQSISKLSEGDVSGAARLIVSTDTITPGIDRIEALPEQHPPALENLEWPTLTRIPMPYVTSKEDIQAAIKSFSKSSAAGLNVMRPRLLMDLLSPSLEDIATSLLSALAKVVDILLWGNPPSCLQPLISGARLFALKKKDGSVRPIACSSSLRRLAAKIGCNHNKAVISHATGAHQLGFATPAGTEVAIHATRAFLDSRKPTGVLVKLDFKNAFNNIKRDHLMKAVASHAPRLLNHVELAYRHPSHLVLPEHVISSATGLQQGDPLAPPLFCLGIKNLVDSFRCPLNLWYLDDGLLGGKVCTVADDIRRVLNFSVTSGLELSPAKCEICLFGPIIDAPEIQSLRDLLPGCNMTVKNDLELLGVPICPEGLPAAIKRWKLQLKNAAARLPLLGAPHFLLRSSFSSSRLTHLLRGADQSNQADELQRLNDLTLFTLESLLNTSLLPSAREQALLPVSKGGLGVPNLLTLGESAIVSSMLSAENRAIPLLDTAGVGQYKNCLAYLQKNLKAQCGDKPENVLSQRDWSAPLHDEVQRPLFNEAADDTTRARLDAVSAKDSGAWLHALPSAPIGTLLDDETIHIAVGLRLGADIVTPHRCQCGHPVNKLGLSCIISAGRRSRHAAINEIFSRALRSCGRLCILEPPGLCAEDGRRPDGMTLTPFERGRMLVWDATVTDFLAPSMVSGRASEAGYAAHLAETSKLRKYSSIGYPHEFCPLAFETLDAPGVRTKQLIRKVGTLLSLSSGDNRSSSFFKQRLDLDSQRGNAASVQGTLLKWCRPDLIKTET

SEQ ID NO: 2590 - protein, 980 aa, Dermanyssus gallinae
MTSQQYHNTRDATENDSEMALPLSQTPYVCNYCGRAVRSSKGLKIHITRKHSVAPCRSLRTDNNPGPNNQITITSNTDTQPDSKVLVQALSHARRSLRLARIIPRGAREVCTTAYTAALSNFNTKLDLESWNNLMMLPSLMFTLPHQKNQEKTLTKIIKSNVAEIDFRTLQSLADSTIPSTIGKKSHFTNDQYSVRQAEMKLAEGDIRSAARSLLSSDTLAPQNEHTESELRSKHPVSPPGCQEQLDLLQQPATLGLDKIEGPLVLETIRSFPCASGAGLDGLRPRHLRDMLSQTIPSSERLLEELGILMARVLNGALPSFCQSVFYGASLTALRKKDNSIRPIACGLTLRRMASKIAMAMNKRTIVAAVSPHQMGVAIRGGAEATVHATRAFLETKGPTKVLVKLDFQNAFNTIRRDKIFDEVKRKAPRLYPMIWQGYRDFSILAWNADTIIESQTGIQQGDPLGPALFCLGISDLVSSLQSPFNVWYLDDAVLGGPANVVARDLQAILNFEEPGGLTLNAAKCEVLAVGGTSQDQAQALQTIMEALPGISLVTQDNLDVLGSPVMPEGIPRALDAKRETLVKIRPRLTSMHPQVALCLWRHSLGSPRFVYLLRTCQTLKHMEGLAAYDETTRDILSEILNIDLEGNTWNRASLPIGNGGLGIRRATDLAAVCYAASLNQFSFLAESLIDEEAKIELQKAAIVADTTVRSQLDPGPLREHVSQNLLDACKTKKSARDITDSLTSARERAVFLAAQHPFSGGWLQALPSCQLGTMLDPNSFRMVSALRIGAPVCQPFSCLRCGQPVDSDGLHPLSCLKSSGRITRHAELNAIVRRALRRAGIPSTPEPNGLNGSSELRPDGVTIPLWSHGKSLVWDVTVSCTAALSYLHHSAVESGWVAERADSEKRRKYLELSRSYHFVPITLETLGPISSGTAKILKDIGKRIAEVTGDRREAMFLRQMMSLAVCRGNVASIIGAMNS

SEQ ID NO: 2591 - protein, 845 aa, Dermanyssus gallinae
MVLPSLMFTLPHQKNQEKTLTKIIKSNVAEIDFRTLQSLADSTIPSTIGKRSHFTNDQYSVRQAEMKLAEGDIRSAARSLLSSDTLAPQNEHTESELRSKHPVSPPGCQEQLDLLQQPATLGLDKIEGPLVLETIRSFPFASGAGLDGLRPRHLRDMLSQTIPSSERLLEELGILMARVLNGALPSFCQPVFYGASLTALRKKDNSIRPIACGLTLRRMASKIVMAMNKRTIVAAVSPHQMGVAIRGGAEATVHATRAFLETKGPTKVLVKLDFQNAFNTIRRDKMFDEVKRKAPRLYPMTWQGYRDFSILAWNADTIIESPTGIQQGDPLGPPLFCLGISDLVSSLQSPFNVWYLDDAVLGGPANVVTRDLQAILNFEEPGGLTLNAAKCEVLAVGGTSEDQAQAIQAIMEALPGISRVTQDNLDVLGSPVMPEVIPRALDAKRETRVKICPRLTSMHPQVALCLWRHSLGSPRFVYLLRTCQTLKHMEGLAAYDKTTRDILSEILNIDLEGNTWNRASLPIGNGGLGIRRATDLAAVCYAASLNQFSFLAESLIDEEAKIELQKAAIVADTTVRSQLDPGPLREHVSQNLLDACKTKKSARDITDSLTSARERAVFLAAQHPFSGGWLQALPPCQLGTMLDPNSFRMVSALRIGAPVCQSFSCLRCGQPVDTDGLHPLSCLKSSGRITRHAELNAIVRRTLRRAGIPSTPEPNGLNGSSELRPDGVTIPLWSHGKSLVWDVTVSCTAALSYLHHSAVESGWVAERADSEKRRKYLELSRSYHFVPITLETLGPISSGTAKILKDIGKRIAEVTDDRREAMFLRQMMSLAVCRGNVASIIGAMN

SEQ ID NO: 2592 - protein, 845 aa, Dermanyssus gallinae
MMLPSLMFTLPHQKNQEKTLTKIIKSNVAEIDFRTLQSLADSTIPSTIGKKSHFTNDQYSVRQAEMKLAEGDIRSAARSLLSSDTLAPQNEHTESELRSKHPVSPPGCQEQLDLLQQPATLGLDKIEGPLVLETIRSFPCASGAGLDGLRPRHLRDMLSQTIPSSERLLEELGILMARVLNGALPSFCQSVFYGASLTALRKKDNSIRPIACGLTLRRMASKIAMAMNKRTIVAAVSPHQMGVAIRGGAEATVHATRAFLETKGPTKVLVKLDFQNAFNTIRRDKIFDEVKRKAPRLYPMIWQGYRDFSILAWNADTIIESQTGIQQGDPLGPALFCLGISDLVSSLQSPFNVWYLDDAVLGGPANVVARDLQAILNFEEPGGLTLNAAKCEVLAVGGTSQDQAQAVQTIMEALPGISLVTQDNLDVLGSPVMPEGIPRALDAKRETLVKIRPRLTSMHPQVALCLWRHSLGSPRFVYLLRTCQTLKHMEGLAAYDETTRDILSEILNIDLEGNTWNRASLPIGNGGLGIRRATDLAAVCYAASLNQFSFLAESLIDEEAKIELQKAAIVADTTVRSQLDPGPLREHVSQNLLDACKTKKSARDITDSLTSARERAVFLAAQHPFSGGWLQALPSCQLGTMLDPNSFRMVSALRIGAPVCQPFSCLRCGQPVDSDGLHPLSCLKSSGRITRHAELNAIVRRALRRAGIPSTPEPNGLNGSSELRPDGVTIPLWSHGKSLVWDVTVSCTAALSYLHHSAVESGWVAERADSEKRRKYLELSRSYHFVPITLETLGPISSGTAKILKDIGKRIAEVTGDRREAMFLRQMMSLAVCRGNVASIIGAMN

SEQ ID NO: 2593 - protein, 978 aa, Dermanyssus gallinae
MTSQQSHNTSEFNDNDHTTASLSQTPYVCTQCGRCVRTSKGLKAHITRLHSPTPSRSLPTGNSPGPDNLIPSTSDSDLQSDSTSLVRILTSARKNLRLARVIPRGARECCAAAYTKALSNFNSRLDLKSWNHLMMLPSLMFAIPRLKDQEVTLTKLIKRNVAEIDLRTLQGVADATALSTIDKIRHVDEDENSIRQAEMKLAEGDIRSAARALLSSDIIAPYDAHTESELRAKHPRSPPGCQERIELLQQPVALNLGKIDVLQVHEAVKSFPFTSGAGLDGLRPRHLRDMLDQTIPSSERLLNELSTFVTTVLNGTLPSFCLPIFYGASLTALRKKDNSIRPIACGLALRRMASKIAMAVNKNTIVTAVSPHQVGVAIRGGAEATVHATRAFLQAEGPTRVLVKLDFRNAFNTLRRDKMFDEVQKKAPRLLPMVWQGYRSASMLAWNTDVTIESRTGIQQGDPLGPALFCLGISDLVSSLQSPFNVWYLDDAILGGPADVVAKDVQTVLQFEETGGLTLNASKCEVTAIGGNAQEQEKSIQAIMQALPGIIRTTQEDLDILGAPVMCEGIPRVLRAKRKALVKIRPRLTNMHPQAALCLWRHSLGSSRFNYLLRASPTFTYTEGLAAYDETTRDILGEVLNISLEENLWKRASLPIAFGGLGIRRSIDLAAVCYAASLNQFGSIAESLVNEDATIVLKKTTMLADATMRSQLDPGPLKEHVNQHFLDACKSKKSSRDIMDDLTSPRERAVFLAAQHPFSGGWLQALPSRQLGTMLDPNSFRMVSALRIGAPVCEPFSCLSCSQPVDSDGLHPLSCLKSPGRLTRHAELNAIVRRALRRAGIPSTPEPKGLYGSSELRPDGVTIPLWSHGKSLAWDVTVSCTAALSYLRHSAVESGWVAERADSEKRGKYLELSRRYHFVPIALETLGPISTGTAKILKDIGKRIEDITGDRREAMFLRQMMSLAVCRGNVASIIGAMN

SEQ ID NO: 2594 - protein, 897 aa, Dermanyssus gallinae
MTSQQYHNTRDATENDSEMALPLSQTPYVCNYCGRAVRSSKGLKIHITRKHSVAPCRSLRTDNNPGPNNQITITSNTDTQSDSKLLVQALSHARRSLRLARIIPRGAREVCTTAYTAALSNFNTKLDLESWNNLMMLPSLMFTLPHQKNQEKTLTKIIKSNVAEIDFRTLQSLADSTIPSTIGKKSHFTNDQYSVRQAEMKLAEGDIRSAARSLLSSDTLAPQNEHTESELRSKHPVSPPGCQEQLDLLQQPATLGLDKIEGPLVLETIRSFPCASGAGLDGLRPRHLRDMLSQTIPSSERLLEELGILMARVLNGALPSFCQSVFYGASLTALRKKDNSIRPIACGLTLRRMASKIAMAMNKRTIVAAVSPHQMGVAIRGGAEATVHATRAFLETKGPTKVLVKLDFQNAFNTIRRDKIFDEVKRKAPRLYPMIWQGYRDFSILAWNADTIIESQTGIQQGDPLGPALFCLGISDLVSSLQSPFNVWYLDDAVLGGPANVVARDLQAILNFEEPGGLTLNAAKCEVLAVGGTSQDQAQAVQTIMEALPGISLVTQDNLDVLGSPVMPEGIPRALDAKRETLVKICPRLTSMHPQVALCLWRHSLGSPRFVYLLRTCQTLKHMEGLAAYDETTRDILSEILNIDLEGNTWNRASLPIGNGGLGIRRATDLAAVCYAASLNQFSFLAESLIDEEAKIELQKAAIVADTTVRSQLDPGPLREHVSQNLLDACKTKKSARDITDSLTSARERAVFLAAQHPFSGGWLQALPSCQLGTMLDPNSFRMVSALRIGAPVCQPFSCLRCGQPVDSDGLHPLSCLKSSGRITRHAELNAIVRRALRRAGIPSTPEPNGLNGSSELRPDGVTIPLWSHGKSLVWDVTVSCTAALSYLHHSAVSRDG

SEQ ID NO: 2595 - protein, 845 aa, Dermanyssus gallinae
MMLPSLMFTLPRQKIQEKTLTKIIKSNVAQIGSRTLQTLPDSITPSTIGNRFHITNDQHSVRQAEMKLAEGDIRSAARSLLSLDTLAPHDKHTESELRSKHPVSPPGCQEQLDLLQQPATLDLDRVEGSLVFDTIRSFPFASGAGLDGLRPRHLRDMLSQAIPSSERLLTELGIFMARVLNGALPSFCQPVFYGANLTALRKKDNSIRPIACGLTLRRTASKIAMAMNKQAIVAAVSPHQMGVAIRGGAEATVHATRAFLEAEGPTKVLVKLDFRNAFNTIRRDRIFDEVKRKAPRLYPMIWQSYKDFSILAWNTDITIESQTGIQQGDPLGPALFCLGISDLVSSLQSPFNVWYLDDAVLGGPANAVARDLQTILNFEEPGGLTLNAAKCEVLAVGGTLQDQAQAIQEIMEALPGISCVTQGNLDVLGSPVMAEGIPRALDAKRETLVKIRPRLTNMHPQVALCLWRHSLGSPRFVYMLRTCQTLKYVEGLAAYDETIRSILSEVLNINLEGNTWERASLPIDIGGLGIRRATDLAAVCYAASLNQFGSLAESLLGEEAKIELKKATALADATIRSQLDPGPLREHVSQKLLDAYKTKKSAREIMNNLTSARERAVFLAAQHPFSGGWLQALPSRQLGTMLDPNPFRMVSALRIGAPVCQPFTCLSCGQPVDSDGLHPLSCPKSPGRLTRHAELNAIVRRALRRAGIPSTPEPVGLNGSSELRPDGVTIPLWSHGKCLVWDVTVSCTAALSYLRHSAVETGWVAERADSEKRRKYLELSRSYHFAPIALETLGPISTGTAKLLQDIGKRIEDVTGDRREAMFLRQMMSLAVCRGNVASIIGAMN

SEQ ID NO: 2596 - protein, 979 aa, Dermanyssus gallinae
MTSQQYHNTRDATENDSEMALPLSQTPYVCKYCGRAVRSSKGLKIHITRKHSVAPCRSLRTDNNPGPNNQITITSNTDTQPDSKLLVQVLSHARRSLRLARIIPRGAREVCTTAYTAALSNFNTKLDLESWNNLMVLPSLMFTLPHQKNQEKTLTKIIKSNVAEIDFRTLQSLADSTIPSTIGKRSYFTNDQYSVRQAEMKLAEGDIRSAARSLLSSDTLAPQNEHTESELRSKHPVSPPGCQEQLDLLQQPATLGLDKIEGPLVLETIRSFPFASGAGLDGLRPRHLRDMLSQTIPSSERLLEELGILMARVLNGALPSFCQPVFYGASLTALRKKDNSIRPIACGLTLRRMASKIAMAMNKRTIVAAVSPHQMGVAIRGGAEATVHATRTFLETKGPTKVLVKLDFQNAFNTIRRDKMFDEVKRKAPRLYPMTWQGYRDFSILAWNADTIIESQTGIQQGDPLGPALFCLGISDLVSSLQSPFNVWYLDDAVLGGPANVVARDLQAILNFEEPGGLTLNAAKCEVLAVGGTSEDQAQAIQTIMEALPGISRVTQDNLDVLGSPVMPEGIPRALDAKRETLVKIRPRLTSMHPQVAMCLWRHSLGSPRFVYLLRTCQTLKHMEGLAAYDETTRDILSEILNIDLEGNTWNRASLPIGNGGLGIRRATDLAAVCYAASLNQFSFLAESLIDEEAKIELQKAAIVADTTVRSQLDPGPLREHVSQNFLDACKTKKSARDITDSLKSARERAVFLAAQHPFSGGWLQALPSCQLGTMLDPNSFRMVSALRIGAAVCQSFSCLRCGQPVDSDGLHPLSCLKSSGRITRHAELNAIVRRALRRAGIPSTPEPNGLNGSSELRPDGVTIPLWSHGKSLVWDVTVSCTAALSYLHHSAVESGWVAERADSEKRRKYLELSRSYHFVPIALETLGHISSGTAKILKDIGKRIAEITGDRREAMFLRQMMSLAVCRGNVASIIGAMN

SEQ ID NO: 2597 - protein, 979 aa, Dermanyssus gallinae
MTSQQYQNTRDATENDSEMALPLSQTPYVCNYCGQAVRSSKGLKIHITRKHPLAPCRNLRTIHNPGPKNDTANTSNTDTQPDAKLLVQVLSHARRNLRLARIIPRGAREICAIAYTTALSNFNTKLDLESWNNLMMLPSLVFTLPRQKIQEKTLTKIIKSNVAQIGSRTLQTLPDSITPSTIGKRFYITNDQHSVRQAEMKLAEGDIRSAARSLLSLDTLAPHDKHTESELRSKHPVSPPGCQEQLILLQQPATLDLDRVEGSLVFDTIRSFPFASGAGLDGLRPRHLRDMLSQTIPSSERLLTELGIFMARVLNGSLPSFCQPVFYGASLTALRKKDNSIRPIACGLTLRRTASKSAMTMNKRAIVAAVSPHQMGVAIRGGAEATVHATRAFLEAEGPTKVLVKLDFRNAFNTIRRDRFFDEVKRKAPRLYPMIWQSYKDFSILAWNTDITIESQTGIQQGDPLGPALFCLGISDLVSSLQSPFNVWYLDDAVLGGPANAVARDLQTILNFEEPGGLTLNAAKCEVLAVGGTLQDQAQAIQEIMEALPGISCVTQGNLDVLGSPVMAEGIPRALDAKRETPVKIRPRLTNMHPQVALCLWRHSLGSPRFVYMLRTCQTLKYVEGIAAYDETIRSILSEVLNINLEGNTWERASLPIDNGGLGIRRATDLAAVCYAASLNQFGSLAESHLGEEAKIELKKATAVADATIRSQLDPGPLREHVGQKLLDAYKTKKSAREIMNNLTSAKEPAVFLAALHPFSGGWLQALPSRQLGTMLDPNPFRMVSALRIGAPVCQPFTCLSCGQPVDSDGLHPLSCLKSPGRLTRHAELNAIVRRALRRAGIPSTPEPVGLNRSSELRPDGVTIPLWSHGKCLVWDVTVSCTAALSYVRHSAVKTGWVAERADSEKRRKYLELSRSYHFAPIALETLGPISTATAKLLQDIGKRIEDVTGDRREAMFLRQMMSLAVCRGNVASIIGAMN

SEQ ID NO: 2598 - protein, 979 aa, Dermanyssus gallinae
MTSQQYHNTRDATENDSEMALPLSQTPYVCNYCGRAVRSSKGLKIHITRKHSVAPCRSLRTDNNPGPNNQITITSNTDTQSDSKLLVQALSHARRSLRLARIIPRGAREVCTTAYTAALSNFNTKLDLESWNNLMMLPSLMFTLPHQKNQEKTLTKIIKSNVAEIDFRTLQSLADSTIPSTIGKKSHFTNDQYSVRQAEMKLAEGDIRSAARSLLSSDTLAPQNEHTESELRSKHPVSPPGCHEQLDLLQQPATLGLDKIEGPLVLETIRSFPCASGAGLDGLRPRHLRDMLSQTIPSSERLLEELGILMARVLNGALPSFCQSVFYGASLTALRKKDNSIRPIACGLTLRRMASKIAMAMNKRTIVAAVSPHQMGVAIRGGAEATVHATRAFLETKGPTKVLVKLDFQNAFNTIRRDNIFDEVKRKAPRLYPMIWQGYRDFSILAWNADTIIESQTGIQQGDPLGPALFCLGISDLVSSLQSPFNVWYLDDAVLGGPANVVARDLQAILNFEEPGGLTLNAAKCEVLAVGGTSQDQAQAVQTIMEALPGISLVTQDNLDVLGSPVMPEGIPRALDAKRETLVKIRPRLTSMHPQVALCLWRHSLGSPRFVYLLRTCQTLKHMEGLAAYDETTRDILSEILNIDLEGNTWNRASLPIGNGGLGIRRATDLAAVCYAASLNQFSFLAESLIDEEAKIELQKAAIVADTTVRSQLDPGPLREHVSQNLLDACKTKKSARDITDSLTSARERAVFLAAQHPFSGGWLQALPSCQLGTMLDPNCFRMVSALRIGVPVCQPFSCLRCGQPVDSDGLHPLSCLKTSGRITRHAELNAIVRRALRRAGIPSTPEPNGLNGSSELRPDGVTIPLWSHGKSLVWDVTVSCTAALSYLHHSAVESGWVAERADSEKRRKYLELSRSYHFVPITLETLGPISSGTAKILKDIGKRIAEVTGDRREAMFLRQMMSLAVCRGNVASIIGAMN

SEQ ID NO: 2599 - protein, 845 aa, Dermanyssus gallinae
MMLPSLMFTLPHQKNQEKTLTKIIKSNVAEIDFRTLQSLADSTIPSTIGKKSHFTNDQYSVRQAEMKLAEGDIRSAARSLVSSDTLAPQNEHTESELRSKHPVSPPGCQEQLDLLQQPATLGLDKIEGPLVLETIRSFPCASGAGLDGLRPRHLRDMLSQTIPSSERLLEELGILMARVLNGALPSFCQSVFYGASLTALRKKDNSIRPIACGLTLRRMASKIAMAMNKRTIVAAVSPHQMGVAIRGGAEATVHATRAFLETKGPTKVLVKLDFQNAFNTIRRDKIFDEVKRKAPRLYPMIWQGYRDFSILAWNADTIIESQTGIQQGDPLGPALFCLGISDLVSSLQSPFNVWYLDDAVLGGPANVVARDLQAILNFEEPGGLTLNAAKCEVLAVGGTSQDQAQAVQTIMEALPGISLVTQDNLDVLGSPVMPEGIPRALDAKRETLVKIRPRLTSMHPQVALCLWRHSLGSPRFVYLLRTCQTLKHMEGLAAYDETTRDILSEILNIDLEGNTWNRASLPIGNGGLGIRRATDLAAVCYAASLNQFSFLAESLIDKEAKIELQKAAIVADTTVRSQLDPGPLREHVSQNLLDACKTKKSARDITDSLTSARERAVFLAAQHPFSGGWLQALPSCQLGTMLDPNSFRMVSALRIGAPVCQPFSCLRCGQPVDSDGVHPLSCLKSSGRITRHAELNAIVRRALRRAGIPSTPEPNGLNGSSELRPDGVTIPLWSHGKSLVWDVTVSCTAALSYLHHSAVESGWVAERADSEKRRKYLELSRSYHFVPITLETLGPISSGTAKILKDIGKRIAEVTGDRREAMFLRQMMSLAVCRGNVASIIGAMN

SEQ ID NO: 2600 - protein, 978 aa, Dermanyssus gallinae
MTSQQSHNTSEFNDNDHTTASLSQTPYVCTQCGRCVRTSKGLKAHITRLHSPTPSRSLPTGNSPGPDNLIPSTSDSDLQSDSTSLVRILTSARKNLRLARVIPRGARECCAAAYTKALSNFNSRLDLKSWNHLMMLPSLMFAIPRLKDQEVTLTKLIKRNVAEIDLRTLQGVADATALSTIDKIRHVDEDENSIRQAEMKLAEGDIRSAARALLSSDIIAPYDAHTESELRAKHPRSPPGCQERIELLQQPVALNLGKIGVLQVHEAVKSFPFTSGAGLDGLRPRHLRDMLDQTIPSSERLLNELSTFVTTVLNGTLPSFCLPIFYGASLTALRKKDNSIRPIACGLALRRMASKIAMAVNKNTIVTAVSPHQVGVAIRGGAEATVHATRAFLQAEGPTRVLVKLDFRNAFNTLRRDKMFDEVQKKAPRLLPMVWQGYRSASMLAWNTDVTIESRTGIQQGDPLGPALFCLGISDLVSSLQSPFNVWYLDDAILGGPADVVAKDVQTVLQFEETGGLTLNASKCEVTAIGGNAQEQEKSIQAIMQALPRIIRTTQEDLDILGAPVMCEGIPRVLRAKRKALVKIRPRLTNMHPQAALCLWRHSLGSSRFNYLLRASPTFTYTEGLAAYDETTRDILGEVLNISLEENLWKRASLPIAFGGLGIRRSIDLAAVCYAASLNQFGSIAESLVNEDATIVLKKTTMLADATMRSQLDPGPLKEHVNQHFLDACKSKKSSRDIMDDLTSPRERAVFLAAQHPFSGGWLQALPSRQLGTMLDPNSFRMVSALRIGAPVCEPFSCLSCSQPVDSDGLHPLSCLKSPGRLTRHAELNAIVRRALRRAGIPSTPEPKGLYGSSELRPDGVTIPLWSHGKSLAWDVTVSCTAALSFLRHSAVESGWVAERADSEKRGKYLELSRRYHFVPIALETLGPISTGTAKILKDIGKRIEDITGDRREAMFLRQMMSLAVCRGNVASIIGAMN

SEQ ID NO: 2601 - protein, 979 aa, Dermanyssus gallinae
MTSQQYHNTRDATENDSEMALALSQTPYVCKYCGRAVRSSKGLKIHITRKHSVAPCRSLRTDNNPGPNNQITITSNTDTQPDSKLLVQALSHARRSLRLARIIPRGAREVCTTAYTAALSNFNTKLDLESWNNLMMLPSLMFTLPHQKNQEKTLTKIIKSNVAEIDFRTLQSLADSTIPSTIGKKSHFTNDQYSVRQAEMKLAEGDIRSAARSLLSSDTLAPQNEHTESELRSKHPVSPPGCQEQLDLLQQPATLGLDKIEGALVLEAIRSFPFASGAGLDGLRPQHLRDMPSQSIPSSERLLEELGILMARVLNGALPSFCQPVFYAACLTALRKKDNSIRPIACGLTLQRMASKIAMAMNKRTIVAAVSPHQMGVAIRGGAEATVHATRAFLETKGPTKVLVKLDFQNAFNTIRRDKMFDEVKRKAPRLYPMTWQGYRDFSILAWNADAIIESQTGIQQGDPLGPALFCLGISDLVSSLQSPFNVWYLDDAVLGGPANVVARDLQTILNFEEPGGLTLNAAKCEVLAVGGTSQDQAQAIQTIMEALPGISRVTQDNLDVLGSPVLPEGIPRALDAKREILVKIRPRLTSMHPQVALCLWRHSLGSSRFVYLLRTCQTLKHMEGLAAYDETTRDILSEILNIDLEGNTWNRASLPIGNGGLGIRRATDLAAVCYAASLNQFSFLAESLIDEEAKIELQKAAIVTDTTVRSQLDPGPLREHVSQNLLDGCKTKKSARDITDSLTSARERAVFLAAQHPFSGGWLQALPSCQLGTMLDPNSFRMVSGLRIGAPVCQPFSCLRCGQPVDSDGLHPLSCLKSSGRITRHAELNAIVRRALRRAGIPSTPEPNGLNGRSELRPDGVTIPLWSHGKSLVWDVTVSCTAALSYLHHSAVESGWVAERADSEKRRKYLELSRSYHFVPITLETLGPISSGTAKILKDIGKRIAEVTGDRREAMFLRQMMSLAVCRGNVASIIGAMN

SEQ ID NO: 2602 - protein, 979 aa, Dermanyssus gallinae
MTSQQYQNTRDATENDSEMALPLSQTPYVCNYCGRAVRSSKGLKIHITRKQPLAPCRNLRTIHNPGSSNDTANTSNTDTQPDAKLLVQVLSHARRNLRLARIIPRGAIEICAIAYTTALSNFNTKLDLESWNNLMMLPSLMFTLPRPKIQEKTLTKIIKSNVAQIGSQTLQTLPDSITPSTIGKRFYITNDQHSVRQAEMKLAEGDIRSAARSLLSLDTLAPHDKHTESELRSKHPVSPPGCQEQLDLLQQPATLDLDRVEGSLVFDTIRSFPFASGAGLDGLRPRHLRDMLSQTMPSSERLLTELGIFMARVLNGALPSFCQPVFYGASLTALRKKDNSIRPIACGLTLRRTASKIAMAMNKRAIVAAVSPHQMGVAIRGGAEATVHATRAFLEAEGPTKVLVKLDFRNAFNTIRRDRIFDEVKRKAPRLYPMIWQSYKDFSILAWNTDITIESQTGIQQGDPLGPALFCLSISDLVSSLQSPFNVWYLDDAVLGGPANAVARDLQTILNFEEPGGLTLNAAKCEVLAVGGTLQDQAQAIQEIMEALPGISCVTQGNLDVLGSPVMAEGIPRALDAKRETLVKIRPRLTNMHPQVALCLWRHSLGSPRFVYMLRTCQTLKYVEGLAAYDETIRSILSEVLNINLEGNTWERASLLIDNGGLGIRRATDLAAVCYAASLNQFGSLAESLLGDEAKIELKKATAVADATIRSQLDPGPLREHVSQKLLDAYKTKKSAREIMNNLTSARERAVFLAALHPFSGGWLQALPSRQLGTMLDPNPFRMVSALRIGAPVCQPFTCLSCGQPVDSDGLHPLSCLKSPGRLTRHAERNAIVRRALRRAGIPSTPEPVGLNGSSELRPDGVTIPLWSHGKCLVWDVTVSCTAALSYLRHSAVETGWVAERADSEKRRKYLELSRSYHFAPIALETLGPISTGTAKLLQDIGKRIEDVTGDRREAMFLRQMMPLAVCRGNVASIIGAMN

SEQ ID NO: 2603 - protein, 845 aa, Dermanyssus gallinae
MMLPSLMFTLPHQKNQEKTLTKIIKSNVAEIDFRTLQSLADSTIPSTIGKKSHFTNDQYSVRQAEMKLAEGDIRSAARSLLSSDTLAPQNEHTESELRSKHPVSPPGCQEQLDLLQQPATLGLDKIEGPLVLETIRSFPCASGAGLDGLRPRHLRDMLSQTIPSSERLLEELGILMARVLNGALPSFCQSVFYGASLTALRKKDNSIRPIACGLTLRRMASKIAMALNKRTIVAAVSPHQMGVAIRGGAEATVHATRAFLETKGPTKVLVKLDFQNAFNTIRRDKIFDEVKRKAPRLYPMIWQGYRDFSILAWNTDTIIESQTGIQQGDPLGPALFCLGISDLVSSLQSPFNIWYLDDAVLGGPANVVARDLQAILNFEEPGGLTLNAAKCEVLAVGGTSQDQAQAVQTIMEALPGISLVTQDNLDVLGSPVMPEGIPRALDAKRETLVKIRPRLTSMHPQVALCLWRHSLGSPRFVYLLRTCQTLKHMEGLAAYDETTRDILSEILNIDLEGNTWNRASLPIGNGGLGIRRATDLAAVCYAASLNQFSFLAESLIDEEAKIELQKAAIVADTTVRSQLDPGPLREHVSQNHLDACKTKKSARDITDSLTSARERAVFLAAQHPFSGGWLQALPSCQLGTMLDPNSFRMVSALRIGAPVCQPFSCLRCGQPVDSHGLHPLSCLKSSGRITRHAELNAIVRRALRRAGIPSTPEPNGLNGSSELRPDGVTIPLWSHGKSLVWDVTVSCTAALSYLHHSAVESGWVAERADSEKRRKYLELSRSYHFVPITLETLGPISSGTAKILKELGKRIAEVTGDRREAMFLRQMMSLAVCRGNVASIIGAMN

SEQ ID NO: 2604 - protein, 979 aa, Dermanyssus gallinae
MTSQQYQNTRGATENDSEMALPLSQTPYVCNYCGQAVRSSKGLKMHITRKHPLAPCRSLRTNHNPGPSNDIANTLNTDTQPDAKLLVQVLSHARRNLRLARIIPRGAREVCAIAYTTALSNFNTKLDLESWNNLMMLPSLMFTLPRQKNQEKTLTKIIKSNVAQIGSRTLQTLPDSIPPSTIGNRFHITNDQHSVRQAEMKLAEGDIRSAARSLLSLDTLAPHDKHTESELRSKHPVSPPGCQEQLDLLQRPATLDLDRVEGSLVFDTIRSFPFGSGAGLDGLRPRHLRDMLSQTIPSSERLLTELGIFIARVLNGALPSFCQPVFYGASLTALRKKDNSIRPIACGLTLRRTASKIAMAMNKRAIVAAVSPHQMGVAIRGGAEATVHATRAFLEAEGLTKVLVKLDFRNAFNTIRRDRIFDEVKRKAPRLYPMIWQSYKDFSILAWNTDITIESQTGIQQGDPLGPALFCLGISDLVSSLQSPFNVWYLDDAVLGGPANAVARDLQTILNFEEPGGLTLNAAKCEVLAVAGTLQDQAQAIQEIMEALPGISCVTQGNLDVLGSPVMAEGIPRALDAKRETLVKNRPRLTNMRPQVALCLWRHSLGSPRFVYMLRTCQTLKYVEGLAAYDETIRSILSEVFNINLEGNTWERASLPIDNGGLGIRRATDLAAVCYAASLNQFGSLAESLIGEEAKIELKKATALADATIRSQLDPGPLREHVSQKLLDAYKTKKSAREIMNNLTSARERAVFLAAQHSFSGGWLQALPSRQLGTMLDPNPFRMVSALRIGAPVCQPFTCLSCGQPVDSDGLHPLSCPKSPGRLTRHAELNAIVRRALRRAGIPSTPEPVGLNGSSELRPDGVTIPLWSHGKCLVWDVTVSCTAALSYLRHSAVETGWVAERADSEKRRKYLELSRSYHFAPIALETLGPISTGTAKLLQDIGKRFEDVTGDRREAMFLRQMMSLAVCRGNVASIIGAMN

SEQ ID NO: 2605 - protein, 979 aa, Dermanyssus gallinae
MTSQQYHNTRDATENDSEMALPLSQTPYVCNYCGRAVRSSKGLKIHITRKHSVAPCRSLRTDNNPGPNNQITITSNTDTQPDSKLLVQALSHARRSLRLARIIPRGAREVCTTAYTAALSNFNTKLDLESWNNLMMLPSLMFTLPHQKNQEKTLTKIIKSNVAEIDFRTLQSLADSTIPSTIAKKSHFTNDQYSVRQAEMKLAEGDIRSAARSLLSSDTLAPQNEHTESELRSKHPVSPPGCQEQLDLLQQPATLGLDKIEGPLVLETIRSFPCASGAGLDGLRPRHLRDMLSQTIPSSERLLEELGILMARVLNGALPSFCQSVFYGASLTALRKKDNSIRPIACGLTLRRMASKIAMAMNKRTIVAAVSPHQMGVAIRGGAEATVHATRAFLKTKGPTKVLVKLDFQNAFNTIRRDKIFDEVKRKAPRLYPMIWQGYRDFSILAWNADTIIESQTGIQQGDPLGPALFCLGISDLVSSLQSPFNVWYLDDAVLGGPANVVARDLQAILNFEEPGGLTLNAAKCEVLAVGGTSQDQAQAVQTIMEALPGISPVTQDNLDVLGSPVMPEGIPRALDAKRETLVKIRPRLTSMHPQVALCLWRHSLGSPRFVYLLRTCQTLKHMEGLAAYDETTRDILSEILNIDLEGNTWNRASLPIGNGGLGIRRATDLAAVCYAASLNQLSFLAESLIDEEAKIELQKAAIVADTTVRSQLDPGPLREHVSQNLLDACKTKKSARDITDSLTSARERAVFLAAQHPFSGGWLQALPSCQLGTMLDPNSFRMVSALRIGAPVCQPFSCLRCGQPVDSDGLHPLSCLKSSGRITRHAELNAIVRRALRRAGIPSTPEPNGLNGSSELRPDGVTIPLWSHGKSLVWDVTVSCTAALSYLHHSAVESGWVAERADSEKRRKYLELSRSYHFVPITLETLGPISSGTAKILKDIGKRIAEVTGDRREAMFLRQMMSLAVCRGNVASIIGAMN

SEQ ID NO: 2606 - protein, 979 aa, Dermanyssus gallinae
MTSQQHHNTRGATENDSEMALPLSQTPYVCNYCGRAVRSSKGLKIHITRKHSVARCRSLRTDNNPGPNNQITITSNTDTQPDSKLLVQALSHARRSLRLARIIPRGAREVCTTAYTTALSNFNTKLDLESWNNLMMLPSLMFTLPHQKNQEKTLTKIIKSNVAEIDFRTLQSLAESTIPSTIGKKSHFTNDQYSVRQAEMKLAEGDIRSAARSLLSSDTLAPQNEHTESELRSKHPVSPPGCQEQLDLLQQPATLGLDKIEGPLVLETIRSFPCASGAGLDGLRPRHLRDMLSQTIPSSERLLEELGILMARVLNGALPSFCQSVFYGASLTALRKKDNSIRPIACGLTLRRMASKIAMAMNKRTIVAAVSPHQMGVAIRGGAEATVHATRAFLETKGPTKVLVKLDFQNAFNTIRRDKIFDEVKRKAPRLYPMIWQGYRNFSILAWNTDTIIESQTGIQQGDPLGPALFCLGISDLVSSLQSPFNIWYLDDAVLGGPANVVARDLQAILNFEEPGGLTLNAAKCEVLAVGGTSQDQAQAVQTIMEALPGISLVTQDNLDVLGSPVMPEGIPRALDAKRETLVKIRPRLTSMHPQVALCLWRHSLGSPRFVYLLRTCQTLKHMEGLAAYDETTRDILSEILNIDLEGNTWNRASLPIGNGGLGIRRATDLAAVCYAASLNQFSFLAESLIDEEAKIELQKAAVVADTTVRSQLDPGPLREHVSQNLLDACKTKKSARDITDSLTSARERAVFLAAQHPFSGGWLQALPSCQLGTMLDPNSFRMVSALRIGAPVCQPFSCLRCGQPVDSDGLHPLSCLKSSGRITRHAELNAIVRRALRRAGIPSTPEPNGLNGSSELRPDGVTIPLWSHGKSLVWDVTVSCTAALSYLHHSAVDSGWVAERADSEKRRKYLELSRSYHFVPITLETLGPISSGTAKILKDIGKRIAEVTGDRREAMFLRQMMSLAVCRGNVASIIGAMN

SEQ ID NO: 2607 - protein, 935 aa, Dermanyssus gallinae
MHITRKHPLAPCRSLRTNHNPGPSNDIANTSNTDTQPDAKLLVQVLSHARRNLRLARIIPRGAREVCAIAYTTALSNFNTKLDLESWNNLMMLPSLMFTLPRQTIQEKTLTKIIKSNIAQIGSRTLQTLSDSITPSTIGNKFHITNDQHSVRQAEMKLAEGDIRSAARLLLSLDTLAPHDKHTESELRSKHPVSPPGCQEQLDLLQQPATLDLDRVEGSLVFDTIRSFPFASGAGLDGLRPRHLRDMLSQTIPSSERLLTELGIFMARVLNGALPSFCQPVFYGASLTALRKKDNSIRPIACGLTLRRTASKIAMAMNKQAIVAAVSPHQMGVAIRGGAEATVHATRAFLEAEGPTKVLVKLDCRNAFNTIRRDRIFDEVKRKAPRLYPMIWQSYKDLSILAWNAYITIESQTGIQQGDPLGPALFCLGISDLVSSLQSPFNVWYLDDAVLGGPANVVARDLQTILNFEEPGGLTLNAAKCEVFAAGGTLQDQAQAIQEIMEALPGISCVTQGNLDVLGSPVMAEGIPRALDAKRETLVKIRPRLTSMHPQVALCLWRHSLGSPRFVYMLRTCQTLKYMEGLAAYDETTRSILSEVLNINLEGNMWERASLPIDDGGLGIRRATDLAAVCYAASLNQFGFLAESLLCEEAKIKLKKATAVADATIRSQLDPGPLREHVSQKLLDAYKTKKSARDIMNNLTSARERAVFLAAQHPFSGGWLQALPSRQLGTMLDPNPFRMVSALRIGAPVCQPFTCLSCGQPVDSDGLHPLSCLKSPGRLTRHAELNAIVRRALRRAGIPSTPEPVGLNGSSELRPDGVTIPLWSHGKCLVWDVTVSCTAALSYLRHSAVESGWVAERADSEKRRKYLELSRSYHFAPITLETLGPISTGSAKLLQDIGKRIEDVTGDRREAMFLRQMMSLAVCRGNVASIIGAMN

SEQ ID NO: 2608 - protein, 979 aa, Dermanyssus gallinae
MTSQQYQNTRDATENDSEMALPLSQTPYVCNYCGQAVRSSKGLKIHITRKHPLAPCRNLRTIHNPGPSNDTANTSNTDTQPDAKLLVQVLSHARRNLRLARIIPRGAREICAIAYTTALSNFNTKLDLESWNNLMMLPSLMFTLPRQKNQEKTLTKIIKSNVAQIGSQTLQTLPDSITPSTIGKRFYITNDQHSVRQAEMKLAEGDIRSAARSLLSLDTLALHDKHTESELRSKHPVSPPGCQEQLDLLQQPATLDLDRVEGSLVFDTIRSFPFASGAGLDGLRPRHLRDMLSQTMPSSERLLTELGIFMARVLNGALPSFCQPVFYGASLTALRKKDNSIRPIACGLTLRRTASKIAMAMNKRAIVAAVSPHQMGVAIRGGAEATVHATRAFLEAEGLTKVLVKLDFRNAFNTIRRDRIFDEVKRKAPRLYPMIWQSYKDFSILAWNTDITIESQTGIQQGDPLGPALFCLGISDLVSSLQSPFNVWYLDDAVLGGPANAVARDLQTILNFEEPGGLTLNAAKCEVLAVGGTLQDQAQAIQEIMEALPGISCVTQGNLDVLGSPVMAEGIPRALDAKRETLVKIRPRLTNMHPQVALCLWRHSLGSPRFVYMLRTCQTLKYVEGLAAYDETIRSILSEVLNINLEGNTWERASLPIDNGGLGIRRATDLAAVCYAASLNQFGSLAESLLGDEAKIELKKATAVADATIRSQLDPGPLREHVSQKLLDAYKTKKSAREIMNNLTSARERAVFLAALHPFSGGWLQALPSRQLGTMLDPNPFRMVSALRIGAPVCQPFTCLSCGQPVDSDGLHPLSCLKSPGRLTRHAELNAIVRRALRRAGIPSTPEPVGLNGSSELRPDGVTIPLWSHGKCLVWDVTVSCTAALSYLRHSAVETGWVAERADSEKRRKYLELSRSYHFAPIALETLGPISTGTAKLLQDIGKRIEDVTGDRREAMFLRQMMSLAVCRGNVASIIGAMN

SEQ ID NO: 2609 - protein, 896 aa, Dermanyssus gallinae
MTSQQYHNTRDATENDSEMALALSQTPYVCKYCGRAVRSSKGLKIHITRKHSVAPCRSLRTDNNPGPNNQITITSNTDTQPDSKLLVQALSHARRSLRLARIIPRGAREVCTTAYTAALSNFNTKLDLERNNLMMLPSLMFTLPHQKNQEKTLTKIIKSNVAEIDFRTLQSLADSTIPSTIGKRSHFTNDQYSVRQAEMKLAEGDIRSAARSLLSSDTLAPQNEHTESELRSKHPVSPPGCQEQLDLLQQPATLGLDKIEGALVLETIRSFPFASGAGLDGLRPRHLRDMLSQTIPSSERLLEELGILMARVLNGALPSFCQPVFYGACLTALRKKDNSIRPIACGLTLRRMASKIAMAMNKRTIVAAVSPHQMGVAIRGGAEATVHATRAFLETKGPTKVLVKLDFQNAFNTIRRDKIFDEVKRKAPRLYPMTWQGYRDFSILAWNADTIIESQTGIQQGDPLGPALFCLGISDLVSSLQSPFNVWYLDDAVLGGPANVVARDLQTILNFEEPGGLTLNAAKCEVLAVGGTSQDQAQAIQTIMEALPKISRVTQDNLDVLGSPVMPEGIPRALDAKREILVKIRPRLTSMHPQVALCLWRHSLGSPRFVYLLRTCQTLKHMEGLAAYDETTRDILSEILNIDLEGNTWNRASLPIGNGGLGIRRATDLAAVCYAASLNQFSFLAESLIDEEAKIELQKAAIVADTTVRSQLDPGPLREHVSQNLLDGCKTKKSARDITDSLTSARERAVFLAAQHPFSGGWLQALPSCQLGTMLDPNSFRMVSGLRKGAPVCQPFSCLRCGQPVDSDGLHPLSCLKSSGRITRHAELNAIVRRALRRAGIPSTPEPNGLNGSSELRPDGVTIPLWSHGKSLVWDVTVSCTAALSYLHHSAVSQDG

SEQ ID NO: 2610 - protein, 979 aa, Dermanyssus gallinae
MTSQQYQNTRDATENDSEMALPLSQTPYVCNYCGQAVRSSKGLKIHITRKHPLAPCRNLRTIHNPGPSNDTANTSNTDTQPDAKLLVQVLSHARRNLRLARIIPRGAREICAIAYTTALSNFNTKLDLESWNNLMMLPSLMFTLPRQKIQEKTLTKIIKSNVAQIGSRTLQTLPDSITPSTIGKRFYITNDQHSVRQAEMKLAEGDIRSAARSLLSLDTLAPHDKHTEFELRSKHPVSPPGCQEQLDLLQQPATLDLDRVEGSLVFDTIRSFPFASGAGLDGLRPRHLRDMLSQTIPSSERLLTELGIFMARVLNGALPSFCQPVFYGASLTALRKKDNSIRPIACGLTLRRTASKIAMAMNKRAIVAAVSPHQMGVAIRGGAEATIHATRAFLEAEGPTKVLVKLDFRNAFNTIRRDRIFDEVKRKAPRLYPMIWQSYKDFSILAWNTDITIESQTGIQQGDPLGPALFCLGISDLVSSLQSPFNVWYLDDAVLGGPANAVARDLQTILNFEEPGGLTLNAAKCEVLAVGGTLQDQAQAIQEIMEALPGISCVTQGNLDVLGSPVMAEGIPRALDAKRETLVKIRPRLTNMHPQVALCLWRHSLGSPRFVYMLRTCQTLKYVEGLAAYDETIRSILSEVLNINLEGNTWERASLPIDNGGLGIRRATDLAAVCYAASLNQFGSLAESLLDDEAKIELKKATAVADATIRSQLDPGPLREHVSQKLLDAYKTKKSAREIMNNLTSARERAVFLAALHPFSGGWLQALPSRQLGTMLDPNPFRMVSALRIGAPVCQPFTCLSCGQPVDSDGLHPLSCLKSPGRLTRHAELNAIVRRALRRAGIPSTPEPVGLNGSSELRPDGVTIPLWSHGKCLVWDVTVSCTAALSYLRHSAVETGWVAERADSEKRSKYLELSRSYHFAPIALETLGPISTGTAKLLQDIGKRIEDVTGDRREAMFLRQMMSLAVCRGNVASIIGAMN

SEQ ID NO: 2611 - protein, 921 aa, Dermanyssus gallinae
MTSQQHHNTRDATGNDSEMALPLSQTPYVCEYCGRAVRSSKGLKIHITRKHSVARCRSLRTDNNPGPNNQITITSNTDTQPDSKLLVQALSHARRSLRLARIIPRGAREVCTTAYTAALSNFNTKLDLESWNNLMMLPSLMFTLPHQKNQEKTLTKIIKSNVAEIDFRTLQSLADSAIPSTIGKKSHFTNDQYSVRQAMKLAEGDIRSDARSLLSSDTLAPQNEHTESELRSKHPVSPPGCQEQLDLLQQPATLGLDKIEGPLVLETIRSFPCASGAGLDGLRPRHLRDMLSQTIPSSERLLEELGILMARVLNGALPSFCQSVFYGASLTALRKKDNSIRPIACGLTLRRMASKIAMALNKRTIVAAVSPHQMGVAIRGGAEATVHATRAFLETKGPTKVLVKLDFQNAFNTIRRDKIFDEVNRKAPRLYPMIWQGYRDFSILAWNTDTIIESQTGIQQGDPLGPALFCLGISDLVSSLQSPFNIWYLDDAVLGGPANVVARDLQAILNFEEPGGLTLNAAKCEVLAVGGTSQDQAQAVQTIMEALPGISLVTQDNLDVLGSPVMPEGIPRALDAKRETLVKIRPRLTSMHPQVALCLWRHSLGSQRFVYLLRTCQTLKHMEGLAAYDETTRDILSEILNIDLEGNTWNRASLPIGNGGLGIRRATDLAAVCYAASLNQFSFLAESLIDEEAKIELQKAAIVADTTVRSQLDPGPLREHVSQNLLDACKTKKSARDITHRLTSARERAVFLAAQHPFSGGWLQALPSCQLGTMLDPNSFRMVSALRIGAPVCQPFSCLRCGQPVDSDGLHPLSCLKNSGRITRHAELNAIVRRALRRAGIPSTPEPNGLNGSSELRPDGVTIPLWSHGKSLVWDVTVSCTAALSYLHHSAVESGWVAERADSDEGSISSYLEATTLYPLH

SEQ ID NO: 2612 - protein, 979 aa, Dermanyssus gallinae
MTSQQYQNTRDATENDSEMALPLSQTPYVCNYCGQAVRSAKGLKMHITRKHPLAPCRSLRTNHNPGPSNDIANTLNTDTQPDAKLLVQVLSHARRNLRLARIIPRGAREVCAIAYTTALSNFNTKLDLESWNNLMMLPSLMFTLPRQTIQEKTLTKIIKSNVAQIGSRTLQTLPDSITPSTIGNRFHITNDQHSVRQAEMKLAEGDIRSAARSLLSLDTLAPHDKHTESELRSKHPVSPPGCQEQLDLLQQPATLDLDRVEGSLVFDTIRSFPFASGAGLDGLRPRHLRDMLSQAIPSSERLLTELGIFMTRVLNGALPSFCQPVFYGASLTALRKKDNSIRPIACGLTLRRTASKIAMAMNKQAIVAAVSPHQMGVAIRGGAEATVHATRAFLEAEGPTKVLVKLDFRNAFNTIRRDRIFDEVKRKAPRLYPMIWQSYKDFSILAWNTDITIESQTGIQQGDPLGPALFCLGISDLVSSLQSPFNVWYLDDAVLGGPANAVARDLQTILNFEEPGGLTLNAAKCEVLAVGGTLQDQAQAIQEIMEALPGISCVTQGNLDVLGSPVMAEGIPRALDAKRETLVKIRPRLTNMHPQVALCLWRHSLGSPRFVYMLRTCQTLKYVEGLAAYDETIRSILSEVLNINLEGNTWERASLPIDNGGLGIRRATDLAAVCYAASLNQFGSLAESLLGEEAKIELKKATALADATIRSQLDPGPLGEHVSQKLLDAYKTKKSAREIMNNLTSARERAVFLAAQHPFSGGWLQALPSRQLGTMLDPNPFRMVSALRIGAPVCQPFTCLSCGQPVDSDGLHPLSCPKSPGRLTRHAELNTIVRRALRRAGIPSTPEPVGLNGSSELRPDGVTIPLWSHGKCLVWDVTVSCTAALSYLRHSAVETGWVAERADSEKRRKYLELSRSYHFAPIALETLGPISTGTAKLLQDIGKRIEDVTGDRREAMFLRQMMSLAVCRGNVASIIGAMN

SEQ ID NO: 2613 - protein, 979 aa, Dermanyssus gallinae
MTSQQHHNTRDATENDSEMAVPLSQTPYVCEYCGRAVRSSKGLKIHITRKHSVARCRSLRTDNNPGPNNQITITSNTDTQPDSKLLVQALSHARRSLRLVRIIPRGAREVCTTAYTAALSNFNTKLDLESWNNLMMLPSLMFTLPHQKNQEKTLTKIIKSNVAEIDFRTLQSLADSTIPSTIGKKSHFTNDQYSVRQAEMKLAEGDIRSAARSLLSSDTLAPQNEHTESELRSKHPVSPPGCQEQLDLLQQPATLGLDKIEGPLVLETIRSFPCASGAGLDGLRPRHLRDMLSQTIPSSERLLEELGILMARVLNGALPSFCQSVFYGASLTALRKKDNSIRPIACGLTLRRMASKIAMALNKRTIVAAVSPHQMGVAIRGGAEATVHATRAFLETKGPTKVLVKLDFQNAFNTIRRDNIFDEVKRKAPRLYPMIWQGYRDFSILAWNTDTIIESQTGIQQGDPLGPALFCLGISDLVSSLQSPFNIWYLDDAVLGGPANVVARDLQAILNFEEPGGLTLNAAKCEVLAVGGTSQDQAQAVQTIMEALPGISLVTQDNLDVLGSPVMPEGIPRALDAKRETLVKIRPRLTSMHPQVALCLWRHSLGSPRFVYLLRTCQTLKHMEGLAAYDETTRDILSEILNIDLEGNTWNRASLPIGNGGLGIRRATDLAAVCYAASLNQFSFLAESLIDEEAKIELQKAAIVADTTVRSQLDPGPLREHVSQNLLDACKTKKSARDITDSLTSARERAVFLAAQHPFSGGWLQALPSCQLGTMLDPNSFRIVSALRIGAPVCQPFSCLRCGQPVDSDGLHPLSCLKSSGRITRHAELNAIVRRALRRAGIPSTPEPNGLNGSSELRPDGVTIPLWTHGKSLVWDVTVSCTAALSYLHHSAVESGWVAERADSEKRRKYLELSRSYHFVPITLETLGPISSGTAKILKDIGKRIAEVTGDRREAMFLRQMMSLAVCRGNVASIIGAMN

SEQ ID NO: 2614 - protein, 978 aa, Dermanyssus gallinae
MTSQQSHNTSEFNDNDHTTASLSQTPYVCTQCGRCVRTSKGLKAHITRLHSPTPSRSLPTGNSPGPDNLIPSTSDSDLQSDSTSLVRILTSARKNLRLARVIPRGARECCAAAYTKALSNFNSRLDLKSWNHLMMLPSLMFAIPRLKDQEVTLTKLIKKNVAEIDLRTLQGVADATALSTIDKIRHVDEDENSIRQAEMKLAEGDIRSAARALLSSDIIAPYDAHTESELRAKHPRSPSGCQERIELLQQPVALNLGKIDVLQVHEAVKSFPFTSGAGLDGLRPRHLRDMLDQTIPSSERLLNELSTFVTTVLNGTLPSFCLPIFYGASLTALRKKDNSIRPIACGLALRRMASKIAMAVNKNTIVTAVSPHQVGVAIRGGAEATVHATRAFLQAEGPTRVLVKLDFRNAFNTLRRDKMFDEVQKKAPRLLPMVWQGYRSASMLAWNTDVTIESRTGIQQGDPLGPALFCLGISELVSSLQSPFNVWYLDDAILGGPADVVAKDVQTVLQFEETGGLTLNASKCEVTAIGGNAQEQEKSIQAIMQALPGIIRTTQEDLDILGAPVMCEGIPRVLRAKRKALVKIRPRLTNMHPQAALCLWRHSLGSSRFNYLLRASPTFTYTEGLAAYDETTRDILGEVLNTSLEENLWKRASLPIAFGGLGIRRSIDLAAVCYAASLNQFGSLAESLVNEDATIVLKKTTMLADATMRNQLDPGPLKEHVNQHFLDACKSKKSSRDIMDDLTSPRERAVFLAAQHPFSGGWLQALPSRQLGTMLDPNSFRMVSALRIGAPVCEPFSCLSCSQPVDSDGLHPLSCLKSPGRLTRHAELNAIVRRALRRAGIPSTPEPKGLYGSSELRSDGVTIPLGSHGKSLAWDVTVSCTAALSYLRHSAVESGWVAERADSEKRGKYLELSRRYHFVSIALETLGPISTGTAKILKDIGKRIEDITGDRREAMFLRQMMSLAVCRGNVASIIGAMN

SEQ ID NO: 2615 - protein, 1007 aa, Dermanyssus gallinae
MYGMYAYSAVSCVLASATDFYCDKSDNELQLIIIIIIIIITENDSEMALPLSQTPYVCNYCGQAVRSAKGLQMHITRKHPLAPCRSLRTNHNPGPSNDIANTLNTDTQPDAKLLVQVLSHARRNLRLARIIPRGAREVCAIAYTTALSNFNTKLDLESWNNLMMLPSLMFTLPRQKIQEKTLTKIIKSNVAQIGSRTLQTLPDSITPSTIGNRFHITNDQHSVRQAEMKLAEGDIRSAARSLLSLDTLAPHDKHTKSELRSKHPVSPPGCQEQLDLLQQPATLDLDRVEGSLVFDTIRSFPFASGAGLDGLRPRHLRDMLSQAIPSSERLLTELGIFMARVLNGALPSFCQPVFYGASLTALRKKDNSIRPIACGLTLRRTASKIAMAMNKQAIVAAVSPHQMGVAIRGGAEATVHATRAFLEAEGPTKVLVKLDFRNAFNTIRRDRIFDEVKRKAPRLYPMIWQSYKDFSILAWNTDITIESQTGIQQGDPLGPALFCLGISDLVSSLQSPFNVWYLDDAVLGGPANAVARDLQTILNFEEPGGLTLNAAKCEVLAVGGTLQDQAQAIQEIMEALSGISCVTQGNLDVLGSPVMAEGIPRALDAKRETLVKIRPRLTNMHPQVALCLWRHSLGSPRFVYMLRTCQTLKYVEGLAAYDETIRSILSEVLNINLEGNTWERASLPIDNGGLGIRRATDLAAVCYAASLNQFGSLAESLLGEEAKIELKKATALADATIRSQLDPGPLREHVSQKLLDAYKTKKSAREIMNNLTSARERAVFLAAQHPFSGGWLQALPSRQLGTMLDPNPFRMVSALRIGAPVCQPFTCLSCGQPVDSDGLHPLSCPKSPGRLTRHAELNAIVRRALRRAGIPSTPEPVGLNGSSELRPDGVTIPLWSHGKCLVWDVTVSCTAALSYLRHSAVETGWVAERADSEKRRKYLELSRSYHFAPIALETLGPISTGTAKLLQDIGKRIEDVTGDRREAMFLRQMMSLAVCRGNVASIIGAMN

SEQ ID NO: 2616 - protein, 978 aa, Dermanyssus gallinae
MTSQQSHNTSEFNDKDHTTASLSQTPYVCTQCGRSVRTSKGLKAHITRLHSPTPSRSLPTGNSPGPDNLIPSTSDSALQSDSTSLVRILTSARKNLRLARVIPRGARECCAAAYTKALSNFNSRLDLKSWNHLMMLPSLMFAIPRLKDQEVTLTKLIKRNVAEIDLRTLQGVADATARSTIDKIRHVDEDENSIRQAEMKLAEGDIRSAARALLSSDIIAPYDAHTESELRAKHPRSPPGCQERIELLQQPVALNLGKIDVLQVHEAVKSFPFTSGAGLDGLRPRHLRDMLDQTIPSSERLLNELSTFVTTVLNGTLPSFCLPIFYGASLTALRKKDNSIRPIACGLALRRMASKIAMAVNKNTIVTAVSPHQVGVAIRGGAEATVHATRAFLQAEGPTRVLVKLDFRNAFNTLRRDKMFDEVQKKAPRLLPMVWQGYRSASMLAWNTDVTIESRTGIQQGDPLGPALFCLGISDLVSSLQSPFNVWYLDDAILGGPADVVAKDVQTVLQFEETGGLTLNASKCEVTAIGGNAQEQEKSIQAIMQALPGIIRTTQEDLDILGAPVMCEGIPRVLRAKRKALVKIRPRLTNMHPQAALCLWRHSLGSSRFNYLLRASPTFTYTEGLAAYDETTRDILGEVLNISLEENLWKRASLPIAFGGLGIRRSIDLAAVCYAASLNQFGSIAESLVNEDATIVLKKTTMLADATMRSQLDPGPLKEHVNQHFLDACKSKKSSRDIMDDLTSPRERAVFLAAQHPFSGGWLQALPSRQLGTMLDPNSFRMVSALRIGAPVCEPFSCLSCSQPVDSDGLHPLSCLKSPGRLTRHAELNAIVRRALRRAGIPSTPEPKGLYGSSELRPDGVTVPLWSHGKSLAWDVTVSCTAALSYLRHSAVESGWVAERADSEKRGKYLELSRRYHFVPIALETLGPISTGTAKILKDIGKRIEDITGDRREAMFLRQMMSLAVCRGNVASIIGAMN

SEQ ID NO: 2617 - protein, 978 aa, Dermanyssus gallinae
MTSQQSHNTSEVNDNDHTTASLSQTPYVCTQCGRCVRTSKGLKAHITRLHSPIPSRSLPIGNSPGPDNLIPSASDSDLQSDSTSLVRILTNARKNLRLARVIPRGARECCAAAYTKALSNFNSRLDLKSWNHLMMLPSLMFAIPRLKDQEVTLTKLIKKNVAEIDLRTLQGVADATALSTIDKIRHVNEDENSIRQAEMKLAEGDIRSAARALLSSDIIAPYDAHTESELRAKHPRSPRGCQERIELLQQPVALNLGKIDVLQVHEAVKSFPFTSGAGLDGLRPRHLRDMLDQTIPSSERLLNELSTFVTTVLNGTLPSFSLPIFYGASLTALRKKDNSIRPIACGLALRRMASKIAMAVNKNTIVTAVSPHQVGVAIRGGAEATVHATRAFLQAEGPTRVLVKLDFRNAFNTLRRDKMFDEVQKKAPRLLPMVWQGYRSASMLAWNTDVTIESRTGIQQGDPLGPALFCLGISDLVSSLQSPFNVWYLDDAILGGPADVVAKDVQTVLQFEETGGLTLNASKCEVTAIGGNAQEQEKSIQAIMQALPGIIRTTQEDLDILGAPVMCEGIPRVLRAKRKALVKIRPRLTNMHPQAALCLWRHSLGSSRFNYLLRASPTFTYTEGLAAYDETTRDILGEVLNISLEENLWKRASLPIAFGGLGIRRSIDLAAVCYAASLNQFGSLAESLVNEDATIVLKKTTMLADATMRSQLDPGPLKEHVNQHFLDACKSKKSSRDIMDDLTSSRERAVFLAAHHPFSGGWLQALPSRQLGTMLDPNSFRMVSALRIGAPVCEPFSCLSCSPPVDSDGLHPLSCLKSPGRLTRHAELNAIVRRALRRAGIPSTPEPKGLYGSSELRPDGVTIPLWSHGKSLAWDVTVSCTAALSYLRHSAVESGWVAERADSEKRGKYLELSRRYHFVPIALETLGPISTGTAKILKDIGKRIEDITGDRREAMFLRQMMSLAVCRGNVASIIGAMN

SEQ ID NO: 2618 - protein, 979 aa, Dermanyssus gallinae
MTSQQYQNTRDATENDSEMALPLSQTPYVCNYCGQAVRSAKGLKMHITRKHPLAPCRSLRTNHNPGPSNDIANTLNTDTQPDAKLLVQVLSHARRNLRLARIIPRGAREVCAIAYTTALSNFNTKLDLESWNNLMMLPSLMFTLPRQKIQEKTLTKIIKSNVAQIGSRTLQTLPDSITPSTIGNRFHITNDQHSVRQAEMKLAEGDIRSAARSLLSLDTLAPHDKHTESELRSKHPVSPPGCQEQLDLLQQPATLDLDRVEGSLVFDTIRSFPFASGAGLDGLRPRHLRDMLSQAIPSSERLLTELGIFMARVLNGALPSFCQPVFYGASLTALRKKDNSIRPIACGLTLRRTASKIAMAMNKQAIVAAVSPHQMGVAIRGGAEATVHATRAFLEAEGPTKVLVKLDFRNAFNTIRRDRIFDEVKRKAPRLYPMIWQSYKNFSILAWNTDITIESQTGIQQGDPLGPALFCLGISDLVLSLQSPFNVWYLDDAVLGGPANAVARDLQTILNFEEPGGLTLNAAKCEVLAVGGTLQDQAQAIQEIMEALPGISCVTQGNLDVLGSPVMAEGIPRALDAKRETLVKIRPRLTNMHPQVALCLWRHSLGSPRFVYMLRTCQTLKYVEGLAAYDETIRSILSEVLNINLEGNTWERASLPIDNGGLGIRRATDLAAVCYAASLNQFGSLAESLLGEEAKIELKKATALADATIRSQLDPGPLREHVSQKLLDAYKTKKSAREIMNNLTSARERAVFLAAQHPFSGGWLQALPSRLLGTMLDPNPFRMVSALRIGAPVCQPFTCLSCGQPVDSDGLHPLSCPKSPGRLTRHAELNAIVRRAVRRAGIPSTPEPVGLNGSSELRPDGVTIPLWSHGKCLVWDVTVSCTAALSYLRHSAVETGWVAERADSEKRRKYLELSRSYHFAPIALETLGPISTGTAKLLQDIGKRIEDVTGDRREAMCLRQMMCLAVCRGNVASIIGAMN

SEQ ID NO: 2619 - protein, 979 aa, Dermanyssus gallinae
MTSQQYHNTRDATENDSEMALPLSQTPYVCNYCGRAVRSSKGLKIHITRKHSVAPCRSLRTDNNPGPNNQITITSNTDTQPDSKLLVQALSHARRSLRLARIIPRGAREVCTTAYTAALSNFNTKLDLESWNNLMMLPSLMFTLPHQKNQEKTLTKIIKSNVAEIDFRTLQSLADSTIPSTIGKKSHFTNDQYSVRQAEMKLAEGDIRSAARSLLSSDALAPQNEHTESELRSKHPVSPPGCQEQLDLLQQPATLGLDKIEGPLVLETIRSFPCASGAGLDGLRPRHLRDMLSQTIPSSERLLEELGILMARVLNGASPSFCQSVFYGASLTALRKKDNSIRPIACGLTLRRMASKIAMAMNKRTIVAAVSPHQMGVAIRGGAEATVHATRAFLETKGPTKVLVKLDFQNAFNTIRRDKIFDEVKRKAPRLYPMIWQGYRDFSILAWNADTIIESQTDIQQGDPLGPALFCLGISDLVSSLQSPFNVWYLDDAVLGGPANVVARDLQAILNFEEPGGLTINAAKCEVLAVGGTSQDQAQAVQTIMEALPGISLVTQDNLDVLGSPVMPEGIPRALDAKRETLVKIRPRLTSMHPQVALCLWRHSLGSPRFVYLLRTCQTLKHMEGLAAYDETTRDILSEILNIDLEGNTWNRASLPIGNGGLGIRRATDLAAVCYAASLNQFSFLAESLIDEEAKIELQKAAIVADTTVRSQLDPGPLREHVSQNLLDACKTKKSARDITDSLTSARERAVFLAAQHPFSGGWLQALPSCQLGTMLDPNSFRMVSALRIGAPVCQPFSCLRCGQPVDSDGLHPLSCLKSSGRITRHAELNAIVRRALRRAGIPSTPEPNGLNGSSELRPDGVTIPLWSHGKSLVWDVTVSCTAALSYLHHSAVESGWVAERADSEKRRKYLELSRSYHFVPITLETLGPISSGTAKILKDIGKRIAEVTGDRREAMFLRQMMSLAVCRGNVASIIGAMN

SEQ ID NO: 2620 - protein, 979 aa, Dermanyssus gallinae
MTSQQYHNTRDATENDSEMALPLSQTPYVCNYCGRAVRSSKGLKIHITRKHSVAPCRSLRTDNNPGPNNQITITSNTDTQPDSKLLVQALSHARRSLRLARIIPRGAREVCTTAYTAALSNFNTKLDLESWNNLMMLPSLMFTLPHQKNQEKTLTKIIKSNVAEIDFRTLQSLADSTIPSTIGKKSHFTNDQYSVRQAEMKLAEGDIRSAARSLLSSDTLAPQNEHTESELRSKHPVSPPGCQEQLDLLQQPATLGLDKIEGPLVLETIRSFPCASGAGLDGLRPRHLRDMLSQTIPSSERLLEELGILMARVLNGALPSFCQSVFYGASLTALRKKDNSIRPIACGLTLRRMASKIAMAMNKRTIVAAVSPHQMGVAIRGGAEATVHATRAFLETKGPTKVLVKLDFQNAFNTIRRDKIFDEVKRKAPRLYPMIWQGYRDFSILAWNADTIIESQTGIQQGDPLGPALFCLGISDLVSSLQSPFNVWYLDDAVLGGPANVVARDLQAILNFEEPGGLTLNAAKCEVLAVGGTSQDQAQAVQTIMEALPGISLVTQDNLDVLGSPVMPEGIPRALDAKRETLVKIRPRLTSMHPQVALCLWRHSLGSPRFVYLLRTCQTLKHMEGLAAYDETTRDILSEILNIDLEGNTWNRASLPIGNGGLGIRRATDLAAVCYAASLNQFSFLAESLIDEEAKIELQKAAIVADTTVRSQLDPGPLREHVSQNLLDACKTKKSARDITDSLTSARERAVFLGAQHPFSGGWLQALPSCQLGTMLDPNSFRMVSALRIGAPVCQPFSCLRCGQPVDSDGLHPLSCLKSSGRITRHAELNAIVRRALRRAGIPSTPEPNGLNGSSELRPDGVTIPLWSHGKSLVWDVTVSCTAALSYLHHSAVESGWVAERADSEKRRKYLELSRSYHFVPITLETLGPISSGTAKILKDIGKRIAEVTGDRREAMFLRQMMSLAVCRGNVASIIGAMN

SEQ ID NO: 2621 - protein, 979 aa, Dermanyssus gallinae
MTSQQHHNTRDATENDSEMALPLSQTPYVCNYCGRAVRSSKGLKIHITRKHSVAPCRSLRTDNNPGPNNQITITSNTDTQPDSKLLVQALSHARKSLRLARIIPRGAREVCTTAYTAALSNFNTKLDLESWNNLMMLPSLMFTLPHQKNQEKTLTKIIKSNVAEIDFRTLQSLADSTIPSTIGKKSHFTNDQYSVRQAEMKLAEGDIRSAARSLLSSDTLAPQNEHTESELRSKHPVSPPGCQEQLDLLQQPATLGLDKIEGPLVLETIRSFPCASGAGLDGLRPRHLRDMLSQTIPSSERLLEEIGILMARVLNGALPSFCQSVFYGASLTALRKKDNSIRPIACGLTLRRMASKIAMAMNKRTIVAAVSPHQMGVAIRGGAEATVHATRAFLETKGPTKVLVKLDFQNAFNTIRRDKIFDEVKRKAPRLYPMIWQGYRDFSILAWNADTIIESQTGIQQGDPLGPALFCLGISDLVSSLQSPFNIWYLDDAVLGGPANVVARDLQAILNFKEPGGLTLNAAKCEVLAVGGTSQDQAQAVQTIMEALPGISLVTQDNLDVLGSPVMPEGIPRALDAKRETLVKIRPRLTSMHPQVALCLWRHSLGSPRFVYLLRTCQTLKHVEGLAAYDETTRDILSEILNIDLEGNTWNRASLPIGNGGLGIRRATDLAAVCYAASLNQFSFLAESLIDEEAKIELQKTAIVADTTVRSQLDPGPLREHVSQNLLDACKTKKSARDITDSLTSARERAVFLAAQHPFSGGWLQALPSCQLGTMLDPNSFRMVSALRIGAPVCQPFSCLRCGQPVDSDGLHPLSCLKSSGRITRHAELNAIVRRALRRAGIPSTPEPNGLNGSSELRPDGVTIPLWSHGKSLVWDVTVSCTAALSYLHHSAVESGWVAERADSEKRRKYLELSRSYHFVPITLETLGPISSGTAKILKDIGKRIAEVTGDRREAMFLRQMMSLAVCRGNVASIIGAMN

SEQ ID NO: 2622 - protein, 979 aa, Dermanyssus gallinae
MTSQQYHNTRDATENDSEMALPLSQTPYVCNYCGRAVRSSKGLKIHITRKHSVAPCRSLRTDNNPGPNNQITITSNTDTQSDSKLLVQALSHARRSLRLARIIPRGAREVCTTAYTAALSNFNTKLDLESWNNLMMLPSLMFTLPHQKNQEKTLTKIIKSNVAEIDFRTLQSLADSTIPSTIGKKSHFTNDQYSVRQAEMKLAEGDIRSAARSLLSSDTLAPQNEHTESELRSKHPVSPPGCQEQLDLLQQPATLGLDKIEGPLVLETIRSFPCASGAGLDGLRPRHLRDMLSQTIPSSERLLEELGILMARVLNGALPSFCQSVFYGASLTALRKKDNSIRPIACGLTLRRMASKIAMAMNKRTIVAAVSPHQMGVAIRGGAEATVHATRAFLETKGPTKVLVKLDFQNAFNTIRRDKIFDEVKRKAPRLYPMIWQGYRDFSILAWNADTIIESQTGIQQGDPLGPALFCLGISDLVSSLQSPFNVWYLDDAVLGGPANVVARDLQAILNFEEPGGLTLNAAKCEVLAVGGTSQDQAQAVQTIMEALPGISLVTQDNLDVLGSPVMPEGIPRALDAKRETLVKIRPRLTSMHPQVALCLWRHSLGSPRFVYLLRTCQTLKHMEGLAAYDETTRDILSEILNIDLEGNTWNRASLPIGNGGLGIRRATDLAAVCYAASLNQFSFLAESLIDEEAKIELQKAAIVADTTVRSQLDPGPLREHVSQNLLDACKTKKSARDIIDSLTSARERAVFLAAQHPFSGGWLQALPSCQLGTMLDPNSFRMVSALRIGAPVCQPFSCLRCGQPVDSDGLHPLSCLKSSGRITRHAELNAIVRRALRRAGIPSTPEPNGLNGSSELRPDGATIPLWSHGKSLVWDVTVSCTAALSYLHHSAVESGWVAERADSEKRRKYLELSRSYHFVPITLETLGPISSGTAKILKDIGKRIAEVTGDRREAMFLRQMMSLAVCRGNVASIIGAMN

SEQ ID NO: 2623 - protein, 979 aa, Dermanyssus gallinae
MTSQQYQNTRDATENDSEMALPLSQTPYVCNYCGQAVRSSKGLKIHITRKHPLAPCRNLRTIHNPGPSNDTANTSNTDTQPDAKLLVQVLSHARRNLRLARIIPRGAREICAIAYTTALSNFNTKLDLESWNNLMMLPSLMFTLPRQKNQEKTLTKIIKSNVAQIGSRTLQTLPDSITPSTIGKRFYITNDQHSVRQAEMKLAEGDIRSAARSLLSLDTLAPHDKHTEFELRSKHPVSPPGCQEQLDLLQQPATLDLDRVEGSLVFDTIRSFPFASGAGLDGLRPRHLRDMLSQTIPSSERLLTELGIFMARVLNGALPSFCQPVFYGASLTALRKKDNSIRPIACGLTLRRTASKIAMAMNKRAIVAAVSPHQMGVAIRGGAEATVHATRAFLEAEGPTKVLVKLDFRNAFNTIRRDRIFDEVKRKAPRLYPMIWQSYKDFSILAWNTDITIESQTGIQQGDPLGPALFCLGISDLVSSLQSPFNVWYLDDAVLGGPANAVARDLQTILNFEEPGGLTLNAAKCEVLAVGGTLQDQAQAIQEIMEALPGISCVTQGNLDVLGSPVMAEGIPRALDAKRETLVKIRPRLTNMHPQVALCLWRHSLGSPRFVYMLRTCQTLKYVEGLAAYDETIRSILSEVLNINLEGNTWKRASLPIDNGGLGIRRATDLAAVCYAASLNQFGSLAESLLDDEAKIELKKATAVADATIRSQLDPGPLREHVSQKLLDAYKTKKSAREIMNNLTSARERAVFLAALHPFSGGWLQALPSRQLGTMLDPNPFRMVSALRIGAPVCQPFTCLSCGQPVDSDGLHPLSCLKSPGRLTRHAELNAIVRRALRRAGIPSTPEPVGLNGSSELRPDGVTIPLWSHGKCLVWDVTVSCTAALSYLRHSAVETGWVAERADSEKRSKYLELSRSYHFAPIALETLGPISTGTAKLLQDIGKRIEDVTGDRREAMFLRQMMSLAVCRGNVASIIGAMN

SEQ ID NO: 2624 - protein, 976 aa, Dermanyssus gallinae
MTSQQYQNTRDATENDSEMALPLSQTPYVCNYCGQAVRSSKGLKIHITRKHPLAPCRNLRAIHNPGPSNDTANTSNTDTQPDAKLLVQVLSHARRNLRLARIIPRGAREICAIAYTTALSNFNTKLDLESWNNLMMLPSLMFTLPRQKIQEKTLTKIIKSNVAQIDSRTLQTLPDSITPSTIGKRFYITNDQHSVRQAEMKLAEGDIRSAARSLLSLDTLAPHTESELRSKHPVSPPGCQEQLDLLQQPATLDLDRVEGSLVFDTIRSFPFASGAGLDGLRPRHLRDMLSQTIPSSERLLTELGIFMARVLNGALPSFCQPVFYGASLTALRKKDNSIRPIACGLTLRRTASKIAMAMNKRAIVAAVSPHQMGVAIRGGAEATVHATRAFLEAEGPTKVLVKLDFQNAFNTIRRDRIFDEVKRKAPRLYPMIWQSYKDFSILAWNTDITIESQTGIQQGDPLGPALFCLGISDLVSSLQSPFNVWYLDDAVLGGPANAVARDLQTILNFEEPGGLTLNAAKCEVLAVGGTRQDQAQAIEEIMEALPGISCVTQGNLDVLGSPVMAEGIPRALDAKRETLVKIRPRLTNMHPQVALCLWRHSLGSPRFVYMLRTCQTLKYVEGLAAYDETIRSILSEVLNINLEGNTWERASLPIDNGGLGIRRATDLAAVCYAASLNQFGSLAESLLGDEAKMELKKATAVADATIRSQLDPGPLREHVSQKLLDAYKTKKSAREIMNNLTSARERAVFLAALHPFSGGWLQALPSRQLGTMLDPNPFRMVSVLRIGAPVCQPFTCLSCGQPVDSDGLHPLSCLKSPGRLTRHAELNAIVRRALRRAGIPSTPEPVGLNGSSELRPDGVTIPLWSHGKCLVWDVTVSCTAALSYLRHSAVETGWVAERADSEKRRKYLELSRSYHFTPIALETLGPISTGTAKLLQDIGKRIEDVTGDRREAMFLRQMMSLAVCRGNVASIIGAMN

SEQ ID NO: 2625 - protein, 982 aa, Dermanyssus gallinae
MTSQQYHNTRDATENDSEMALPLSQTPYVCNYCGRAVRSTKGLKIHITRKHSVAPCRSLRTDNNPGPNNQITITSNTDTQPDSKLLVQALSHARRSLRLARIIPRGAREVCTTAYTAALSNFNTKLDLESWNNLMMLPSLMFTLPHQKNQEKTLTKIIKSNVAEIDFRTLQSLADSTMATIPSTIGKKSHFTNDQYSVRQAEMKLAEGDIRSAARSLLSSDTLAPQNEHTESELRSKHPVSPPGCQEQLDLLQQPATLGLDKIEGPLVLETIRSFPCASGAGLDGLRPRHLRDMLSQTIPSSERLLEELGILMARVLNGALPSFCQSVFYGASLTALRKKDNSIRPIACGLTLRRMASKIAMAMNKRTIVAAVSPHQMGVAIRGGAEATVHATRAFLETKGPTKVLVKLDFQNAFNTIRRDKIFDEVKRKAPRLYPMIWQGYRDFSILAWNADTIIESQTGIQQGDPLGPALFCLGISDLVSSLQSPFNVWYLDDAVLGGPANVVARDLQAILNFEEPGGLTLNAAKCEVLAVGGTSQDQAQAVQTIMEALPGISLVTQDNLDVLGSPVMPAGIPRALDAKRETLVKIRPRLTRMHPQVALCLWRHSLGSPKFVYLLRTCQTLKHMEGLAAYDETTRDILSEILNIDLEGNTWNRASLPIGNGGLGIRRATDLAAVCYAASLNQFSFLAESLIDEDAKIELQKAAIVADTTVRSQLDPGPLREHVSQNLLDTCKTKKSARDITDSLTSARERAVFLAAQHPFSGGWLQALPSCQLGTMLDPNSFRMVSALRIGAPVCQPFSCLRCGQAVDSDGLHPLSCLKSSGRITRHAELNAIVRRALRRAGIPSTPEPSGLNGSSELRPDGVTIPLWSHGKSLVWDVTVSCTAALSYLHHSAVESGWVAERADSEKRRKYLELSRIYNFVPITLETLGPISSGTAKILKDIGKRIAEVTGDRREAMFLRQMMSLAVCRGNVASIIGAMN

SEQ ID NO: 2626 - protein, 975 aa, Dermanyssus gallinae
MTSQQSHNTSEFNDNDHTTASLSQTPYVCTQCGRCVRTSKGLKARLHSPTPSRSLPTGNSPGPDNLIPSTSDSDLQSDSTSLVRILTSARKNLRLARVIPRGARECCAAAYTKALSNFNSRLDLKSWNHLMMLPSLMFAIPRLKDQEVTLTKLIKRNVAEIDLRTLQGVADATALSTIDKIRHVDEDENSIRQAEMKLAEGDIRSAARALLSSDIIAPYDAHTESELRAKHPRSPPGCQERIELLQQPVALNLGKIDVLQVHEAVKSFPFTSGAGLDGLRPRHLRDMLDQTIPSSERLLNELSTFVTTVLNGTLPSFCLPIFYGASLTALRKKDNSIRSIACRLALRRMASKIAMAVNKNTIVTAVSPHQVGVAIRGGAEATVHATRAFLQAEGPTRVLVKLDFRNAFNTLRRDKMFDEVQKKAPRLLPMVWQGYRSASMLAWNTDVTIESRTGIQQGDPLGPALFCLGISDLVSSLQSPFNVSYLDDAILGGPADVVAKDVQTVLQFKETGGLTLNASKCEVTAIGGNAQEQEKSIQAIMQALPGIIRTTQENLDILGAPVMCEGIPRVLRAKRKALVKIRPRLTNMHPQAALCLWRHSLGSSRFNYLLRASPIFTYTEGLAAYDETTRDILGEVLNISLEENLWKRASLPIAFGGLGIRRSIDLAAVCYAALLNQFGSIAESLVNEDATIVLKKTTMLADATMRSQLDPGPLKEHVNQHFLDACKSKKSSRDIMDDLTSPRERAVFLAAQHPFSGGWLQALPSRQLGTMLDPNSFRMVSALRIGAPVCEPFSCLSCSQPVDSDGLHPLSCLKSPGRLTRHAELNAIVRRALRRAGIPSTPKPKGLYGSSELRPDGVTIPLWSHGKSLAWDVTVSCTAALSYLRHSAVESGWVAERADSEKRGKYLELSRRYHFVPIALETLGPISTGTAKILKDIGKRIEDITGDRREAMFLRQMMSLAVCRGNVASIIDAMN

SEQ ID NO: 2627 - protein, 961 aa, Dermanyssus gallinae
MALPLSQTPYVCNYCGQAVRSAKGLKMHITRKHPLAPCRSLRTIHNPGPSNDIANTLNTDTQPDAKLLVQVLSYARRNLRLARIIPRGAREVCAIAYTTALSNFNTKLDLESWNNLMMLPSLMFTLPRQKIQEKTLTKIIKSNVAQIGSRTLQTLPDSITPSTIGNRFHITNDQHSVRQAEMKLAEGDIRSAARSLLSLDTLAPHDKHTESELRSKHPVSPPGCQEQLDLLQQPATLDLDRVEGSLVFDTIRSFPFASGAGLDGLRPRHLRDMLSQAIPSSERLLTELGIFMARVLNGALPSFCQPVFYGANLTALRKKDNSIRPIACGLTLRRTASKIAMAMNKQAIVAAVSPHQMGVAIRGGAEATVHATRAFLEAEGPTKVLVKLDFRNAFNTIRRDRIFDEVKRKAPRLYPMIWQSYKDFSILAWNTDITIESQTGIQQGDPLGPALFCLGISDLVSSLQSPFNVWYLDDAVLGGPANAVARDLQTILNFEEPGGLTLNAAKCEVLAVGGTLQDQAQAIQEIMEALPGISCVTQGNLDVLGSPVMAEGIPRALDAKRETLVKIRPRLTNMHPQVALCLWRHSLGSPRFVYMLRTCQTLKYVEGLAAYDETIRSILSEVLNINLEGNTWERASLPIDNGGLGIRRATDLAAVCYAASLNQFGSLAESLLGEEAKIELKKATALADATIRSQLDPGSLREHVSQKLLDAYKTKKSAREIMNNLTSARERAVFLAAQHPFSGGWLQALPSRQLGTMLDPNPFRMVSALRIGAPVCQPFTCLSCGQPVDSDGLHPLSCPKSPGRLTRHAELNAIVRRALRRAGIPSTPEPVGLNGSSELRPDGVTIPLWSHGKCLVWDVTVSCTAALSYLRHSAVETGWVAERADSEKRRKYLELSRSYHFAPIALETLGPISTGTAKLLQDIGKRIEDVTGDRREAMFLRQMMSLAVCRGNVASIIGAMN

SEQ ID NO: 2628 - protein, 979 aa, Dermanyssus gallinae
MTSQQSHNTSEFNDNDHTTASLSQTPYVCTQCGRCVRTSKGLKAHITRLHSPTPSRSLPTGNSPGPDNLIPFTSDFDLQSDSTSLVRILTSARKNLRLARVIPRGARECCAAAAYTKAFSNFNSRLDLKSWNHLMMLPSLMFAIPRLKDQEVTLTKLIKRNVAEIDLRTLQGVADATALSTIDKIRHVDEDENSIRQAEMKLAEGDIRSAARALLSSDIIAPYDAHTESELRAKHPRSPPGCQERIELLQQPVALNLGKIDVLQVHEAVKSFPFTSGAGLDGLRPRHLRDMLDQTIPSSERLLNELSTFVTTVLNGTLPSFCLPIFYGASLTALRKKITQLDPLRADWPYEEWLLKLAMAVNKNTIVTAVSPHQVGVAIRGGAEATVHATRAFLQAEGPTRVLVKLDFRNAFNTLRRDKMFDEVQKKAPRRLPMVWQGYRSASMLAWNTDVTIESRTGIQQGDPLGPALFCLGISDLVSSLQSPFNVWYLDDAILGGPADVVAKDVQTVLQFEETGGLTLNASKCEVTAIGGNAQEQEKSIQAIMQALPGIIRTTQEDLDILGAPVMCEGIPRVLRAKRKALVKIRPRLTNMHPQAALCLWRHSLGTSRFNYLLRASPTFTYTEGLAAYDETTRDILGEVLNISLEENLWKRASLPIAFGGLGIRRSIDLAAVCYAASLNQFGSIAESLVNEDATIVLKKTTMLADATMRSQLDPGPLKEHVNQHFLDACKSKKSSRDIMDDLTSPRERAVFLAAQHPFSGGWLQALPSRQLGTMLDPNSFRMVSALRIGAPVCEPFSRLSCSQPVDSDGLHPLSCLKSPGRLTRHAELNAIVRRALRRAGIPSTPEPKGLYGSSELRPDGVTIPLWSHGKSLAWDVTVSCTAALSYLRHSAVESGWVAERADSEKRGKYLELSRRYHFVPIALETLGPISTGTAKILKDIGKRIGDITGDRREAMFLRQMMCLAVCRGNVASIIGAMN

SEQ ID NO: 2629 - protein, 979 aa, Dermanyssus gallinae
MTSQQYHNTRDATENDSEMALPLSQTPYVCNYCGRAVRSSKGLKIHITRKHSVAPCRSLRTDNNPGPNNQITITSNTDTQSDSKLLVQALSHARRSLRLARIIPRGAREVCTTAYTAALSNFNTKLDLESWNNLMMLPSLMFTLPHQKNQEKTLTKIIKSNVAEIDFRTLQSLANSTIPSTIGKKSHFTNDQYSVRQAEMKLAEGDIRSAARSLLSSDTLAPQNEHTESELRSKHPVSPPGCQEQLDLLQQPATLGLDKIEGPLVLETIRSFPCASGAGLDGLRPRHLRDMLSQTIPSSERLLEELGILMARVLNGALPSFCQSVFYGASLTALRKKDNSIRPIACGLTLRRMASKIAMAMNKRTIVAAVSPHQMGVAIRGGAEATVHATRAFLETKGPTKVLVKLDFQNAFNTIRRDNIFDEVKRKAPRLYPMIWQGYRDFSILAWNADTIIESQTGIQQGDPLGPALFCLGISDLVSSLQSPFNVWYLDDAVLGGPANVVARDLQAILNFEEPGGLTLNAAKCEVLAVGGTSQDQAQAVQTIMESLPGISFVTQDNLDVLGSPVMPEGIPRALDAKRETLVKIRPRLTSMHPQVALCLWRHSLGSPRFVYLLRTCQTLKHMEGLAAYDETTRDILSEILNIDLEGNTWNRASLPIGNGGLGIRRATDLAAVCYAASLNQFSFLAESLIDEEAKIELQKAAIVADTTVRSQLDPGPLREHVSQNLLDACKTKKSARDITDSLTSARERAVFLAAQHPFSGGWLQALPSCQLGTMLDPNCFRMVSALRIGAPVCQPFSCLRCGQPVDSDGLHPLSCLKSSGRITRHAELNAIVRRALRRAGIPSTPEPNGLNGSSELRPDGVTIPLWSHGKSLVWDVTVSCTAALSYLHHSAVESGWVAERADSEKRRKYLELSRSYHFVPITLETLGPISSGTAKILKDIGKRIAEVTGDRREAMFLRQMMSLAVCRGNVASIIGAMN

SEQ ID NO: 2630 - protein, 979 aa, Dermanyssus gallinae
MTSQQYQNTQDATENDSEMALPLSQTPYVCNYCGQAVRSAKGLKMHITRKHPLAPCRSLRTNHNPGPSNDIANTLNTDTQPDAKLLVQVLSHARRNLRLARIIPRGAREVCAIAYTTALSNFNTKLDLESWNNLMMLPSLMFTLPRQKIQEKTLTKIIKSNVAQIGSRTLQTLPDSITPSTIGNRFHITNDQHSVRQAEMKLAEGDIRSAARSLLSLDTLAPHDKHTESELRSKHPVSPPGCQEQLDLLQQPATLDLDRVEGSLVFDTIRSFPFASGAGLDGLRPRHLRDMLSQAIPSSERLLTELGIFMARVLNGALPSFCQPVFYGASLTALRKKDNSIRPIACGLTLRRTASKIAMAMNKQAIVAAVSPHQMGVAIRGGAEATVHATRAFLEAEGPTKVLVKLDFRNAFNTIRRDRIFDEVKRKAPRLYPMIWQSYKDFSILAWNTDITIESQTGIQQGDPLGPALFCLGISDLVSSLQSPFNVWYLDDAVLGGPANAVARDLQTILNFEEPGGLTLNAAKCEVLAVGGTLQDQAQAIQEIMEALPGISCVTQGNLDVLGSPVMAEGIPRALDAKRETLVKIRPRLTNMHPQVALCLWRHSLGSPRFVYMLRTCQTLKYVEGLAAYDETIRSILSEVLNINLEGNTWERASLPIDNGGLGIRRATDLAAVCYAASLNQFGSLAESLLGEEAKIELKKATALADATIRSQLDPGPLREHVSQKLLDAYKTKKSAREIMNNLTSARERAVFLAAQHPFSGGWLQALPSRQLGTMLDPNPFRMVSALRIGAPVCQPFTCLSCGQPVDSDGLHPLSCPKSPGRLTRHAELNAIVRRALRRAGIPSTPEPVGLNGSSELRPDGVTIPLWSHGKCLVWDVTVSCTAALSYLRHSAVETGWVAERADSEKRRKYLELSRSYHFAPIALETLGPISTGTAKLLQDIGKRIEDVTGDRREAMFLRQMMSLAVCRGNVASIIGAMN

SEQ ID NO: 2631 - protein, 979 aa, Dermanyssus gallinae
MTSQQYQNTRDATENDSEMALPLSQTPHVCKYCGRAVRSSKGLKIHITRKHSVAPCRSLRTDNMPGPNNQITITSNTDTQPDSKLLVQALSHARRSLRLARIIPRGAREVCTTAYTAALSNFNTKLDLESWNNLMVLPSLMFTLPHQKNQEKTLTKIIKSNVAEIDFRTLQSLADSTIPSTIGKRSHFTNDQYSVRQAEMKLAEGDIRSAARSLLSSDTLALQNEHTESELRSKHPVSPPGCQEQLDLLQKPATLGLDKIEGPLVLETIRSFPFASGAGLDGLRPRHLRDMLSQTIPYSERLLEELGILMARVLNGALPSFCQPVFYGASLTALRKKDNSIRPIACGLTLRRMASKIAMAMNKRTIVAAVSPHQMGVAIRGGAEATVHATRAFLETKGPTKVLVKLDFQNAFNTIRRDKMFDEVKRKAPRLYPMTWQGYRDFSILAWNADTIIESQTGIQQGDPLGPALFCLGISDLVSSLQSPFNVWYLDDAVLGGPANVVARDLQAILNFEEPGGLTLNAAKCEVLAVGGTSEDQAQAIQTIMEALPGISRVTQENLDVLGSPVMPEGIPRALDAKRETLVKTRPRLTSMHPQVALCLWRHSLGSPRFVYLLRTCQTLKHMEGLAAYDETTRDILSEILNIDLEGNTWNRASLPIGNGGLGIRRATDLAAVCYAASLNQFSFLAESLIDEEAKIELQKAAIVADTTVRSQLDPGPLREHVSQNLLDACKTKKSARDITDSLTSARERAVFLAAQHPFSGGWLQALPSCQLGTMLDPNSFRMVSALRIGAPVCQSFSCLRCGQPVDTDGLHPLSCLKSSGRITRHAELNAIVRRALRRAGIPSTPEPNGLNGSSELRPDGVTIPLWSHGKSLVWDVTVSCTAALSYLHHSAVESGWVAERADSEKRRKYLELSRSYHFVPITLETLGPISLGTAKILKDIGKRIAEVTGDRREAMFLRQMMSLAVCRGNVASIIGAMN

SEQ ID NO: 2632 - protein, 973 aa, Dermanyssus gallinae
MTSQQHHNTRGATENDSEMALPLSQTPYVCNYCGRAVRSSKGLKIHITRKHSVARCRSLRTDNNPGPNNQITITSNTDTQPDSKLLVQALSHARRSLRLARIIPRGAREVCTTAYTAALSNFNTKLDLESWNNLMMLPSLMFTLPHQKNQEKTLTKIIKSNVAEIDFRTLQSLADSTIPSTIGKKSHFTNDQYSVRQAEMKLAEGDIRSAARSLLSSDTLAPQNEHTESELRNKHPVSPPGCQEQLDLLQQPATLGLDKIEGPLVLETIRSFPCASGAGLDGLRPRHLRDMLSQTIPSSERLLEELGILMARVLNGALPSFCQSVFYGASLTALRKKDNSIRPIACGLTLRRMASKIAMAMNKRTIVAAVSPHQMGVAIRGGAEATVHATRAFLETKGPTKVLVKLDFQNAFNTIRRDKIFDEVKRKAPRLYPMIWQGYRDFSILAWNTDTIIESQTGIQQGDPLGPALFCLGISDLVSSLQSPFNIWYLDDAVLGGPANVVARDLQAILNFEEPGGLTLNAAKCEVLAVGGTSQDQAQAVQTIMEALPGISLVTQDNLDVLGSPVMPEGIPRALDAKRETLVKIRPRLTSMHPQVALCLWRHSLGSPRFVYLLRTCQTLKHMEGLAAYDETTRDILSEILNIDLEGNTWNRASLPIGNGGLGIRRATDLAAVCYAASLNQFSFLAESLIDEEAKIELQKAAVVADTTVRSQLDPGPLREHVSQNLLDACKTKKSARDITDSLTSIRERAVFLAAQHPFSGGWLQALPSCQLGTMLDPNSFRMVSALRIGAPVCQPFSCLRCGQPVDSDGLHPLSCLKSSGRITRHAELNAIVRRALRRAGIPSTPEPNGLNGSSELRPDGVTIPLWSHGKSLVWDVTVSCTAALSYLHHSAVELGWVAERADSEKRRKYLELSRSYHFVPITLETLGPISSVQEIILLLLLLLLLLLLILHLAWAGISVLPRYSLSLTVIHC

SEQ ID NO: 2633 - protein, 979 aa, Dermanyssus gallinae
MTSQQYHNTRDATENDSEMALPLSQTPYVCNYCGRAVRSSKGLKIHITRKHSVAPCRSLRTDNNPGPNNQITITSNTDTQSDSKLLVQALSHARRSLRLARIIPRGAREVCTTAYTAALSNFNTKLDLESWNNLMMLPSLMFTLPHQKNQEKTLTKIIKSNVAEIDFRTLQSLADSTIPSTIGKKSHFTNDQYSVRQAEMKLAEGDIRSAARSLLSSDTLAPQNEHTESELRSKHPVSPPGCQEQLDLLQQPATLGLDKIEGPLVLETIRSFPCASGAGLDGLRPRHLRDMLSQTIPSSERLLEELGILMARVLNGALPSFCQSVFYGASLTALRKKDNSIRPIACGLTLRRMASKIAMAMNKRTIVAAVSPHQMGVAIRGGADATVHATRAFLETKGPTKVLVKLDFQNAFNTIRRDKIFDEVKRNAPRLYPMIWQGYRDFSILAWNADTIIESQTGIQQGDPLGPALFCLGISDLVSSLQSPFNVWYLDDAVLGGPANVVARALQTILNFEEPGGLTLNAAKCEVLAVGGTSQDQAQAVQTIMEALPGISLVTQDNLDVLGSPVMPEGIPRALDAKRETLVKIRPRLTSMHPQVALCLWRHSLGSPRFVYLLRTCQTLKHMEGLAAYDETTRDILSEILNIDLEGNTWNRASLPIGNGGLGIRRATDLAAVCYAASLNQFSFLAESLIDEEAKIELQKAAIVADTTVRSQLDPGPLREHVSQNLLDACKTKKSARDITDSLTSARERAVFLAAQHPFSGGWLQALPSCQLGTMLDPNSFRMVSALRIGAPVCQPFSCLRCGQPVDSDGLHPLSCLKSSGRITRHAELNAIVRRALRRAGIPSTPEPNGLNGSSELRPDGVTIPLWSHGKSLVWDGTVSCTAALSYLHHSAVESGWVAERADSEKRRKYLELSRSYHFVPITLETLGPISSGTAKILKDIGKRIAEVTGDRREAMFLRQMMSLAVCRGNVASIIGAMN

SEQ ID NO: 2634 - protein, 978 aa, Dermanyssus gallinae
MTSQQHHNTRDATENDSEMALPLSQTPYVCNYCGRAVRSSKGLKIHITRKHSVASCRSLRMDNNPGPNNQITISSNTDTQPDSKLLVQALSHARRSLRLARIIPRGAREVGTTAYTAALSNFNTKLDLKSWNNLMMLPSLMFTLPHQKNQEKTLTKIIKSNVAEIDFRTLQSLADSTIPSTIGKKSHFTNDQYSVRQAEMKLAEGDIRSAARSLLSSDTLAPQNEHTESELRSKHPISPPGCQEQLDLLQQPATLGLDKIEGPLVLETIRSFSCASGAGLDGLRPRHLRDMLSQTIPSSERLLEELGILMARVLNGALPSFCQSVFYGASLTALRKKDNSIRPIACGLTLRRMASKIAMAMNKRTIVAAVSPHQMGVAIRGGAEATVHATRAFLETKGPTKVLVKLDFQNAFNTIRRDKIFDEVNRKAPRLYPMIWQGYRDFSILAWNADTIIESQTGIQQGDPLGPALFCLGISDLVSSLQSPFNICYLDAVLGGPANVVAKDLQAILNFEEPGGLTLNAAKCEVLAVRGTSQDQAQAVQTIMEALPGISLVTQDNLDVFGSPVMPEGIPRALDAKRETLVKIRPRLTSMHPQVALCLWRLSLGSPRFVYLLRTCQTLKHMEGLAAYDETTRDILSEILNIDLEGNTWNRASLPIGNGGLGIRRATDLAAVCYAASLNQFSFLAESLIDEEAKIELQKAAIVADTTVRSQLDPGPLREHVSQNLLDACKTKKSARDITDSLTSARERAVFLAAQHPFSGGWLQALPSCQLGTMLDPNSFRMVSALRIGAPVCQPFSCLRCGQPVDSDGLHPLSCLKSSGRITRHAELNAIVRRALRRAGIPSTPEPNGLNGSSELRPDGVTIPLWSHGKSLVWDVTVSCTAALSYLHHSAVESGWVAERADSEKRRKYLELSRSYHFVPITLETLGPISSGTAKILKDIGKRIAEVTGDRREAMFLRQMMSLAVCRGNVASIIGAMN

SEQ ID NO: 2635 - protein, 977 aa, Dermanyssus gallinae
MTSQQYHNTRDATENDSEMALPLSQTPYVCNYCGRAVRSSKGLKIHITRKHSVAPCRSLRTDNIPGPNNQITITSNTDTQPDSKLLVQALSHARRSLRLARIIPRGAREVCTTAYTAALSNFNTKLDLESWNNLMMLPSLMFTLPHQKNQEKTLTKIIKSNVAEIDFRTLQSLADSTIPSTIGKKSHFTNDQYSVRQAEMKLAEGDIRSAARSLLSSDTLAPQNEHTESELRSKHPVSPPGCQEQLDLLQQPATLGLDKIEGPLVLETIRSFPCASGAGLDGLRPRHLRDMLSQTIPSSERLLEELGILMARVLNGALPSFCQSVFYGASLTALRKKDNSIRPIACGLTLRRMASKIAMAMNKRTIVAAVSPHQMGVAIRGGAEATVHATRAFLETKGPTKVLVKLDFQNAFNTIRRDKIFDEVKRKAPRLYPMIWQGYRDFSILAWNADTIIESQTGIQQGDPLGPALFCLGISDLVSSLQSPFWYLDDAVLGGPANVVARDLQAILNFEEPGGLTLNAAKCEVLAVGGTSQDQAQAVQTIMEALPGISLVTQDNLDVLGSPVMPEGIPRALDAKRETLVKIRPRLTSMHPQVALCLWRHSLGSPRFVYLLRTCQTLKHMEGLAAYDETTRDILSEILNIDLEGNTWNRASLPIGNGGVGIRRATDLAAVCYAASLNQFSFLAESLIDEEAKIELQKAAIVADTTVRSQLDPGPLREHVSQNLLDACKTKKSARDITDSLTSARERAVFLAAQHPFSGGWLQALPSCQLGTMLDPNSFRMVSALRIGAPVCQPFSCLRCGQPVDSDGLHPLSCLKSSGRITRHAELNAIVRRALRRAGIPSTPEPNGLNGSSELRPDGVTIPLWSHGKSLVWDVTVSCTAALSYLHHSAVESGWVAERADSEKRRKYLELSRSYHFVPITLETLGPISSGTAKILKDIGKRIAEVTGDRREAMFLRQMMSLAVCRGNVASIIGAMN

SEQ ID NO: 2636 - protein, 967 aa, Dermanyssus gallinae
MTSQQYQNTRGATENDSEMALPLSQTPYVCNYCGQAVRSSKGLKMHITRKHPLAPCRSLRTNHNPGPSNDIANTLNTDTQPDAKLLVQVLSHARRNLRLARIIPRGAREVCAIAYTTALSNFNTKLDLESWNNLMMLPSLMFTLPRQKNQEKTLTKIIKSNVAQIGSRTLQTLPDSITPSTIGNRFHITNDQHSVRQAEIKLAEGDIRSAARSLLSLDTLAPHDKHTESELRSKHPVSPPGCQEQLDLLQRPATLDLDRVEGSLVFDTIRSFPFASGAGLDGLRPRHLRDMLSQTIPSSERLLTELGIFMARVLNGALPSFCQPVFYGASLTALRKKDNSIRPIACGLTLRRTASKIAMAMNKRAIVAAVSPHQMGVAIRGGAEATVHATRAFLEAEGPTKVLVKLDFRNAFNTIRRDRIFDEVKRKAPRLYPMIWQSYKDFSILAWNTDITIESQTGIQQGDPLGPALFCLGISDLVSSLQSPFNVWYLDDAVLGGPANAVARDLQTILNFEEPGGLTLNAAKCEVLAVGGTLQDQAQAIQEIMEALPGISCVTQGNLDVLGSPVMAEGIPRALDAKRETLVKIRPRLTNMHPQVALCLWRHSLGSPRFVYMLRTCQTLKYVEGLAAYDETIRSILSEVLNINLEGNTWERASLPIDNGGLGIRRATDLAAVCYAASLNQFGSLAESLLGEEAKIELKKATALADATIRSQLDPGPLREHVSQKLLDAYKTKKSAREIMNNLTSARERGWLQALPSRQLGTMLDPNPFRMVSALRIGAPVCQPFTCLSCGQPVDSDGLHPLSCPKSPGRLTRHAELNAIVRRALRRAGIPSTSEPVGLNGSSELRPDGVTIPLWSHGKCLVWDVTVSCTAALSYLRHSAVETGWVAERADSEKRRKYLELSRSYHFAPIALETLGPISTGTAKLLQDIGKRIEDVTGDRREAMFLRQMMSLAVCRGNVASIIGAMN

SEQ ID NO: 2637 - protein, 927 aa, Dermanyssus gallinae
MEDRSSTSNLAMPHPGAGGIEVAPTTGTLATSEELAGHIQNTMRHARLVRVLPKAVRASVADELTKVLLKIALNNDIEAWHSLFSFAPVVLALPQIRNDTRSLTVIIKKNLRDFSQGLRIENIVHHETRTTTRRDPEDEICRRAIVKLSEGDVTGAARLIGSTDTFICQSESLESLRDKHPQAPSDLCLPSRPPTMLPSTTSSDEVRLAVKSFPRSSAAGLDFLRPRLLQDLLSAVLGSVADRLADALAKVVDILRWGSPPIALQPIIFGARLFALKKKDGSIRPIACSSTLRRLASKIGCAANKAEILSAIGHYQLGFATTGGTEIGIHTSRAFINSRSSPTVLVKLDFRNAFNSVRRDHLLNAVKCYAPQMFHQVHAAYAQPSHLVLPHATISSQSGLQQGDPLGPPLFCLCVKDLIDSLQSPLNAWYLDDGVLGGDLATVVGDIHRVLDFERVSGLSLNPGKCEVYITGPEDMISPNISELCHLLPGCKIVQKSDIELLGVPLCQEGLPGALDAWREKLEVAASRLPSLGSHRGMYLLRSCFSAARITHLLRGANCFDSTENLRAFNEWTLKTLELLLNVRLSPDAGLQALLPISLGGLGMPDAVALAGPAIVSSMSQALEKAKRLLDDTGQSVYDHTLAGLLERLASLCGAIPADTLSQKGWSNPLQEKTFAHLLEQAPTMTDKARLRAVSSKSAGAWLQALPSAQLGTLLDDETVRISAGLRLGTALVIPHQCKCGDQVGPQAHHGLSCALSSSRRARHAALNETFSRALRSAGFPCILEPPGLCRNDGKRPDGLTLTSFEMGRMLVWDATVTDSLAPSMVSAGAEHAGHASMLAEANKCRKYASITYLHDFRPLAFETLGGPGPKTHKLIQRVGKALNRSTGDHRAVEYLHQKLSLDIQRGNAASVRGTLLDWTRPNLEDM

SEQ ID NO: 2638 - protein, 962 aa, Dermanyssus gallinae
MEDRNSTSNLAMPRNVSSDAEQDLNRVACPVCNNIYTRRGLSRHMAARHPGVGGIEVAPTTGTLATSKELVGHIQNTMRHARLVRVLPKAVRASVADELTKVLLKVAFNNDIEAWHSLFSFASVVLALPQIRNDTRSLTVIIKKNLRDFSQGLRIENIVHHETRTTTRRDPEDKICRRAIVKLSEGDVTGAARLIGSTDTFICQSESLESLRDKHPQAPSDLCLPSRLPTMLPSTTSSDEVRLAVRSFPRSSAAGLDFLRPRLLQDLLSAVLGSVADRLADALAKVVDILRWGSPPIALQPIIFGARLFALKKKDGSIRPIACSSTLRRLASKIGCAANKAEILLAIGHHQLGFATTGGTEIGIHTFRAFINSRSSPTVLVKLDFRNAFNSVRRDHLLNAVKSYAPQMFQQVHAAYAQPSHLVLPHATISSQSGLQQGDPLGPPLFCLCVKDLIDSLQSPLNAWYLDDGVLGGDLATVVGDNHRVLDFERVSGLSLNPGKCEVYITGPEDMISPDISELCHLLPGCKVVQKSDIELLGAPLCQEGLPGALDAWREELEVAASRLPSLGSHRGMYLLRSCFSAARITHLLRGANCFDSTENLRAFNEWTLKTLELLLNVRLSPDAGLQALLPISLGGLGMPDAVALAGPAIVSSMSQALEKAKRLLDDTGQSVYDHTLAGLLERLASLCGAIPTDTLSQKGWSTPLQEKTFAHLLKQAPTTTDKARLRAVSSKSAGAWLQALPSAQLGTLLDDETVRISAGLRLGTALVIPHQCKCGDQVGSQAHHGLSCALSSGRRARHAALNETFSRALRSAGFLCILEPPGLCRNDGKRPDGLTLTSFEMGRMLVWDATVTDSLAPSMVSAGAEHAGHASMLAEANKCRKYASITYPHDFRPLAFETLGGPGPKTHKLIQRVGKALNRSSGDHRAVEYLHQRLSLDIQRGNAASVRGTLLDWTRPNLEDM

SEQ ID NO: 2639 - protein, 962 aa, Dermanyssus gallinae
MEDRSSTSNLAMRRNVPSDAEQDLNRVACSVCNNIYTRRGLSRHMSARHPGVGDIEVAPTTSTLATSEELVGHIQNTMRHARLVRVLPKAVRASVADELTKVLLKVALNNDIEAWHSLFSFAPVVLALPQIRNDTRSLTVIIKKNLRDFSQGLSIENIVHHKTRTTTRRDPEDEICRRAIVNLYEGDVTGAARLIGSTDTFICQSESLESLRDKHPQAPSDLCLPSRPPTMLPSTTSSDEVRLAVRSFPRSSAAGLDFLRPRLLQDLLSAVLGSVADRLADALAKVVDILRWGSPPITLQPSIFGARLFALKKKDGSIRPIACSSTLRRLASKVGCAANKAELLSAIGHHQLGFATTGGTEIGIHTSRAFINSRSSPTVLVKLDFRNAFNSVRRDHLLNAVKCYAPQMFHQVHAAYAQPSHLVLPHATISSQSGLQQGDPLGPPLFCLCVKDLIDSLQSPLNAWYLDDGVLGGDLATVVGDIHRVLDFETVSGLSLNPGKCEVYITGPEDMISPDISELCHLLPGCKVVQKSDIELLGVPLCQEGLPGALDAWREKLEVAASRLPSLGSHRGMYLLRSCFSAARITHLLRGANCFDSTENLRAFNEWTLKTLELLLKVRLSPDAGLQALLPISLGGLGMPDAVALAGPAIVSSMSQALEKAKRLLDDTGQSVYDHTLVGLLEKLASLCGAIPTDTLSQKGWSTPLQEKTFAHLLEQAPTTTDKARLRAVSSKSAGAWLQAFPSAQLGTLLDDETLRISAGLRLGTALVIPHQCKCGDQVGPQAHHGLSCALSSGRRARHAALNETFSRALKSAGFPCILEPPGLCGNDGKRPDGLTLTSFEMGRMLVWDATVTDSLAPSMVSAGAEHAGHASMLAEANKCRKYASITYPHDFRPLAFETLGGPGPKTHKLIQHVGKALNRSTGDTRAVEYLHQRLSLGIQRGNAASVRGTLLDWTRLNLEDM

SEQ ID NO: 2640 - protein, 962 aa, Dermanyssus gallinae
MEDYSSTINLAMPQNVLDDSGEDPNRVACPVRNNRYTRRGLSRHMSARHPGVRGIEVTPTTGVSATSEELIGHIQNAMRHARLVRVLPKAVRTSVADELTKVLLKVASDNDMEAWHSLFSFAPVVLRLPRIRNDSRSLTVIIKKNLRDFVQGVRIKNVEHDEARTNTRRDPEDEICRRAIVKLSEGDVSGAARLIGSTDTFISQSESLESLRDKHPQAPSDLCLPSRPPIILPSTTSSDEVRLAVRSFPRSSAAGLDFLRPRLLQDLLSAVLGSVADRLADALAKVVDILRWGSPPVALQPIIFGARLFALKKKDGSLRPIACSSTLRRLASKIGCAANKAEILSTIGSHQLGFATTGGTEIGIHTSRAFINSRSGPTVLVKLDFRNAFNSVRRDHLLNVVKCYAPQMFHQVHAAYAQPSHLVLPHATISSQSGLQQGDPLGPPLFCLCVKDLIDSLQCPLNAWYLDDGVLGGDLATVIGDIRRVRDFERVSGLSLNPAKCEVCVTGPEDMILPDISELCHLLPGCKVVQKSDIELLGVPLCQEGLPGALDAWREKLEVAASRLPSLGSHRGIFLLRSCFSAARITHLLRGANCFDLTENLRQFNEWTLKTLEVLLNIRLSPNAGMQALLPISLGGLGMPDAVALAGPAIVSSMSQASGKAKRLLDDTGKRVYNHTLAALVERLASLCGVIPTDTLSQKSWSSPLQEKTFVHLLEQAPTTTDKARLRAVSAKSAGAWLQALPSVHLGTLLDDDTVRISAGLRLGTALVFPHQCRCGDQVGPQAHHGLSCALSSGRRARHAALNGTFSRALRSAGFPCILEPPGLCRNDGKRPDGLTLTSFEMGRMLVWDATVTDSLAPSMVSAGAEHAGHASMLAEANKCRKYASISYPHDFRPLAFETLGGPGPKTHKLIQRVGKALNRSTGDTRAIEYLHQRLSLDIQRGNAASVRGTLLDWTRPNLEDM

SEQ ID NO: 2641 - protein, 962 aa, Dermanyssus gallinae
MEDRSSTSKLAMPRNVSSDAEQDLNRVACPVCNNIYTRRGLIRHMSARHPGVGGIEVAPTTGTLATSEELVGHIQNTMRHARLVRVLPKAVRASVADELTKVLLKVALNNDIETWHSLFSFAPMVLALPQIRNDTRSFTVIIKKNLRDFSQGLRIENIVHHETRATTRRGPEDEICKRAIVKLSEGDVTGAARLIGSTDTFICQSESLESLRDKHPQAPSDLCLPSRPPTMLPSTTSSDEVRLAVRSFPRSSAAGLDFLRPRLLQDLLSAVLGSIADRLADALAKVVDILRWGSPPIALQSIIFGARLFALKKKDGSIRPIACSSTLRRLASKIGCAANKAEILSAIGDHQLGFATTGETEIGIHTSRAFINSRSSPTVLVKLDFRNAFNSVRRYHLLNAVKRYAPQMFHQVHAAYAQPSHLVLPHATIYSQSGLQQGVPLGPPLFCLCVKNLIDSLQRPLNAWYLDDGVLRGDLATVVGDIHRVLDFERVNGLSLNPGKCEVYITGPEDMISPDILELCHLLPGCKVVQKSDIELLGVPLCQEGLPGALDAWREKLEVAASRLPSLGSYRGMYLLRSCFSAARITHLLRGANCFDSTENLRAFNEWALKTLELLLNVRLSPDAGLPALLPISLGGLGMPDAVALAGPAIVSSMSQALEKAKRLLDDTGQSVYDHTLAGLLERLASLCGAIPTDTLSQKGWSTPLQEKTFAHLLEQAPTTTDKARLRAVFSKSAGAWLQALPSAQLGTLLDDETVRIIAGLRLGTALVIPHQCKCGDQVGPQVHHGLSCALSSGRRARHAALNETFSRALRSAGFPCILEPPGLCRNDGKRPDGLTLTSFEMGRMLVLDATVTDSLAPSMVSAGAEHAGHASMLAEANKCRKYASITYPHDFRPLAFETLGGPGPKTHKLIQRVGKALNRSTGDPRAVESLHQRLSLDIHRGNAASVRGTLLDKTRPNLEDM

SEQ ID NO: 2642 - protein, 951 aa, Dermanyssus gallinae
MEDRSSTSNQAMPRNVSGDAEQDLNRVACPVCNNVYTRRGLSRHMSARHPDAGGIEVAATTGTLATSKELVGHIQNTMRHARLVRVLPKPVRASVADELTKVLFKVALNNDIEAWHSLFSFAPVMLALPQVRNDTRSLTVIIKKNLRDFSQGLKIENIVHNETRTTTRRDPEDEICRRAIVKLSKGDVTGAARIIGSTDTFICQSENLESLRDKHLQAPSDICLPSRPPTMQPSTTSSDEVRLAVRSFLRSSAAGLDFLRPRLLQDLLSAVLGSVAETLADALAKVVDILRWGSPPIALQPIILGARLFALKKRNGSKCPIACSSTLRRLALKIGCVANKAEILSAIDHHQLGFATTGGTEIGIHTSRAFINSRSSSTVLVKLDFRNAFNSARRDHLLNAEKCYAPQMFHQVHAAYAQPSHLVLPHATISSQSGLQQGDPLGPPLFCLCVKDLIDSLQCPPNAWYLEDGVLGGDLATVVGDFHRVLDFERVSGLSLNPGKCEVYITGPEDMISPDISELCHLLPGCKVVQKSDIELLGVPLCQEGLPGALGAWREMLEVAASRLPSLGSHRGMYLLRSCFSAARIIHLLRGANCFDLTENLRVFNEWTLKTLKLLLNVRLSPDASLQALLPISLGGLGMPDAITLAGGAIVSSMSQALEKAKRLLDDTGQSVYDHTLAGLLERLAFLCGAIPTDTLYQKGWSTPLLEKTFTHLLEQAPTTIDKARLRAVSSKSAAAWLQALPSAKLGTLLDDETVRISAGLRLGTALVIPHQCRCSDQVGPQAHHGLSCALSSGRRARHAALNETFSRALRSAGFPCILEPPGLCRNDGKRPDGLTLTSFETGRMLVWDATVTDSLAPSMVSAGAEHAGHASMLAEANKCRKYASITYPHDFRSLAFKTLGDLARRRIKLFNVSARRSIVRQETLELSSTCTRDYRWTFSGVTPPPCVELC

SEQ ID NO: 2643 - protein, 732 aa, Dermanyssus gallinae
MLPSTTSSDEVRLAVRSFPRSSAAGLDFLRPRLLQDLLSAVLGSVADRLADALAKVVDILRWGSAPITLQPIIFGARLFALKKKDGSIRPIACSSTLRRLASKIGCAANKAEILSAIGHHQLGFATTGGTEIGIHTSRAFINFRSSPTVLVKLDFRNAFNSVRRDHLLNAVKCYVPQMFHQVHAAYAQPSHLVLPQATISSQSGLQQGDPLGPPLFCLCVEDLIDSLQSPLNAWYLDDGVLGGDLATVVGDIHRVLDFERVSGLSLNPGKCEVYITGPEDMISPDISELCHLLPGCKVVQKSDIELLGVPFCQEGLPGALDAWREKLEVAASRLPSLGSHRGMYLLRSCFSAARITHLLRGANCFDSTENLRAFNEWTLKTLELLLNVRLSPDAGLQALLPISLGGLGMPDAVALAGPAIVSSMSQALEMAKRLLDDTDQSVYDHTLAGLLERLASLGGAIPTDTLSQKGWSTPLQEKTLAHLLEQAPTTTDKARLRAVSSKSAGVWLQALPSAQLGTLLDDETVRISAGLRLGTALVIPHQCKCGDQVGPQAHHGLSCALSSGRRARHAALNETFSRALRSAGFPCILEPPGLCRNDGKRPDGLTLTSFEMGRMLVWDATVTDSLAPSMVSAGAEHAGHASMLAEANKCRKYASITYPHDFRPLAFETLGGPGPKTHKLIQRVGKALNRSTGDTRAVEYLHQRLSLDIQRGNAASVRGTLLDWTRPNLEDM

SEQ ID NO: 2644 - protein, 951 aa, Dermanyssus gallinae
MEDYSSTINLAMPQNVSDDSGEDPNRVACPVCNNRYTRRGLSRHMSARHPGVRGIEVTPTTGVSATSEELIGHIQNAMRHARLVRVLPKAVRASVADELTKVLLKVASDNDMEAWHSLFSFAPVVLRLPRIRNDSRSLTVIIKKNLRDFVQGVRIENVEHHEARTNTRRDPEDEICRRAIVKLSEGDVSGAARLIGSTDTFISQSESLESLRDKHPQAPSDLCLPSRPPIILPSTTSSDEVRLAVRSFPRSSAAGLDFLRPRLLQDLLSAVLGSVADRLADALAKVVDILRWGSPPVALQPIIFGARLFALKKKDGSLRPIACSSTLRRLASKIGCAANKAEILSTIGSHQLGFATTGGTEIGIHTSRAFINSRSGPTVLVKLDFRNAFNSVRRDHLLNVVKCYAPQMFHQVHAAYAQPSHLVLPHATISSQSGLQQGDPLGPPLFCLCVKDLIDSLQCPLNAWYLDDGVLGGDLATVIGDIRRVRDFERVSGLSLNPAKCEVCVTGPEDMILPDISELCHLLPGCKVVQKSDIELLGVPLCQEGLPGALDAWREKLEVAASRLPSLGSHRGIFLLRSCFSAARITHLLRGANCFDLTENLRQFNEWTLKTLEVLLNIRLSPNAGMQALLPISLGGLGMPDAVALAGPAIVSSMSQASGKAKRLLDDTGKRVYNHTLAALVERLASLCGVIPTDTLSQKSWSSPLQEKTFVHLLEQAPTTTDKARLRAVSAKSAGAWLQALPSVHLGTLLDDDTVRISAGLRLGTALVFPHQCRCGDQVGPQAHHGLSCALSSGRRARHAALNGTFSRALRSAGFPCILEPPGLCRNDGKRPDGLTLTSFEMGRMLVWDATVTDSLAPLMVSAGAEHAGHASMLAEANKCRKYASISYPHDFRPLAFETLGDPARRRTNSFNVSARRSTVRQGTLELSSTCTRDYRWTFSGVTPPLCAELC

SEQ ID NO: 2645 - protein, 962 aa, Dermanyssus gallinae
MEDYSSTINLAMPQNVSDDSGEDPNRVACPVCNNRYTRRGLSRHMSARHPGVRGIEVTPTTGVSATSEELIGHIQNAMRHARLVRVLPKAVRASVADELTKVLLKVASDNDMEAWHSLFSFAPVVLRLPRIRNDSRSLTVIIKKNLRDFVQGVRIENVEHHEARTNTRRDPEDEICRRAIVKLSEGDVSGAARLIGSTDTFISQSESLESLRDKHPQAPSDLCLPSRPPIILPSTTSSDEVRLAVRSFPRSSAAGLDFLRPRLLQDLLSAVLGSVADRLADALAKVVDILRWGSPPVALQPIIFGARLFALKKKDGSLRPIACSSTLRRLASKIGCAANKAEILSTIGSHQLGFATTGGTEIGIHTSRAFINSRSGPTVLVKLDFRNAFNSVRRDHLLNVVKCYAPQMFHQVHAAYAQPSHLVLPHATISSQSGLQQGDPLGPPLFCLCVKDLIDSLQCPLNAWYLDDGVLGGDLATVIGDIRRVRDFERVSGLSLNPAKCEVCVTGPEDMILPDISELCHLLPGCKVVQKSDIELLGVPLCQEGLPGALDAWREKLEVAASRLPSLGSHRGIFLLRSCFSAARITHLLRGANCFDLTENLRQFNEWTLKTLEVLLNIRLSPNAGMQALLPISLGGLGMPDAVALAGPAIVSSMSQASGKAKRLLDDTGKRVYNHTLAALVERLASLCGVIPTDTLSQKSWSSPLQEKTFVHLLEQAPTTTDKARLRAVSAKSAGAWLQALPSVHLGTLLDDDTVRISAGLRLGTALVFPHQCRCGDQVGPQAHHGLSCALSSGRRARHAALNGTFSRALRSAGFPCILEPPGLCRNDGKRPDGLTLTPFEMGRMLVWDATVTDSLAPSMVSAGAEHAGHASMLAEANKCRKYASISYPHDFRPLAFETLGGPGPKTHKLIQRVGKALNRSTGDTRAIEYLHQRLSLDIQRGNAASVRGTLLDWTRPNLEDM

SEQ ID NO: 2646 - protein, 951 aa, Dermanyssus gallinae
MEDYSSTINLAMPQNVSDDSGEDPNRVACPVSNNRYTRRGLSRHMSARHPGVRGIEVTPTTGVSATSEELIGHIQNAMRHARLVRVLPKAVRASVADELTKVLLKVASNNDMEAWHSLFSFAPVVLRLPRIRNDSRSLTVVIKKNLRDFVQGLRIENVEHHETRTNTRRDPEDEICRRAIVKLSEGDVSGAARLIGSTDTFISQSESLESLRDKHPQAPSDLCLPSRPPIILPSTTSSDEVRLAVRSFPRSSAAGLDFLRPRLLQDLLSAVLGSVADRLADALAKVVDILRWGSPPVALQPIIFGARLFALKKKDGSLRPIACSSTLRRLASKIGCAVNKAEILSTIGSHQLGFATTGGTEIGIHTSRAFINSRSSPTILVKGDFRNAFNSVRRDHLLNVVKCYAPQMFHQVHAAYAQPSHLVLPHATISSQSGLQQGDPLGPPLFCLCVKDLIDSLQCPLNAWYLDDGVLGGDLATVIGDIRRVRDFERVSGLSLNPAKCKVYVTGPEDMILPDISELCHLLPGCKVVQKSDIELLGVPLCQEGLPGALDAWREKLEVAASRLPSLGSHRGIFLLRSCFSAARITHLLRGANCFDLTENLREFNEWTLKTLEVLLNIRLSPNAGMQALLPISLGGLGMPDAVALAGPAIVSSMSQASGNAKRLLNDTGKRVYDHTLAALVERLASLCGVIPTDTLSQKSWSTPLQEKTFVHLLEQAPTTTDKARLRAVSAKSAGAWLQALPSVHLGTLLDDDTVRISAGLRLGTALVFPHQCRCGNPVGPQAHHGLSCALSSGRRARHAALNGTFSRALRSAGFPCILEPPGLCRDDGKRPDGLTLTSFEMGRMLVWDATVTDSLAPSMVSAGAEHAGHVSMLAEANKCRKYASITYPTIFARWHSRHWGDPARRRTNSFNVSARRSTVRQGTLELSSTCTRDYRWTFSGVTPPLCAELC

SEQ ID NO: 2647 - protein, 885 aa, Dermanyssus gallinae
MRHARLVRVLPKAVRASVADELTKFLLKVALNNDIEAWHSLFSFAPVVLALPQIRNDTRSLTVIIKKNLRDFSQGLRIENIAHHETRTTTRRDPEDEICRRAIVKLSEGDVTGAARLIGSTDTFICQSESLESLRDKHPQAPSDLCLPSRPPTMLPSTTSSDEVRLAVKSFPMSSAAGLDFLRPRLLQDLLSAVLGSVADRLADALAKVVDILRWGSPPIALQPIIFGARLFALKKKDGSIRPIACSSTLRRLASKIGCAANKAEILSAIGHHQLGFATTGGTEIGIHTSRAFINSRSSPTVLVKLDFRSAFNSVRRDHLLNAVKCYAPQMFHQVHAAYAQPSHLVLPHATISSQSGLQQGDPLGPPLFCLCVKDLIDSLQSPLNAWYLDDGVLGGDLATVVGDIHRVLDFERVSGLSLNPGKCEVYITGPEDMISPNISELCHLLPGCKVVQKSDIELLGVPLCQEGLPGALDAWREKLEVAASRLPSLGSHRGMYLLRSCFSAARITHLLRGANCFDSIENLRAFNEWALKTLELLLNVRLSPDAGLQALLPISLGGLGMPDAVALAGPAIVRSMSQALEKAKRLLDDTGQSVYDHTLAGLLERLASLCGAIPTDTLSQKGWSTPLQEKTFAHLLEQAPTMTDKARLRAVSSKSAGAWLQALPSAQLGTLLDDETVRISAGLRLGTALVIPHQCKCGDQVGPQAHHGLSCALSSGRRARHAALNETFSRALRSAGFPCILEPPGLCRNDGKRPDGLTLTSFEMGRMLVWDATVTDSLAPSMVSAGAEHAGHASMLAEANKCRKYASITYPHDFRPLAFETLGGPGPKTHKLIQRVGKALNRSTGDHRAVEYLHQRLSLDIQRGNAASVRGTLLDWTRPNLEDM

SEQ ID NO: 2648 - protein, 962 aa, Dermanyssus gallinae
MEDYSSTINLAMPQNVSDDSGEDPNRVACPVCNNRYTRRGLSRHMSARHPGVRGIEVTPTTGVSATSEELIGHIQNAMRHARLVRVLPKAVRTSVADELTKVLLKVASDNDMEAWHSLFSFAPVVLRLPRIRNDSRSLTVIIKKNLRDFVQGVRIENVEHHEARTNTRRDPEDEICRRAIVKLSEGDVSGAARLIGSTDTFISQSESLESLRDKHPQAPSDLCLPSRPPIILPSTTSSDEVRLAVRSFPRSSAAGLDFLRPRLLQDLLSAVLGSVADRLADALAKVVDILRWGSPPVALQPIIFGARLFALKKKDGSLRPIACSSTLRRLASKIVCAANKAEILSTIGSHQLGFATTGGTEIGIHTSRAFINSRSGPTVLVKLDFRNAFNSVRRDHLLNVVKCYAPQMFHQVHAAYAQPSHLVLPHATISSQSGLQQGDPLGPPLFCLCVKDLIDSLQCPLNAWYLDDGVLGGDLATVIGDIRRVRDFERVSGLSLNPAKCEVCVTGPEDMILPDISELCHLLPGCKVVQKSDIELLGVPLCQEGLPGALDAWREKLEVAASRLPSLGSHRGIFLLRSCFSAARITHMLRGANCFDLTENLRQFNEWTLKTLEVLLNIRLSPNAGMQALLPISLGGLGMPDAVALAGPAIVSSMSQASGKAKRLLDDTGKRVYNHTLAALVERLASLCGVIPTDTLSQKSWSSPLQEKTFVHLLEQAPTTTDKARLRAVSAKSAGAWLQALPSVHLGTLLDDDTVRISAGLRLGTALVFPHQCRCGDQVGPQAHHGLSCALSSGRRARHAALNGTFSRALRSAGFPCILEPPGLCRNDGKRPDGLTLTSFEMGRMLVWDATVTDSLAPSMVSAGAEHAGHASMLAEANKCRKYASISYPHDFRPLAFETLGGPGPKTHKLIQRVGKALNRSTGVTRAIEYLHQRLSLDIQRGNAASVRGTLLDWTRPNLEDM

SEQ ID NO: 2649 - protein, 962 aa, Dermanyssus gallinae
MEDRSSTSNLAMPRNVPSDAEQDLNRVACSVCNNIYTRRGLSRHMSARHPGVGGIEVAPTTGTLATSEELVGHIQNTMRHARLVRVLPKAVRASVADELTKVLLKVALNNDIEAWHSLFSFAPVVLALPQIRNDTRSLTVIIKKNLRDFSQGLRIENIVHHKTRTTTRRDPEDEICRRAIVKLSEGDVTGAARLIGSTDTFICQSESLESLRDKHPQAPSDLCLPSRPPTMLPSTTSSNEVRLAVRSFPRSSAAGLDFLRPRLLQDLLSAVLGSVADRLADALAKVVDILRWGSPPITLQPIIFGARLFALKKKDGSIRPIACSSTLRRLASKVGCAANKAEILSAIGHHQLGFATTGGTEIGIHTSRAFINSRSSPTVLVKLDFRNAFNSVRRDHLLNAVKCYAPQMFHQVHAAYAQPSHLVLPHATISSQSGLQQGDPLGPPLFCLCVKDLIDSLQSPLNAWYLDDGVLGGDLATVVGDIHRVLDFERVSGLSLNPGKCEVYITGPEDMISPDISELCHLLPGCKVVQKSDIELLGVPLCQEGLPGALDAWREKLEVAASRLPSLGSHRGMYLLRSCFSAARITHLLRGANCFDSTENLRAFNEWTLKTLELLLNVRLSPDAGLQALLPISLGGLGMPDAVALAGPAIVSSMSQALEKAKRLLDDTGQSVYDHTLAGLLEKLASLCGAIPTDTLSQKGWSTPLQEKTFAHLLEQAPTTTDKARLRAVSSKSAGAWLQALPSAQLGTLLDDETLRISAGLRLGTALVIPHQCKCGDQVGPQAHHGLSCALSSGRRARHAALNETFSRALRSAGFPCILEPPGLCRNDGKRPDGLTLTSFEMGRMLVWDATVTDSLAPSMVSAGAEHAGHASMLAEANKCRKYASITYPYDFRPLAFETLGGPGPKTHKLIQRVGKALNRSTGDTRAVKYLHQRLSLDIQRGNAASVRGTLLDWTRPNLEDM

SEQ ID NO: 2650 - protein, 962 aa, Dermanyssus gallinae
MEDRSFTSNLAMPRNVPSDAEQDLNRVACSVCNNIYTRRGLSRHMSARHPGVGGIEVAPTTGTLATSEELVGHIQNTMRHARLVRVLPKAVRASVADELTKVLLKVALNNDIEAWHSLFSFAPVVLALPQIRNDTRSLTVIIKNNLRDFSQGLRIENIVHHKTRTTTRRDPEDEICRRAIVKLSEGDATGAARLIGSTDTFICQSESLESLREKHPQAPSDLCLPSRPPTMLPSTTSSDEVRLAVRSFPRSSAAGLDFLRPRLLQDLLSAVLGSVADRLADALAKVVDILRSGFSPIALQPIIFGARLFALKKKDGSIRPIACSSTVRRLASKIGCAANKAQILSAIGHHQLGVATTGGTEIGIHTSRAFINSRSSPTVLVKLDFRNAFNSVRRDHLLNAVKCYAPQMFHQVHAAYAQPSHLVLPHVTISSQSGLQQGDPLGPPLFCLCEKDLIDSLQSPLNAWYLDDGVLGGDLATVVGDIHRVLEIERVSGLSLNPGKCEVYITGPEDMISPDISELCHLLPGCKVVQKSDIELLGVPLCQEGLPGALDAWREKLEVAASRLPSLGSHRGMYPLRSCFSAAWITHLLRGANCFDSTENLQAFNEWTLKTLELLLNVRLSPDAGLQALLPISLGGLGMPDAVALAGPAIVSSMSQALEKAKRLLDDTGQSVYDHTLAGLLERLASLCGAIPTDTLSQKGWSTPLQEKTFAQLLEQAPTTTDKARLHAVSSKSAGAWLQALPSAQLGTLLDDETVRISAGLRLGTALVIPHQCKCGDQVGPQAHHGLSCALSSGRRARHAALNETFSRALRSAGFPCILEPPGLCRNDGKRPDGLTLTSFEMGRMLVWDATVTDSLAPSMVSAGAEHAGHASMLAEANKCRKYASITYPHNFRPLAFETLGGPGPKTHKLIQRVGKALNRSTGDPRAVEYLHQRLSLDIQRGNAASVRGTLLDWIRPNLEDI

SEQ ID NO: 2651 - protein, 962 aa, Dermanyssus gallinae
MEDYSSTINLAMPQNVSDDSGEDPNRVACPVCNNRYTRRGLSRHMSARHPGVRGIEVTPTTGVSATSEELIGHIQNAMRHARLVRVLPKAVRSSVADELTKVLLKVASDNDMEAWHSLFSFAPVVLRLPRIRNDSRSLTVIIKKNLRDFVQGVRIENVEHHEARTNTRRDPEDEICRRAIVKLSEGDVSGAARLIGSTDTFISQSESLESLRDKHPQAPSDLCLPSRPPIILPSTTSSDEVRLAVRSFPRSSAAGLDFLRPRLLQDLLSAVLGSVADRLADALAKVVDILRWGSPPVALQPIIFGARLFALKKKDGSLRPIACSSTLRRLASKIGCAANKAEILSTIGSHQLGFATTGGTEIGIHTSRAFINSRSGPTVLVKLDFRNAFNSVRRDHLLNVVKCYAPQMFHQVHAAYAQPSHLVLPHATISSQSGLQQGDPLGPPLFCLCVKDLIDSLQCPLNAWYLDDGVLGGDLATVIGDIRRVRDFERVSGLSLNPAKCEVCVTGPEDMILPDISELCHLLPGCKVVQKSDIELLGVPLCQEGLPGALDAWREKLEVAASRLPSLGSHRGIFLLRSCFSAARITHLLRGANCFDLTENLRQFNEWTLKTLEVLLNIRLSPNAGMQALLPISLGGLGMPDAVALAGPAIVSSMSQASGKAKRLLDDTGKRVYNHTLAALVERLASLCGVIPTDTLSQKSWSSPLQEKTFVHLLEQAPTTTDKARLRAVSAKSAGAWLQALPSVHLGTLLDDDTVRISAGLRLGTALVFPHQCRCGDQVGPQAHHGLSCALSSGRRARHAALNGTFSRALRSAGFPCILEPPGLCRNDGKRPDGLTLTSFEMGRMLVWDATVTDSLAPSMVSAGAEHAGHASMLAEANKCRKYASISYPHDFRPLAFETLGGPGPKTHKLIQRVGKALNRSTGDTRAIEYLHQRLSLDIQRGNAASVRGTLLDWTRPNLEDM

SEQ ID NO: 2652 - protein, 951 aa, Dermanyssus gallinae
MEDRSSTSNLAMPRNVPSDAEQDLNRVACSVCNNIYTRRGLSRHMSARHPGVGGIEVAPTTGTLATSEELVGHIQNTMRHARLVRVLPKAVRASVADELTKVLLKVALNNDIEAWHSLFSFAPVVLALPQIRNDTRSLTVIIKKNLRDFSQGLRIENIVHHKTRTTTRRDSEDEICRRAIVKLSEGDVTGAARLIGSTDTFICQSESLESLRDKHPQAPSDLCLPSRPPTMLPSTTSSDEVRLAVRSFPRSSAAGLDFLRPRLLQDLLSAVLGSVADRLADALAKVVDILRWGSPPITLQPIIFGARLFALKKKDGSIRPIACSSTLRRLASKVGCAANKAEILSAIGHHQLGFATTGGTEIGIHTSRAFINSRSSPTVLVKLDFRNAFNSVRRDHLLNAVKCYAPQMFHQVHAAYAQPSHLVLPHATISSQSGLQQGDPLGPPLFCLCVKDLIDSLQSPLNAWYLDDGVLGGDLATVVGDIHRVLDFERVSGLSLNPGKCEVYITGPEDMISPDISELCHLLPGCKEVQKSDIELLGVPLCQEGLPGSLDAWREKLEVAASRLPSLGSHRGMYLLRSCFSAARITHLLRGANCFDSTENLRAFNEWTLKTLELLLNVRLSPDAGLQALLPISLGGLGMPDAVALAGPAIVSSMSQALEKAKRLLDDTGQSVFDHTLAGLLEKLASLCGAIPTDTLSQKGWSTPLQEKTFAYLLEQAPTTTDKARLRAVSSKSAGAWLQALPSAQLGTLLDDETLRISAGLRLGTALVIPHQCKCGDQVGPQAHHGLSCALSSGRRARHVALNETFSRALRSTGFPCILEPPGLCRNDGKRPDGLTLTSFEMGRMLVWDATVTDSLAPSMVSAGAEHAGHASMLAEANKCRKYASITYPHDFRPLAFETLGGPGPKTHKLIQRVGKALNRSTGDTRAVEYLHQRLSLDIHRVTPPLCVELC

SEQ ID NO: 2653 - protein, 1182 aa, Morbakka virulenta
MVRSRSLALVGSTPRDGVSIKILGKENLTQTNLFECKMNRYNFRINDVNGTGTEKSEGTSSGRCPLGEQRGPGRHPAAARMVWNRELNIAVMECYFLSRPIDEEGKAVRGYRKRMHAIWKERQSLEITEQRICDQARMILKNGWLSDLELENIKRHIFHEVDGSNVDIDRVDENDDGEVMAEYIEPIGKEFIEVMPGEDDLNQDEWMTLEGINKVIDENLEERMTGFKKVDRKMLREEVEKVNVVLHKIRTDNLTGTNNLIKACSIYIGYKVGLKPLQEYNQLKQKEPWWKRRIDNSIKVIRKEISILEGGKKDQCWNKKKFQNLERKYSIRKKGLNVVIEELKQRLQAKSKKVKRYQQRIEQYRINKTFQTDQKRVYQQLNGVNRSNEKPDAEESKQFWSDIWGKNVRHNEDAEWLEKLKNEAELNEKQNVLTITVEMVTMQTKKIPNWKSPGPDGVQGYWLKQLKPLHDRIATQMNDLIAGAGEIPKWMTTGKTVLCQKEPKNGTAVDNYRPISCLPLMWKLMTGIISNNIYGFLEREGKLPPEQKGCRKKRRGTKDQLTIDKTVMKDCKRRQTNLGMGWIDYRKAYDMIPHSWIIESLKLANIADNIISFIEKSMSNWNVNLSANGEFLGNVQIRRGIFQGDSLSPLLFVVCLIPLSHILRKVKSGYSLESGEKLNHLLFMDDLKLYGKDQKELNVLISTVEIFSRDIKMEFGIKKCGILILKRGKINRTNGIVLPSGETIKEIDEEGYKYLGILESDSVKQKEMIEMFKKEYFRRVTLILKSKLIGRNKIKAINTWAVSLLRYGAGILNWKTNELDEMDRKTRKRMTMYKELHPKSDVDRLYVPRTKGGRGLIGCKNAIKTEENALWWYIKHHTEPMIIAVRNQNATDVKESIEPANYKKTGADNTVNLWKEKAMHGQYLRDMEGKDVTKSWSWLRNGDLKGCTEALIFSAQEQALRTNSVKFHIDRTTESPLCRLCNEKSETVSHIVSECKMLAQREYKRRHDNVARYVHWRLSRKFGLDTADKWYEHMPEGATENEVSKILWDFTIQCDRHIEARRPDIVVIDKITREVKIIDVAIPGDVRVNEKEREKIEKYRMLKDEIARLWEMKQVTVIPIVVGALGAVSKNFEKFVRDIGIYMKIEHAQKTALLGTARILRLVLRRRNVWLPIQLVVVRDHI

SEQ ID NO: 2654 - protein, 1166 aa, Morbakka virulenta
MVRSRSLALVGSTPRDGVSIKILGKENLRQTNLFECKMNRYNFRINDVNGTGTEKSEGTSSGRCPLGEQRGPGRHPAAARMVWNRELNIAVMECYFLSRPIDEEGKPVRGYRKRMYAIWKERQSLEITEQRICDQARMILKNGWLSDLELENIKRHIFHEVDGSNVDIDHVDENDDGEVMAEYIEPIGKEFIEVMPGEDDLNQDEWMTLEGINKVIDENLEERMTGFKKVDRKMLREEVEKVNVVLHKIRTDNLTGTNNLIKACSIYIGYKVGLKPLQEYNQLKQKEPWWKRRIDNSIKVIRKEISILEGGKKDQCWNKKKFQNLERKYSIRKKGLNVVIEELKQRLQAKSKKVKRYQQRIEQYRINKTFQTDQKRVYQQLNGVNRSNEKPDAEESKQFWSDIWGKNVRHNEDAEWLEKLKNEAELNEKQNVLTITVEMVTMQTKKIPNWKSPGPDGVQGYWLKQLKPLHDRIATQMNDLIAGAGEIPKWMTTGKTVLCQKEPKNGTAVDNYRPISCLPLMWKLMTGIISNNIYGFLEREGKLPPEQKGCRKKRRGTKDQLTIDKTVMKDCKRRQTNLGMGWIDYRKAYDMIPHSWIIESLKLANIADNIISFIEKSMSNWNVNLSANGEFLGNVQIRRGIFQGDSLSPLLFVVCLIPLSHILRKVKSGYSLESGEKLNHLLFMDDLKLYGKDQKELNVLISTVEIFSRDIKMEFGIKKCGILILKRGKINRTNGIVLPSGETIKEIDEEGYKYLGILESDSVKQKEMIEMFKKEYFRRVTLILKSKLIGRNKIKAINTWAVSLLRYGAGILNWKTNELDEMDRKTRKRMTIYKELHPKSDVDRLYVPRTKGGRGLIGCKNAIKTEENALWWYIKHHTEPMIIAVRNQNATDVKESIEPANYKKTGADNTVNLWKEKAMHGQYLRDMEGKDVTKSWSWLRNGDLKGCTEALIFSAQEQALRTNSVKFHIDRTTESPLCRLCNEKSETVSHIVSECKMLAQREYKRRHDNVARYVHWRLSRKFGLDTADKWYEHMPEGATENEVSKILWDFTIQCDRHIEARRPDIVVIDKITREVKIIDVAIPGDVRVNEKEREKIEKYRMLKDEIARLWEMKQVTVIPIVVGALDAVSKNFEKFVRDIGIYMKIEHAQKTALLGTARILRLVLDC

SEQ ID NO: 2655 - protein, 987 aa, Morbakka virulenta
MAEYIEPIGKEFIEVMPGEDDLNQDEWMTLEGINKVIDENLEERMTGFKKVDRKMLREEVEKVNVVLHKIRTDNLTGTNNLIKACSIYIGYKVGLKPLQEYNQLKQKEPWWKRRIDNSIKVIRKEISILEGGKKDQCWNKKKFQNLERKYSIRKKGLNVVIEELKQRLQAKSKKVKRYQQRIEQYRINKTFQTDQKRVYQQLNGVNRSNEKPDAEESKQFWSDIWGKNVRHNEDAEWLEKLKNEAELNEKQNVLTITVEMVTMQTKKIPNWKSPGPDGVQGYWLKQLKPLHDRIATQMNDLIAGAGEIPKWMTTGKTVLCQKEPKNGTAVDNYRPISCLPLMWKLMTGIISNNIYGFLEREGKLPPEQKGCRKKRRGTKDQLTIDKTVMKDCKRRQTNLGMGWIDYRKAYDMIPHSWIIESLKLANIADNIISFIEKSMSNWNVNLSANGEFLGNVQIRRGIFQGDSLSPLLFVVCLIPLSHILRKVKSGYSLESGEKLNHLLFMDDLKLYGKDQKELNVLISTVEIFSRDIKMEFGIKKCGILILKRGKINRTNGIVLPSGETIKEIDEEGYKYLGILESDSVKQKEMIEMFKKEYFRRVTLILKSKLIGRNKIKAINTWAVSLLRYGAGILNWKTNELDEMDRKTRKRMTMYKELHPKSDVDRLYVPRTKGGRGLIGCKNAIKTEENALWWYIKHHTEPMIIAVRNQNATDVKESIEPANYKKTGADNTVNLWKEKAMHGQYLRDMEGKDVTKSWSWLRNGDLKGCTEALIFSAQEQALRTNSVKFHIDRTTESPLCRLCNEKSETVSHIVSECKMLAQREYKRRHDNVARYVHWRLSRKFGLDTADKWYEHMPEGATENEVSKILWDFTIQCDRHIEARRPDIVVIDKITREVKIIDVAIPGDVRVNEKEREKIEKYRMLKDEIARLWKMKQVTVIPIVVGALGAVSKNFEKFVRDIGIYMKIEHAQKTALLGTARILRLVLDC

SEQ ID NO: 2656 - protein, 911 aa, Morbakka virulenta
MTGFKKVDRKMLREEVEKVNVVLHKIRTDNLTGTNNLIKACSIYIGYKVGLKPLQEYNQLKQKEPWWKRRIDNSIKVIRKEISILEGGKKDQCWNKKKFQNLERKYSIRKKGLNVVIEELKQRLQAKSKKVKRYQQRIEQYRINKTFQTDQKRVYQQLNGVNRSNEKPDAEESKQFWSDIWGKNVRHNEDAEWLEKLKNEAELNEKQNVLTITVEMVTMQTKKIPNWKSPGPDGVQGYWLKQLKPLHDRIATQMNDLIAGAGEIPKWMTTGKTVLCQKEPKNGTAVDNYRPISCLPLMWKLMTGIISNNIYGFLEREGKLPPEQKGCRKKRRGTKDQLTIDKTVMKDCKRRQTNLGMGWIDYRKAYDMIPHSWIIESLKLANIADNIISFIEKSMSNWNVNLSANGEFLGNVQIRRGIFQGDSLSPLLFVVCLIPLSHILRKVKSGYSLESGEKLNHLLFMDDLKLYGKDQKELNVLISTVEIFSRDIKMEFGIKKCGILILKRGKINRTNGIVLPSGETIKEIDEEGYKYLGILESDSVKQKEMIEMFKKEYFRRVTLILKSKLIGRNKIKAINTWAVSLLRYGAGILNWKTNELDEMDRKTRKRMTMYKELHPKSDVDRLYVPRTKGGRGLIGCKNAIKTEENALWWYIKHHTEPMIIAVRNQNATDVKESIEPANYKKTGADNTVNLWKEKAMHGQYLRDMEGKDVTKSWSWLRNGDLKGCTEALIFSAQEQALRTNSVKFHIDRTTESPLCRLCNEKSETVSHIVSECKMLAQREYKRRHDNVARYVHWRLSRKFGLDTADKWYEHMPEGATENEVSKILWDFTIQCDRHIEARRPDIVVIDKITREVKVINVAIPGDVRVNEKEREKIETYRMLKDEIVRLWEMKQVIVILIVVGGCFVGCFENFF

SEQ ID NO: 2657 - protein, 972 aa, Morbakka virulenta
MPGEDDLNQDEWMTLEGINKVIDENLEERMTGFKKVDRKMLREEVEKVNVVLHKIRTDNLTGTNNLIKACSIYIGYKVGLKPLQEYNQLKQKEPWWKRRIDNSIKVIRKEISILEGGKKDQCWNKKKFQNLERKYSIRKKGLNVVIEELKQRLQAKSKKVKRYQQRIEQYRINKTFQTDQKRVYQQLNGVNRSNEKPDAEESKQFWSDIWGKNVRHNEDAEWLEKLKNEAELNEKQNVLTITVEMVTMQTKKIPNWKSPGPDGVQGYWLKQLKPLHDRIATQMNDLIAGAGEIPKWMTTGKTVLCQKEPKNGTAVDNYRPISCLPLMWKLMTGIISNNIYGFLEREGKLPPEQKGCRKKRRGTKDQLTIDKTVMKDCKRRQTNLGMGWIDYRKAYDMIPHSWIIESLKLANIADNIISFIEKSMSNWNVNLSANGEFLGNVQIRRGIFQGDSLSPLLFVVCLIPLSHILRKVKSGYSLESGEKLNHLLFMDDLKLYGKDQKELNVLISTVEIFSRDIKMEFGIKKCGILILKRGKINRTNGIVLPSGETIKEIDEEGYKYLGILESDSVKQKEMIEMFKKEYFRRVTLILKSKLIGRNKIKAINTWAVSLLRYGAGILNWKTNELDEMDRKTRKRMTMYKELHPKSDVDRLYVPRTKGGRGLIGCKNAIKTEENALWWYIKHHTEPMIIAVRNQNATDVKESIEPANYKKTGADNTVNLWKEKAMHGQYLRDMEGKDVTKSWSWLRNGDLKGCTEALIFSAQEQALRTNSVKFHIDRTTESPLCRLCNEKSETVSHIVSECKMLAQREYKRRHDNVARYVHWRLSRKFGLDTADKWYEHMPEGATENEVSKILWDFTIQCDRHIEARRPDIVVIDKITREVKIIDVAIPGDVRVNEKEREKIEKYRMLKDEIARLWEMKQVTVIPIVVGALGAVSKNFEKFVRDIGIYMKIEHAQKTALLGTARILRLVLDC

SEQ ID NO: 2658 - protein, 1166 aa, Morbakka virulenta
MVRCRSLALVGSTPRDGVSIKILGKENLTQTNLFECKMNRYNFRINDVNGTGTEKSEGTSSGRCPLGEQRGPGRHPTAARMVWNRELNIAVMECYFLSRPIDEEGKPVRGYRKRMYAIWKERQSLEITEQRICDQARMILKNGWLSDLELENIKRHIFHEVDGSNVDIDRVDENDDGEVMAEYIEPIGKEFIEVMPGEDDLNQDEWMTLEGINKVIDENLEERMTGFKKVDRKMLREEVEKVNVVLHKIRTDNLTGTNNLIKACSIYIGYKVGLKPLQEYNQLKQKEPWWKRRIDNSIKVIRKEISILEGGKKDQCWNKKKFQNLERKYSIRKKGLNVVIEELKQRLQAKSKKVKRYQQRIEQYRINKTFQTDQKRVYQQLNGVNRSNEKPDAEESKQFWSDIWGKNVRHNEDAEWLEKLKNEAELNEKQNVLTITVEMVTMQTKKIPNWKSPGPDGVQGYWLKQLKPLHDRIATQMNDLIAGAGEIPKWMTTGKTVLCQKEPKNGTAVDNYRPISCLPLMWKLMTGIISNNIYGFLEREGKLPPEQKGCRKKRRGTKDQLTIDKTVMKDCKRRQTNLGMGWIDYRKAYDMIPHSWIIESLKLANIADNIISFIEKSMSNWNVNLSANGEFLGNVQIRRGIFQGDSLSPLLFVVCLIPLSHILRKVKSGYSLESGEKLNHLLFMDDLKLYGKDQKELNVLISTVEIFSRDIKMEFGIKKCGILILKRGKINRTNGIVLPSGETIKEIDEEGYKYLGILESDSVKQKEMIEMFKKEYFRRVTLILKSKLIGRNKIKAINTWAVSLLRYGAGILNWKTNELDEMDRKTRKRMTMYKELHPKSDVDRLYVPRTKGGRGLIGCKNAIKTEENALWWYIKHHTEPMIIAVRNQNATDVKESIEPANYKKTGADNTVNLWKEKAMHGQYLRDMEGKDVTKSWSWLRNGDLKGCTEALIFSAQEQALRTNSVKFHIDRTTESPLCRLCNEKSETVSHIVSECKMLAQREYKRRHDNVARYVHWRLSRKFGLDTADKWYEHMPEGATENEVSKILWDFTIQCDRHIEARRPDIVVIDKITREVKIIDVAIPGDVRVNEKEREKIEKYRMLKDEIARLWKMKQVTVIPIVVGALGAVSKNFEKFVRDIGIYMNIEHAQKTALLGTARILRLVLDC

SEQ ID NO: 2659 - protein, 1166 aa, Morbakka virulenta
MVRSRSLALVGSTPRDGVSIKILGKENLTQTNLFECKMNRYNFRINDVNGTGTEKSEGTSSGRCPLGEQRGPGRHPAAARMVWNRELNIAVMECYFLSRPIDEEGKPVRGYRKRMYAIWKERQSLEITEQRICDQARMILKNGWLSDLELENIKRHIFHEVDGSNVDIDHVDENDDGEVMAEYIEPIGKEFIEVMPGEDDLNQDEWMTLEGINKVIDENLEERMTGFKKVDRKMLREEVEKVNVVLHKIRTDNLTGTNNLIKACSIYIGYKVGLKPLQEYNQLKQKEPWWKRRIDNSIKVIRKEISILEGGKKDQCWNKKKFQNLERKYSIRKKGLNVVIEELKQRLQAKSKKVKRYQQRIEQYRINKTFQTDQKRVYQQLNGVNRSNEKPDAEESKQFWSDIWGKNVRHNEDAEWLEKLKNEAELNEKQNVLTITVEMVTMQTKKIPNWKSPGPDGVQGYWLKQLKPLHDRIATQMNDLIAGAGEIPKWMTTGKTVLCQKEPKNGTAVDNYRPISCLPLMWKLMTGIISNNIYGFLEREGKLPPEQKGCRKKRRGTKDQLTIDKTVMKDCKRRQTNLGMGWIDYRKAYDMIPHSWIIESLKLANIADNIISFIEKSMSNWNVNLSANGEFLGNVQIRRGIFQGDSLSPLLFVVCLIPLSHILRKVKSGYSLESGEKLNHLLFMDDLKLYGKDQKELNVLISTVEIFSRDIKMEFGIKKCGILILKRGKINRTNGIVLPSGETIKEIDEEGYKYLGILESDSVKQKEMIEMFKKEYFRRVTLILKSKLIGRNKIKAINTWAVSLLRYGAGILNWKTNELDEMDRKTRKRMTMYKELHPKSDVDRLYVPRTKGGRGLIGCKNAIKTEENALWWYIKHHTEPMIIAVRNQNATDVKESIEPANYKKTGADNTVNLWKEKAMHGQYLRDMEGKDVTKSWSWLRNGDLKGCTEALIFSAQEQALRTNSVKFHIDRTTESPLCRLCNEKSETVSHIVSECKMLAQREYKRRHDNVARYVHWRLSRKFGLDTADKWYEHMPEGATENEVSKILWDFTIQCDRHIEARRPDIVVIDKITREVKIIDVAIPGDVRVNEKEREKIEKYRMLKDEIARLWKMKQVTVIPIVVGALGAVSKNFEKFVRDIGIYMKIEHAQKTALLGTARILRLVLDC

SEQ ID NO: 2660 - protein, 1166 aa, Morbakka virulenta
MVRSRSLALVGSTPRDGVSIKILGKENLSQTNLFECKMNRYNFRINDVNGTGTEKSEGTSSGRCPLGEQRGPGRHPAAARMVWNRELNIAVMECYFLSRPIDEEGKPVRGYRKRMYAIWKERQSLEITEQRICDQARMILKNGWLSDLELENIKRHIFHEVDGSNVDIDHVDENDDGEVMAEYIEPIGKEFIEVMPGEDDLNQDEWMTLEGINKVIDENLEERMTGFKKVDRKMLREEVEKVNVVLHKIRTDNLTGTNNLIKACSIYIGYKVGLKPLQEYNQLKQKEPWWKRRIDNSIKVIRKEISILEGGKKDQCWNKKKFQNLERKYSIRKKGLNVVIEELKQRLQAKSKKVKRYQQRIEQYRINKTFQTDQKRVYQQLNGVNRSNEKPDAEESKQFWSDIWGKNVRHNEDAEWLEKLKNEAELNEKQNVLTITVEMVTMQTKKIPNWKSPGPDGVQGYWLKQLKPLHDRIATQMNDLIAGAGEIPKWMTTGKTVLCQKEPKNGTAVDNYRPISCLPLMWKLMTGIISNNIYGFLEREGKLPPEQKGCRKKRRGTKDQLTIDKTVMKDCKRRQTNLGMGWIDYRKAYDMIPHSWIIESLKLANIADNIISFIEKSMSNWNVNLSANGEFLGNVQIRRGIFQGDSLSPLLFVVCLIPLSHILRKVKSGYSLESGEKLNHLLFMDDLKLYGKDQKELNVLISTVEIFSRDIKMEFGIKKCGILILKRGKINRTNGIVLPSGETIKEIDEEGYKYLGILESDSVKQKEMIEMFKKEYFRRVTLILKSKLIGRNKIKAINTWAVSLLRYGAGILNWKTNELDEMDRKTRKRMTMYKELHPKSDVDRLYVPRTKGGRGLIGCKNAIKTEENALWWYIKHHTEPMIIAVRNQNATDVKESIEPANYKKTGADNTVNLWKEKAMHGQYLRDMEGKDVTKSWSWLRNGDLKGCTEALIFSAQEQALRTNSVKFHIDRTTESPLCRLCNEKSETVSHIVSECKMLAQREYKRRHDNVARYVHWRLSRKFGLDTADKWYEHMPEGATENEVSKILWDFTIQCDRHIEARRPDIVVIDKITREVKIIDVAIPGDVRVNEKEREKIEKYRMLKDEIARLWKMKQVTVIPIVVGALGAVSKNFEKFVRDIGIYMKIEHAQKTALLGTARILRLVLDC

SEQ ID NO: 2661 - protein, 1151 aa, Morbakka virulenta
MVRSRSLALVGSTPRDGVSIKILGKENLRQTNLFECKMNRYNFRINDVNGTGTEKSEGTSSGRCPLGEQRGPGRHPTAARMVWNRELNIAVMECYFLSRPIDEEGKPVRGYRKRMYAIWKERQSLEITEQRICDQARMILKNGWLSDLELENIKRHIFHEVDGSNVDIDHVDENDDGEVMAEYIEPIGKEFIEVMPGEDDLNQDEWMTLEGINKVIDENLEERMTGFKKVDRKMLREEVEKVNVVLHKIRTDNLTGTNNLIKACSIYIGYKVGLKPLQEYNQLKQKEPWWKRRIDNSIKVIRKEISILEGGKKDQCWNKKKFQNLERKYSIRKKGLNVVIEELKQRLQAKSKKVKRYQQRIEQYRINKTFQTDQKRVYQQLNGVNRSNEKPDAEESKQFWSDIWGKNVRHNEDAEWLEKLKNEAELNEKQNVLTITVEMVTMQTKKIPNWKSPGPDGVQGYWLKQLKPLHDRIATQMNDLIAGAGEIPKWMTTGKTVLCQKEPKNGTAVDNYRPISCLPLMWKLMTGIISNNIYGFLEREGKLPPEQKGCRKKRRGTKDQLTIDKTVMKDCKRRQTNLGMGWIDYRKAYDMIPHSWIIESLKLANIADNIISFIEKSMSNWNVNLSANGEFLGNVQIRRGIFQGDSLSPLLFVVCLIPLSHILRKVKSGYSLESGEKLNHLLFMDDLKLYGKDQKELNVLISTVEIFSRDIKMEFGIKKCGILILKRGKINRTNGIVLPSGETIKEIDEEGYKYLGILESDSVKQKEMIEMFKKEYFRRVTLILKSKLIGRNKIKAINTWAVSLLRYGAGILNWKTNELDEMDRKTRKRMTMYKELHPKSDVDRLYVPRTKGGRGLIGCKNAIKTEENALWWYIKHHTEPMIIAVRNQNATDVKESIEPANYKKTGADNTVNLWKEKAMHGQYLRDMEGKDVTKSWSWLRNGDLKGCTEALIFSAQEQALRTNSVKFHIDRTTESPLCRLCNEKSETVSHIVSECKMLAQREYKRRHDNVARYVHWRLSRKFGLDTADKWYEHMPEGATENEVSKILWDFTIQCDRHIEARRPDIVVIDKITREVKIIDVAIPGDVRINEKEREKIEKYRMLKDEIARLWEMKQVTVIPTVVLALGAVSKNFEKFVRDIGIYMKIEHAQLC

SEQ ID NO: 2662 - protein, 1166 aa, Morbakka virulenta
MVRSRSLALVGSTPRDGVSIKILGKENLTQTNLFECKMNRYNFRINDVNGTGTEKSEGTSSGRCPLGEQRGPGRHPAAARMVWNRELNIAVMECYFLSRPIDEEGKPVRGYRKRMYAIWKERQSLEITEQRICDQARMILKNGWLSDLELENIKRHIFHEVDGSNVDIDHVDENDDGEVMAEYIEPIGKEFIEVMPGEDDLNQDEWMTLEGINKVIDENLEERMTGFKKVDRKMLREEVEKVNVVLHKIRTDNLTGTNNLIKACSIYIGYKVGLKPLQEYNQLKQKEPWWKRRIDNSIKVIRKEISILEGGKKDQCWNKKKFQNLERKYSIRKKGLNVVIEELKQRLQAKSKKVKRYQQRIEQYRINKTFQTDQKRVYQQLNGVNRSNEKPDAEESKQFWSDIWGKNVRHNEDAEWLEKLKNEAELNEKQNVLTITVEMVTMQTKKIPNWKSPGPDGVQGYWLKQLKPLHDRIATQMNDLIAGAGEIPKWMTTGKTVLCQKEPKNGTAVDNYRPISCLPLMWKLMTGIISNNIYGFLEREGKLPPEQKGCRKKRRGTKDQLTIDKTVMKDCKRRQTNLGMGWIDYRKAYDMIPHSWIIESLKLANIADNIISFIEKSMSNWNVNLSANGEFLGNVQIRRGIFQGDSLSPLLFVVCLIPLSHILRKVKSGYSLESGEKLNHLLFMDDLKLYGKDQKELNVLISTVEIFSRDIKMEFGIKKCGILILKRGKINRTNGIVLPSGETIKEIDEEGYKYLGILESDSVKQKEMIEMFKKEYFRRVTLILKSKLIGRNKIKAINTWAVSLLRYGAGILNWKTNELDEMDRKTRKRMTMYKELHPKSDVDRLYVPRTKGGRGLIGCKNAIKTEENALWWYIKHHTEPMIIAVRNQNATDVKESIEPANYKKTGADNTVNLWKEKAMHGQYLRDMEGKDVTKSWSWLRNGDLKGCTEALIFSAQEQALRTNSVKFHIDRTTESPLCRLCNEKSETVSHIVSECKMLAQREYKRRHDNVARYVHWRLSRKFGLDTADKWYEHMPEGATENEVSKILWDFTIQCDRHIEARRPDIVVIDKITREVKIIDVAIPGDVRVNEKEREKIEKYRMLKDEIARLWKMKQVTVIPIVVGALGAVSKNFEKFVRDIGIYMKIEHSQKTALLGTARILRLVLDC

SEQ ID NO: 2663 - protein, 1128 aa, Morbakka virulenta
MNRYNFRINDVNGTGTEKSEGTLSGRCPLGEQRGPGHHPTAARMVWNRELNIAVMECYFLSRPIDEEGKPVRGYRKRMYAIWKERQSLEITEQRICDQARMILKNGWLSDLELENIKRHIFHEVDGSNVDIDHVDENDDGEVMAEYIEPIGKEFIEVMPGEDDLNQDEWMTLEGINKVIDENLEERMTGFKKVDRKMLREEVEKVNVVLHKIRTDNLTGTNNLIKACSIYIGYKVGLKPLQEYNQLKQKEPWWKRRIDNSIKVIRKEISILEGGKKDQCWNKKKFQNLERKYSIRKKGLNVVIEELKQRLQAKSKKVKRYQQRIEQYRINKTFQTDQKRVYQQLNGVNRSNEKPDAEESKQFWSDIWGKNVRHNEDAEWLEKLKNEAELNEKQNVLTITVEMVTMQTKKIPNWKSPGPDGVQGYWLKQLKPLHDRIATQMNDLIAGAGEIPKWMTTGKTVLCQKEPKNGTAVDNYRPISCLPLMWKLMTGIISNNIYGFLEREGKLPPEQKGCRKKRRGTKDQLTIDKTVMKDCKRRQTNLGMGWIDYRKAYDMIPHSWIIESLKLANIADNIISFIEKSMSNWNVNLSANGEFLGNVQIRRGIFQGDSLSPLLFVVCLIPLSHILRKVKSGYSLESGEKLNHLLFMDDLKLYGKDQKELNVLISTVEIFSRDIKMEFGIKKCGILILKRGKINRTNGIVLPSGETIKEIDEEGYKYLGILESDSVKQKEMIEMFKKEYFRRVTLILKSKLIGRNKIKAINTWAVSLLRYGAGILNWKTNELDEMDRKTRKRMTMYKELHPKSDVDRLYVPRTKGGRGLIGCKNAIKTEENALWWYIKHHTEPMIIAVRNQNATDVKESIEPANYKKTGADNTVNLWKEKAMHGQYLRDMEGKDVTKSWSWLRNGDLKGCTEALIFSAQEQALRTNSVKFHIDRTTESPLCRLCNEKSETVSHIVSECKMLAQREYKRRHDNVARYVHWRLSRKFGLDTADKWYEHMPEGATENEVSKILWDFTIQCDRHIEARRPDIVVIDKITREVKIIDVAIPGDVVNEKEREKIEKYRMLKDEIARLWEMKQVTVIPIVVGALSAASKNFEKFVRDIGIYMKIEHAQKTALLGTARILRLVLDC

SEQ ID NO: 2664 - protein, 1166 aa, Morbakka virulenta
MVRSRSLALVGSTPRDGVSIKILGKENLTQTNLFECKMNRYNFRINDVNGTGTEKSEGTSSGRCPLGEQRGPGRHPTAARMVWNRELNIAVMECYFLSRPIDEEGKPVRGYRKRMYAIWKERQSLEITEQRICDQARMILKNGWLSDLELENIKRHIFHEVDGSNVDIDRVDENDDGEVMAEYIEPIGKEFIEVMPGEDDLNQDEWMTLEGINKVIDENLEERMTGFKKVDRKMLREEVEKVNVVLHKIRTDNLTGTNNLIKACSIYIGYKVGLKPLQEYNQLKQKEPWWKRRIDNSIKVIRKEISILEGGKKDQCWNKKKFQNLERKYSIRKKGLNVVIEELKQRLQAKSKKVKRYQQRIEQYRINKTFQTDQKRVYQQLNGVNRSNEKPDAEESKQFWSDIWGKNVRHNEDAEWLEKLKNEAELNEKQNVLTITVEMVTMQTKKIPNWKSPGPDGVQGYWLKQLKPLHDRIATQMNDLIAGAGEIPKWMTTGKTVLCQKEPKNGTAVDNYRPISCLPLMWKLMTGIISNNIYGFLEREGKLPPEQKGCRKKRRGTKDQLTIDKTVMKDCKRRQTNLGMGWIDYRKAYDMIPHSWIIESLKLANIADNIISFIEKSMSNWNVNLSANGEFLGNVQIRRGIFQGDSLSPLLFVVCLIPLSHILRKVKSGYSLESGEKLNHLLFMDDLKLYGKDQKELNVLISTVEIFSRDIKMEFGIKKCGILILKRGKINRTNGIVLPSGETIKEIDEEGYKYLGILESDSVKQKEMIEMFKKEYFRRVTLILKSKLIGRNKIKAINTWAVSLLRYGAGILNWKTNELDEMDRKTRKRMTMYKELHPKSDVDRLYVPRTKGGRGLIGCKNAIKTEENALWWYIKHHTEPMIIAVRNQNATDVKESIEPANYKKTGADNTVNLWKEKAMHGQYLRDMEGKDVTKSWSWLRNGDLKGCTEALIFSAQEQALRTNSVKFHIDRTTESPLCRLCNEKSETVSHIVSECKMLAQREYKRRHDNVARYVHWRLSRKFGLDTADKWYEHMPEGATENEVSKILWDFTIQCDRHIEARRPDIVVIDKITREVKIIDVAIPGDVRVNEKEREKIEKYRMLKDEIARLWEMKQVTVIPIVVGALEAVSKNFEKFVRDIGIYMKIEHAQKTALLGTARILRLVLDC

SEQ ID NO: 2665 - protein, 1166 aa, Morbakka virulenta
MVRSRSLALVGSTPRDGVSIKILGKENLTQTNLFECKMNRYNFRINDVNGTGTEKSEGTSSGRCPLGEQRGPGRHPAAARMVWNRELNIAVMECYFLSRPIDEEGKPVRGYRKRMHAIWKERQSLEITEQRICDQARMILKNGWLSDLELENIKRHIFHEVDGSNVDIDHVDENDDGEVMAEYIEPIGKEFIEVMPGEDDLNQDEWMTLEGINKVIDENLEERMTGFKKVDRKMLREEVEKVNVVLHKIRTDNLTGTNNLIKACSIYIGYKVGLKPLQEYNQLKQKEPWWKRRIDNSIKVIRKEISILEGGKKDQCWNKKKFQNLERKYSIRKKGLNVVIEELKQRLQAKSKKVKRYQQRIEQYRINKTFQTDQKRVYQQLNGVNRSNEKPDAEESKQFWSDIWGKNVRHNEDAEWLEKLKNEAELNEKQNVLTITVEMVTMQTKKIPNWKSPGPDGVQGYWLKQLKPLHDRIATQMNDLIAGAGEIPKWMTTGKTVLCQKEPKNGTAVDNYRPISCLPLMWKLMTGIISNNIYGFLEREGKLPPEQKGCRKKRRGTKDQLTIDKTVMKDCKRRQTNLGMGWIDYRKAYDMIPHSWIIESLKLANIADNIISFIEKSMSNWNVNLSANGEFLGNVQIRRGIFQGDSLSPLLFVVCLIPLSHILRKVKSGYSLESGEKLNHLLFMDDLKLYGKDQKELNVLISTVEIFSRDIKMEFGIKKCGILILKRGKINRTNGIVLPSGETIKEIDEEGYKYLGILESDSVKQKEMIEMFKKEYFRRVTLILKSKLIGRNKIKAINTWAVSLLRYGAGILNWKTNELDEMDRKTRKRMTMYKELHPKSDVDRLYVPRTKGGRGLIGCKNAIKTEENALWWYIKHHTEPMIIAVRNQNATDVKESIEPANYKKTGADNTVNLWKEKAMHGQYLRDMEGKDVTKSWSWLRNGDLKGCTEALIFSAQEQALRTNSVKFHIDRTTESPLCRLCNEKSETVSHIVSECKMLAQREYKRRHDNVARYVHWRLSRKFGLDTADKWYEHMPEGATENEVSKILWDFTIQCDRHIEARRPDIVVIDKITREVKIIDVAIPGDVRVNEKEREKIEKYRMLKDEIARLWEMKQVSVIPIVVEALGAVSKNFEKFVRGIGIYMKIEHAQKTALLGTARILRLVLDC

SEQ ID NO: 2666 - protein, 1166 aa, Morbakka virulenta
MVRSRSLALVGSTPRDGVSIKILGKENLTQTNLFECKMNRYNFRINDVNGTGTEKSEGTSSGRCPLGEQRGPGRHPAAARMVWNRELNIAVMECYFLSRPIDEEGKPVRGYRKRMYAIWKERQSLEITEQRICDQARMILKNGWLSDLELENIKRHIFHEVDGSNVDIDHVDENDDGEVMAEYIEPIGKEFIEVMPGEDDLNQDEWMTLEGINKVIDENLEERMTGFKKVDRKMLREEVEKVNVVLHKIRTDNLTGTNNLIKACSIYIGYKVGLKPLQEYNQLKQKEPWWKRRIDNSIKVIRKEISILEGGKKDQCWNKKKFQNLERKYSIRKKGLNVVIEELKQRLQAKSKKVKRYQQRIEQYRINKTFQTDQKRVYQQLNGVNRSNEKPDAEESKQFWSDIWGKNVRHNEDAEWLEKLKNEAELNEKQNVLTITVEMVTMQTKKIPNWKSPGPDGVQGYWLKQLKPLHDRIATQMNDLIAGAGEIPKWMTTGKTVLCQKEPKNGTAVDNYRPISCLPLMWKLMTGIISNNIYGFLEREGKLPPEQKGCRKKRRGTKDQLTIDKTVMKDCKRRQTNLGMGWIDYRKAYDMIPHSWIIESLKLANIADNIISFIEKSMSNWNVNLSANGEFLGNVQIRRGIFQGDSLSPLLFVVCLIPLSHILRKVKSGYSLESGEKLNHLLFMDDLKLYGKDQKELNVLISTVEIFSRDIKMEFGIKKCGILILKRGKINRTNGIVLPSGETIKEIDEEGYKYLGILESDSVKQKEMIEMFKKEYFRRVTLILKSKLIGRNKIKAINTWAVSLLRYGAGILNWKTNELDEMDRKTRKRMTMYKELHPKSDVDRLYVPRTKGGRGLIGCKNAIKTEENALWWYIKHHTEPMIIAVRNQNATDVKESIEPANYKKTGADNTVNLWKEKAMHGQYLRDMEGKDVTKSWSWLRNGDLKGCTEALIFSAQEQALRTNSVKFHIDRTTESPLCRLCNEKSETVSHIVSECKMLAQREYKRRHDNVARYVHWRLSRKFGLDTADKWYEHMPEGATENEVSKILWDFTIQCDRHIEARRPDIVVIDKITREVKIIDVAIPGDVRVNEKEREKIEKYRMLKDEIARLWKMKQVTVIPIVVGALGAVSKNFEKFVRDIGIYMKIEHAQKTALLGTAWILRLVLDC

SEQ ID NO: 2667 - protein, 792 aa, Morbakka virulenta
MINKTFQTYQKRVYQQLNDVNRSNEKPDAEESKQFWSDIWGNNVRHNEDAEWLEKLKNEAELNETQNVKTITVEMATMQTKKIPNWKSPGPDRVQGYWLKQLKLLHDRIATQMNDLIAGGGEIPKWMTTGKTVPCQKEPKNGTAVDNYRPISCLPLMWKLMTGIISNNIYGFLEREGKLPPEQKGCRKKRRGTKDQLTIDKTVMKDCKRRQTNLGMGWIDYRKAYDMIPHSWIIESLKLANIADNIISFIEKSMSNWNVNLSANGEFLGNVQIRRGIFQGDSLSPLLFVVCLIPLSHILRKVKSGYSLESGEKLNHLLFMDDLKLYGKDQKELNVLISTVEIFSRDIKMEFGIKKCGILILKRGKINRTNGIVLPSGETIKEIDEEGYKYLGILESDSVKQKEMIEMFKKEYFRRVTLILKSKLIGRNKIKAINTWAVSLLRYGAGILNWKTNELDEMDRKTRKRMTMYKELHPKSDVDRLYVPRTKGGRGLIGCKNAIKTEENALWWYIKHHTEPMIIAVRNQNATDVKESIEPANYKKTGADNTVNLWKEKAMHGQYLRDMEGKDVTKSWSWLGNGDLKGCTEALIFSAQEQALRKNSVKFHLDRTTESPLCCLCNEKSITVSHIVRECKMLAQREYKRRIDNVARYIQWRLSRKFGLDTADKWYEHMPEGATENEVSTILWDFTIQCDRHIEARRPDIVVIDKITQEVKIIDVATPGDVRVNEKEREKIEKYRMLKDEIARLWEIKQVTVIPIVVGVLGAVSKNFEKFVRDNNGNFLFFHLNIHNYKPH

SEQ ID NO: 2668 - protein, 1166 aa, Morbakka virulenta
MVRSRSLALVGSTPRDGVSIKILGKENLTQTNLFECKMNRYNFRINDVNGTGTEKSEGTSSGRCPLGEQRGPGRHPAAARMVWNRELNIAVMECYFLSRPIDEEGKPVRGYRKRMYAIWKERQSLEITEQRICDQARMILKNGWLSDLELENIKRHIFHEVDGSNVDIDHVDENDDGEVMAEYIEPIGKEFIEVMPGEDDLNQDEWMTLEGINKVIDENLEERMTGFKKVDRKMLREEVEKVNVVLHKIRTDNLTGTNNLIKACSIYIGYKVGLKPLQEYNQLKQKEPWWKRRIDNSIKVIRKEISILEGGKKDQCWNKKKFQNLERKYSIRKKGLNVVIEELKQRLQAKSKKVKRYQQRIEQYRINKTFQTDQKRVYQQLNGVNRSNEKPDAEESKQFWSDIWGKNVRHNEDAEWLEKLKNEAELNEKQNVLTITVEMVTMQTKKIPNWKSPGPDGVQGYWLKQLKPLHDRIATQMNDLIAGAGEIPKWMTTGKTVLCQKEPKNGTAVDNYRPISCLPLMWKLMTGIISNNIYGFLEREGKLPPEQKGCRKKRRGTKDQLTIDKTVMKDCKRRQTNLGMGWIDYRKAYDMIPHSWIIESLKLANIADNIISFIEKSMSNWNVNLSANGEFLGNVQIRRGIFQGDSLSPLLFVVCLIPLSHILRKVKSGYSLESGEKLNHLLFMDDLKLYGKDQKELNVLISTVEIFSRDIKMEFGIKKCGILILKRGKINRTNGIVLPSGETIKEIDEEGYKYLGILESDSVKQKEMIEMFKKEYFRRVTLILKSKLIGRNKIKAINTWAVSLLRYGAGILNWKTNELDEMDRKTRKRMTMYKELHPKSDVDRLYVPRTKGGRGLIGCKNAIKTEENALWWYIKHHTEPMIIAVRNQNATDVKESIEPANYKKTGADNTVNLWKEKAMHGQYLRDMEGKDVTKSWSWLRNGDLKGCTEALIFSAQEQALRTNSVKFHIDRTTESPLCRLCNEKSETVSHIVSECKMLAQREYKRRHDNVARYVHWRLSRKFGLDTADKWYEHMPEGATENEVSKILWDFTIQCDRHIEARRPDIVVIDKITREVKIIDVAIPGDVRVNEKEREKIEKYRMLKDEIARLWEMKQVTVIPIVVGALGAVSKNFEKFVRDIGIYMKIEHAQKTALLGTARILRLVLDC

SEQ ID NO: 2669 - protein, 960 aa, Morbakka virulenta
MTLEGINKVIDENLEERMTGFKRVDRKMLREEVEKVNAVLHKIRADNLTGTNNLIKACSIYIGYKVGLKPLQEYNQQKQKEPWWKRRIDNSIKVIRKEISILEGGKKEQCWNKKKFQNLERKYSIRKKGLNVVIEELKQRLQAKSKKVKRYQQRIEQFRINKTFQTDQKRVYQQLNGVNRSNEKPDAEESKQFWSDIWGKNVRHNEDAEWLEKLKNEAELNEKQNVLTITVEMVTMQTKKIPNWKSPGPDGVQGYWLKQLKPLHDRIATQMNDLIAGAGEIPKWMTTGKTVLCQKEPKNGTAVDNYRPISCLPLMWKLMTGIISNNIYGFLEREGKLPPEQKGCRKKRRGTKDQLTIDKTVMKDCKRRQTNLGMGWIDYRKAYDMIPHSWIIESLKLANIADNIISFIEKSMSNWNVNLSANGEFLGNVQIRRGIFQGDSLSPLLFVVCLIPLSHILRKVKSGYSLESGEKLNHLLFMDDLKLYGKDQKELNVLISTVEIFSRDIKMEFGIKKCGILILKRGKINRTNGIVLPSGETIKEIDEEGYKYLGILESDSVKQKEMIEMFKKEYFRRVTLILKSKLIGRNKIKAINTWAVSLLRYGAGILNWKTNELDEMDRKTRKRMTMYKELHPKSDVDRLYVPRTKGGRGLIGCKNAIKTEENALWWYIKHHTEPMIIAVRNQNATDVKESIEPANYKKTGADNTVNLWKEKAMHGQYLRDMEGKDVTKSWSWLRNGDLKGCTEALIFSAQEQALRTNSVKFHIDRTTESPLCRLCNEKSETVSHIVSECKMLAQREYKRRHDNVARYVHWRLSRKFGLDTADKWYEHMPEGATENEVSKILWDFTIQCDRHIEARRPDIVVIDKITREVKIIDVAIPGDVRVNEKEREKIEKYRMLKDEIARLWEMKQVTVIPIVVGALGAVSKNFEKFVRDIGIYMKIEHAQKTALLGTARILRLVLDC

SEQ ID NO: 2670 - protein, 728 aa, Morbakka virulenta
MVAMQTKKIPNWKSPGPDRVQGNWLKQLKPLHDRIATQMNDLIAGGGEIPKWMTTGKTVLCQKEPKNGTAVDNYRPISCLPLMWKLMTGIISNNIYGFLEREGKLPPEQKGCRKKRRGTKDQLTIDKTVMKDCKRRQTNLGMGWIDYRKAYDMIPHSWIIESLKLANIADNIISFIEKSMSNWNVNLSANGEFLGNVQIRRGIFQGDSLSPLLFVVCLIPLSHILRKVKSGYSLESGEKLNHLLFMDDLKLYGKDQKELNVLISTVEIFSRDIKMEFGIKKCGILILKRGKINRTNGIVLPSGETIKEIDEEGYKYLGILESDSVKQKEMIEMFKKEYFRRVTLILKSKLIGRNKIKAINTWAVSLLRYGAGILNWKTNELDEMDRKTRKRMTMYKELHPKSDVDRLYVPRTKGGRGLIGCKNAIKTEENALWWYIKHHTEPMIIAVRNQNATDVKESIEPANYKKTGADNTVNLWKEKAMHGQYLRDMEGKDVTKSWSWLRNGDLKGCTEALIFSAQEQALRTNRVKFHIDRTTESPLCRLCNEKSETVSHIVSECKMLAQREYKRRHDNVVRYVLWRLSRKFGLDTADKWYEHMPEDATENEVSKILWDFTIQCDRHIEARRLDIVMIDKITREVKIIDVAIPEDVRVNEKEREKIEKYRMLKDEVARLWPMKQVTVIPIVVGALGAVSKNFEKFVRSIGIYMKIKHAQKTALLGTARILRLVLDC

SEQ ID NO: 2671 - protein, 1166 aa, Morbakka virulenta
MVRSRSLALVGSTPRDGVSIKILGKENLTQTNLFECKMNRYNFRINDVNGTGTEKSEGTSSGRCPLGEQRGPGRHPAAARMVWNRELNIAVMECYFLSRPIDEEGKPVRGYRKRMYAIWKERQSLEITEQRICDQARMILKNGWLSDLELENIKRHIFHEVDGSNVDIDHVDENDDGEVMAEYIEPIGKEFIEVMPGEDDLNQDEWMTLEGINKVIDENLEERMTGFKKVDRKMLREEVEKVNVVLHKIRTDNLTGTNNLIKACSIYIGYKVGLKPLQEYNQLKQKEPWWKRRIDNSIKVIRKEISILEGGKKDQCWNKKKFQNLERKYSIRKKGLNVVIEELKQRLQAKSKKVKRYQQRIEQYRINKTFQTDQKRVYQQLNGVNRSNEKPDAEESKQFWSDIWGKNVRHNEDAEWLEKLKNEAELNEKQNVLTITVEMVTMQTKKIPNWKSPGPDGVQGYWLKQLKPLHDRIATQMNDLIAGAGEIPKWMTTGKTVLCQKEPKNGTAVDNYRPISCLPLMWKLMTGIISNNIYGFLEREGKLPPEQKGCRKKRRGTKDQLTIDKTVMKDCKRRQTNLGMGWIDYRKAYDMIPHSWIIESLKLANIADNIISFIEKSMSNWNVNLSANGEFLGNVQIRRGIFQGDSLSPLLFVVCLIPLSHILRKVKSGYSLESGEKLNHLLFMDDLKLYGKDQKELNVLISTVEIFSRDIKMEFGIKKCGILILKRGKINRTNGIVLPSGETIKEIDEEGYKYLGILESDSVKQKEMIEMFKKEYFRRVTLILKSKLIGRNKIKAINTWAVSLLRYGAGILNWKTNELDEMDRKTRKRMTMYKELHPKSDVDRLYVPRTKGGRGLIGCKNAIKTEENALWWYIKHHTEPMIIAVRNQNATDVKESIEPANYKKTGADNTVNLWKEKAMHGQYLRDMEGKDVTKSWSWLRNGDLKGCTEALIFSAQEQALRTNSVKFHIDRTTESPLCRLCNEKSETVSHIVSECKMLAQREYKRRHDNVARYVHWRLSRKFGLDTADKWYEHMPEGATENEVSKILWDFTIQCDRHIEARRPDIVVIDKITREVKIIDVAIPGDVRVNEKEREKIEKYRMLKDDIARLWEMKQVTVIPIVVGALGAVSKNFVKFVRDIGIYMKIEHAQKTALLGTARILRLVLDC

SEQ ID NO: 2672 - protein, 1065 aa, Morbakka virulenta
MNKITILGLFVVFTICSFCHKDFKVINRHTWRCKEKIKLHHRNEGNHGNENVWNAEVNLNRNDVTNSVSPKCICGRICKGLRGLKAHQRSCRSIKSLNDNNTVDNEIDVINKQHELNNQFISENNNNNDDVRMTNDEFPSLKEGIKLPKSPEDWRLANAFFHSELSKVDIKDNLSEAMRLMNSIVYDYFRDNYGYQKDITEEEIALKEKYKHFSKNELKKELKNLKSNSANINTIKYVAKQIRKKINKRAIDITIATDNDEEINKNFWGYAKKVFVLGTSVLPLFNATQCTAYFTNALKCLNRKKVFVIPQWIPKLDDPTVPFDLSPPSYREITRIIKRMKPSGSPCPLDQISIICFKRCQYLRTFIMGICSEVIQTNTLPTQWSKAATILIHKKGDPSLPENFRPITLEPATLKIFTSFLRNRVFTFLINNRYIESHYQKGFTPGMSGSFEHIAEMSHIINHSRKLQKSLTITLIDLKNAFGEVHHSLIQTVLRYHQIPEEINNIVQTLYSKFRLSIITNDFSTKYIPVEKGVLQGDSFSPLIFNLIVNTFLQCIRDDKYTNFGYRAIKGFLPRNWFQFADDAVAVTSLEGENQILLNFFSKWCKWSEMRIKPSKCYAFGICKKGTLSVQYKPKLYLDNKLVPQIEIDHHFTYLGRHFDLKMTDEMHKKEIIKIVTEHLVIIDGLPLHPKNKLKLYQQWTLSKISWHLTVSKISNTWVKNNIDNLVSRYIRLWLEIPINGTLCVITQSKRKFGLGLILPSTRHTQCQVTFRNKIGRSHNENIRIIHKSTGAVNVQYDQFNKTREALKQIRLSDEHHLINNLTTQSLVIKSIWKYADSKFINQWSNVISHLPRNIFSFVVRYLNNTLANATNAVKWGIANDSTCRFCDRQQTLGHVVGGCQSALDELRYNWRHNSILLHIYKTVTSQGLQAYVDIDGYPNPSIITGDAQRPDLVIVKGDKLLILELTAGFETNIESNFDRKNQRYEQLLSDLSRRFKVYYVNLSLGTLGVFGKNSLIVSKLKSLDLNDETVKFIIKRSINICIRTSYFIFCMRNKEWTNPELLIW

SEQ ID NO: 2673 - protein, 933 aa, Morbakka virulenta
MTNDEFPSLKEGIKLPKSPEDWRLANAFFHSELSKVDIKDNLSEAMRLMNSIVYDYFRDNYGYQKDITEEEIALKEKYKHFSKNELKKELKNLKSNSANINTIKYVAKQIRKKINKRAIDITIATDNDEEINKNFWGYAKKVFVLGTSVLPLFNATQCTAYFTNALKCLNRKKVFVIPQWIPKLDDPTVPFDLSPPSYREITRIIKRMKPSGSPCPLDQISIICFKRCQYLRTFIMGICSEVIQTNTLPTQWSKAATILIHKKGDPSLPENFRPITLEPATLKIFTSFLRNRVFTFLINNRYIESHYQKGFTPGMSGSFEHIAEMSHIINHSRKLQKSLTITLIDLKNAFGEVHHSLIQTVLRYHQIPEEINNIVQTLYSKFRLSIITNDFSTKYIPVEKGVLQGDSFSPLIFNLIVNTFLQCIRDDKYTNFGYRAIKGFLPRNWFQFADDAVAVTSLEGENQILLNFFSKWCKWSEMRIKPSKCYAFGICKKGTLSVQYKPKLYLDNKLVPQIEIDHHFTYLGRHFDLKMTDEMHKKEIIKIVTEHLVIIDGLPLHPKNKLKLYQQWTLSKISWHLTVSKISNTWVKNNIDNLVSRYIRLWLEIPINGTLCVITQSKRKFGLGLILPSTRHTQCQVTFRNKIGRSHNENIRIIHKSTGAVNVQYDQFNKTREALKQIRLSDEHHLINNLTTQSLVIKSIWKYADSKFINQWSNVISHLPRNIFSFVVRYLNNTLANATNAVKWGIANDSTCRFCDRQQTLGHVVGGCQSALDELRYNWRHNSILLHIYKTVTSQGLQAYVDIDGYPNPSIITGDAQRPDLVIVKGDKLLILELTAGFETNIESNFDRKNQRYEQLLSDLSRRFKVYYVNLSLGTLGVFGKNSLIVSKLKSLDLNDETVKFIIKRSINICIRTSYFIFCMRNKEWTNPELLIW

SEQ ID NO: 2674 - protein, 985 aa, Morbakka virulenta
MNKITILGLFVVFTICSFCHKDFKVINRHTWRCKEKIKLHHRNEGNHGNENVWNAEVNLNRNDVTNSVSPKCICGRICKGLRGLKAHQRSCRSIKSLNDNNTVDNEIDVINKQHELNNQFISENNNNNDDVRMTNDEFPSLKEGIKLPKSPEDWRLANAFFHSELSKVDIKDNLSEAMRLMNSIVYDYFRDNYGYQKDITEEEIALKEKYKHFSKNELKKELKNLKSNSANINTIKYVAKQIRKKINKRAIDITIATDNDEEINKNFWGYAKKVFVLGTSVLPLFNATQCTAYFTNALKCLNRKKVFVIPQWIPKLDDPTVPFDLSPPSYREITRIIKRMKPSGSPCPLDQISIICFKRCQYLRTFIMGICSEVIQTNTLPTQWSKAATILIHKKGDPSLPENFRPITLEPATLKIFTSFLRNRVFTFLINNRYIESHYQKGFTPGMSGSFEHIAEMSHIINHSRKLQKSLTITLIDLKNAFGEVHHSLIQTVLRYHQIPEEINNIVQTLYSKFRLSIITNDFSTKYIPVEKGVLQGDSFSPLIFNLIVNTFLQCIRDDKYTNFGYRAIKGFLPRNWFQFADDAVAVTSLEGENQILLNFFSKWCKWSEMRIKPSKCYAFGICKKGTLSVQYKPKLYLDNKLVPQIEIDHHFTYLGRHFDLKMTDEMHKKEIIKIVTEHLVIIDGLPLHPKNKLKLYQQWTLSKISWHLTVSKISNTWVKNNIDNLVSRYIRLWLEIPINGTLCVITQSKRKFGLGLILPSTRHTQCQMTFRNKIGSSHNENIRKIHKFTATINVQYDQFNKTREALKQIRLPDEHHLINDLATQSLVIKSIWKYADSKFINQWSNVISHLPRNIFSFVVRYLNNTLANATNTVKWGITNDSTCRFCDRQQTLGHVIGGCQSALDELRYNWRHNSIFHIYKTVTSQSLQAYVDIDGYPNPSIITGEAQRPDLVVVKGDKLLILELTAGFETNIESNFDRKNQRYE

SEQ ID NO: 2675 - protein, 1024 aa, Morbakka virulenta
MYRSCLFRYFIIIIIIIIIIIIITNSVSPKCICGRICKGLRGLKAHQRSCRSIKSLNDNNTVDNEIDVINKQHELNNQFISENNNDNDDVRMTNDEFPSLKEGIKLPKSQEDWRLANAFFHLELSKVDIKDNLSEAMRLMNSIVYDYFRDNYGYQKDITEEEIALKEKYKHFSKNELKKELKNLKSNSANINTIKYVAKQIRKKINKRAIDITIATDNDEEINKNFWGYAKKVFVLGTSVLPLFNATQCTAYFTNALKCLNRKKVFVIPQWIPKLDDPTVPFDLSPPSYREITRIIKRMKPSGSPCPLDQISIICFKRCQYLRTFIMGICSEVIQTNTLPTQWSKAATILIHKKGDPSLPENFRPITLEPATLKIFTSFLRNRVFTFLINNRYIESHYQKGFTPGMSGSFEHIAEMSHIINHSRKLQKSLTITLIDLKNAFGEVHHSLIQTVLRYHQIPEEINNIVQTLYSKFRLSIITNDFSTKYIPVEKGVLQGDSFSPLIFNLIVNTFLQCIRDDKYTNFGYRAIKGFLPRNWFQFADDAVAVTSLEGENQILLNFFSKWCKWSEMRIKPSKCYAFGICKKGTLSVQYKPKLYLDNKLVPQIEIDHHFTYLGRHFDLKMTDEMHKKEIIKIVTEHLVIIDGLPLHPKNKLKLYQQWTLSKISWHLTVSKISNTWVKNNIDNLVSRYIRLWLEIPINGTLCVITQSKRKFGLGLILPSTRHTQCQVTFRNKIGRSHNENIRIIHKSTGAVNVQYDQFNKTREALKQIRLSDEHHLINNLTTQSLVIKSIWKYADSKFINQWSNVISHLPRNIFSFVVRYLNNTLANATNAVKWGIANDSTCRFCDRQQTLGHVVGGCQSALDELRYNWRHNSILLHIYKTVTSQGLQAYVDIDGYPNPSIITGDAQRPDLVIVKGDKLLILELTAGFETNIESNFDRKNQRYEQLLSDLSRRFKVYYVNLSLGTLGVFGKNSLIVSKLKSLDLNDETVKFIIKRSINICIRTSYFIFCMRNKEWTNPELLIW

SEQ ID NO: 2676 - protein, 1065 aa, Morbakka virulenta
MNKITILGLFVVFTICSFCHKDFKVINRHTWRCKEKIKLHHRNEGNHGNENVWNAEVNLNRNDVTNSVSPKCICGRICKGLRGLKAHQRSCRSIKSLNDNNTVDNEIDVINKQHELNNQFISENNNNNDDVRMTNDEFPSLKEGIKLPKSPEDWRLANAFFHSELSKVDIKDNLSEAMRLMNSIVYDYFRDNYGYQKDITEEEIALKEKYKHFSKNELKKELKNLKSNSANINTIKYVAKQIRKKINKRAIDITIATDNDEEINKNFWGYAKKVFVLGTSVLPLFNATQCTAYFTNALKCLNRKKVFVIPQWIPKLDDPTVPFDLSPPSYREITRIIKRMKPSGSPCPLDQISIICFKRCQYLRTFIMGICSEVIQTNTLPTQWSKAATILIHKKGDPSLPENFRPITLEPATLKIFTSFLRNRVFTFLINNRYIESHYQKGFTPGMSGSFEHIAEMSHIINHSRKLQKSLTITLIDLKNAFGEVHHSLIQTVLRYHQIPEEINNIVQTLYSKFRLSIITNDFSTKYIPVEKGVLQGDSFSPLIFNLIVNTFLQCIRDDKYTNFGYRAIKGFLPRNWFQFADDAVAVTSLEGENQILLNFFSKWCKWSEMRIKPSKCYAFGICKKGTLSVQYKPKLYLDNKLVPQIEIDHHFTYLGRHFDLKMTDEMHKKEIIKIVTEHLVIIDGLPLHPKNKLKLYQQWTLSKISWHLTVSKISNTWVKNNIDNLVSRYIRLWLEIPINGTLCVITQSKRKFGLGLILPSTRHTQCQVTFRNKIGRSHNENIRIIHKSTGAVNVQYDQFNKTREALKQIRLSDEHHLINNLTTQSLVIKSIWKYADSKFINQWSNVISHLPRNIFSFVVRYLNNTLANATNAVKWGIANDSTCRFCDRQQTLGHVVGGCQSALDELRYNWRHNSILLHIYKTVTSQGLQAYVDIDGYPNPSIITGDAQRPDLVIVKGDKLLILELTAGFETNIESNFDRKNQRYEQLLSDLSRRFKVYYVNLSLGTLGVFGKNSLIVSKLKSLDLNDETVKFIIKRSINICIRTSYFIFCMRNKEWTNPKLLIW

SEQ ID NO: 2677 - protein, 930 aa, Morbakka virulenta
MTNDEFPSLKEGIKLPKSPEDWRLANAFFHLELSKVDIKDNLSEAMRLIVYDYFRDNYGYQKDITEEEIALKEKYKHFSKNELKKELKNLKSNSANINTIKYVAKQIRKKINKRAIDITIATDNDEEINKNFWGYAKKVFVLGTSVLPLFNATQCTAYFTNALKCLNRKKVFVIPQWIPKLDDPTVPFDLSPPSYREITRIIKRMKPSGSPCPLDQISIICFKRCQYLRTFIMGICSEVIQTNTLPTQWSKAATILIHKKGDPSLPENFRPITLEPATLKIFTSFLRNRVFTFLINNRYIESHYQKGFTPGMSGSFEHIAEMSHIINHSRKLQKSLTITLIDLKNAFGEVHHSLIQTVLRYHQIPEEINNIVQTLYSKFRLSIITNDFSTKYIPVEKGVLQGDSFSPLIFNLIVNTFLQCIRDDKYTNFGYRAIKGFLPRNWFQFADDAVAVTSLEGENQILLNFFSKWCKWSEMRIKPSKCYAFGICKKGTLSVQYKPKLYLDNKLVPQIEIDHHFTYLGRHFDLKMTDEMHKKEIIKIVTEHLVIIDGLPLHPKNKLKLYQQWTLSKISWHLTVSKISNTWVKNNIDNLVSRYIRLWLEIPINGTLCVITQSKRKFGLGLILPSTRHTQCQVTFRNKIGRSHNENIRIIHKSTGAVNVQYDQFNKTREALKQIRLSDEHHLINNLTTQSLVIKSIWKYADSKFINQWSNVISHLPRNIFSFVVRYLNNTLANATNAVKWGIANDSTCRFCDRQQTLGHVVGGCQSALDELRYNWRHNSILLHIYKTVTSQGLQAYVDIDGYPNPSIITGDAQRPDLVIVKGDKLLILELTAGFETNIESNFDRKNQRYEQLLSDLSRRFKVYYVNLSLGTLGVFGKNSLIVSKLKSLDLNDETVKFIIKRSINICIRTSYFIFCMRNKEWTNPELLIW

SEQ ID NO: 2678 - protein, 1065 aa, Morbakka virulenta
MNKITILGLFAVFTICSFCHKDFEVINRHTWRCKEKIKLHHRNEGNHGNENVWNAEVNLNRNDVTNSVSPKCICGRICKGLRGLKAHQRSCRSIKSLNDNNTVDNEIDVINKQHELNNQFISENNNDNDDVRMTNDEFPSLKEGIKLPKSPEDWRLANAFFHSELSKVDIKDNLSEAMRLMNSIVYDYFRDNYGYQKDITEEEIALKEKYKHFSKNELKKELKNLKSNSANINTIKYVAKQIRKKINKRAIDITIATDNDEEINKNFWGYAKKVFVLGTSVLPLFNATQCTAYFTNALKCLNRKKVFVIPQWIPKLDDPTVPFDLSPPSYREITRIIKRMKPSGSPCPLDQISIICFKRCQYLRTFIMGICSEVIQTNTLPTQWSKAATILIHKKGDPSLPENFRPITLEPATLKIFTSFLRNRVFTFLINNRYIESHYQKGFTPGMSGSFEHIAEMSHIINHSRKLQKSLTITLIDLKNAFGEVHHSLIQTVLRYHQIPEEINNIVQTLYSKFRLSIITNDFSTKYIPVEKGVLQGDSFSPLIFNLIVNTFLQCIRDDKYTNFGYRAIKGFLPRNWFQFADDAVAVTSLEGENQILLNFFSKWCKWSEMRIKPSKCYAFGICKKGTLSVQYKPKLYLDNKLVPQIEIDHHFTYLGRHFDLKMTDEMHKKEIIKIVTEHLVIIDGLPLHPKNKLKLYQQWTLSKISWHLTVSKISNTWVKNNIDNLVSRYIRLWLEIPINGTLCVITQSKRKFGLGLILPSTRHTQCQVTFRNKIGRSHNENIRIIHKSTGAVNVQYDQFNKTREALKQIRLSDEHHLINNLTTQSLVIKSIWKYADSKFINQWSNVISHLPRNIFSFVVRYLNNTLANATNAVKWGIANDSTCRFCDRQQTLGHVVGGCQSALDELRYNWRHNSILLHIYKTVTSQGLQAYVDIDGYPNPSIITGDAQRPDLVIVKGDKLLILELTAGFETNIESNFDRKNQRYEQLLSDLSRRFKVYYVNLSLGTLGVFGKNSLIVSKLKSLDLNDETVKFIIKRSINICIRTSYFIFCMRNKEWTNPELLIW

SEQ ID NO: 2679 - protein, 901 aa, Morbakka virulenta
MQLVFNRKDTKIIIIIIIIIIYDYFRDNYGYQKDITEEEIALKEIYKHFSKNELKKELKNIKSNSANINTIKYVAKQIRKKINKRAIDITIATDNDEEINKNFWGYAKKVFVLGTSVLPLFNATQCTAYFTNALKCLNRKKVFVIPQWIPKLDDPTVPFDLSPPSYREITRIIKRMKPSGSPCPLDQISIICFKRCQYLRTFIMGICSEVIQTNTLPTQWSKAATILIHKKGDPSLPENFRPITLEPATLKIFTSFLRNRVFTFLINNRYIESHYQKGFTPGMSGSFEHIAEMSHIINHSRKLQKSLTITLIDLKNAFGEVHHSLIQTVLRYHQIPEEINNIVQTLYSKFRLSIITNDFSTKYIPVEKGVLQGDSFSPLIFNLIVNTFLQCIRDDKYTNFGYRAIKGFLPRNWFQFADDAVAVTSLEGENQILLNFFSKWCKWSEMRIKPSKCYAFGICKKGTLSVQYKPKLYLDNKLVPQIEIDHHFTYLGRHFDLKMTDEMHKKEIIKIVTEHLVIIDGLPLHPKNKLKLYQQWTLSKISWHLTVSKISNTWVKNNIDNLVSRYIRLWLEIPINGTLCVITQSKRKFGLGLILPSTRHTQCQVTFRNKIGRSHNENIRIIHKSTGAVNVQYDQFNKTREALKQIRLSDEHHLINNLTTQSLVIKSIWKYADSKFINQWSNVISHLPRNIFSFVVRYLNNTLANATNAVKWGIANDSTCRFCDRQQTLGHVVGGCQSALDELRYNWRHNSILLHIYKTVTSQGLQAYVDIDGYPNPSIITGDAQRPDLVIVKGDKLLILELTAGFETNIESNFDRKNQRYEQLLSDLSRRFKVYYVNLSLGTLGVFGKNSLIVSKLKSLDLNDETVKFIIKRSINICIRTSYFIFCTRNKEWTNPELLIW

SEQ ID NO: 2680 - protein, 1065 aa, Morbakka virulenta
MNKITILGLFVVFTICSFCHKDFKVINRHTWRCKEKIKLHHRNEGNHGNENVWNAEVNLNRNDVTNSVSPKCICGRICKGLRGLKAHQRSCRSIKSLNDNNTVDNEIDVINKQHELNNQFISENNNNNDDVRMTNDEFPSLKEGIKLPKSPEDWRLANAFFHSELSKVDIKDNLSEAMRLMNSIVYDYFRDNYGYQKDITEEEIALKEKYKHFSKNELKKELKNLKSNSANINTIKYVAKQIRKKINKRAIDITIATDNDEEINKNFWGYAKKVFVLGTSVLPLFNATQCTAYFTNALKCLNRKKVFVIPQWIPKLDDPTVPFDLSPPSYREITRIIKRMKPSGSPCPLDQISIICFKRCQYLRTFIMGICSEVIQTNTLPTQWSKAATILIHKKGDPSLPENFRPITLEPATLKIFTSFLRNRVFTFLINNRYIESHYQKGFTPGMSGSFEHIAEMSHIINHSRKLQKSLTITLIDLKNAFGEVHHSLIQTVLRYHQIPEEINNIVQTLYSKFRLSIITNDFSTKYIPVEKGVLQGDSFSPLIFNLIVNTFLQCIRDDKYTNFGYRAIKGFLPRNWFQFADDAVAVTSLEGENQILLNFFSKWCKWSEMRIKPSKCYAFGICKKGTLSVQYKPKLYLDNKLVPQIEIDHHFTYLGRHFDLKMTDEMHKKEIIKIVTEHLVIIDGLPLHPKNKLKLYQQWTLSKISWHLTVSKISNTWVKNNIDNLVSRYIRLWLEIPINGTLCVITQSKRKFGLGLILPSTRHTQCQVTFRNKIGRSHNENIRIIHKSTGAVNVQYDQFNKTREALKQIRLSDEHHLINNLTTQSLVIKSIWKYADSKFINQWSNVISHLPRNIFSFVVRYLNNTLANATNAVKWGIANDSTCRFCDRQQTLGHVVGGCQSALDELRYNWRHNSILLHIYKTVTSQGLQAYVDIDGYPNPSIITGDAQRPDLVIVKGDKLLILELTAGFETNIESNFDRKNQRYEQLLSDLSRRFKVYYVNLSLGTLGVFGKNSLIVSKLKSLDLNDETVKFIIKRSINICIRTPYFIFCMRNKEWTNPELLIL

SEQ ID NO: 2681 - protein, 1065 aa, Morbakka virulenta
MNKITFLGLFAVFTICSFCHKDFEIFNRHTWRCKEKIKLHHRNEGNHGNENVWNAEVNLNHNDVTNSVSPKCICGRICKGLRGLKAHQRSCRSIKSLNDNNTVDNEIDVINKQHELNNQFISENNNNNDDVRMTNDEFPSLKEGIKLPKSPEDWRLANAFFHSELSKVDIKDNLSEAMRLMNSIVYDYFRDNYGYQKDITEEEIALKEKYKHFSKNELKKELKNLKSNSANINTIKYVAKQIRKKINKRAIDITIATDNDEEINKNFWGYAKKVFVLGTSVLPLFNATQCTAYFTNALKCLNRKKVFVIPQWIPKLDDPTVPFDLSPPSYREITRIIKRMKPSGSPCPLDQISIICFKRCQYLRTFIMGICSEVIQTNTLPTQWSKAATILIHKKGDPSLPENFRPITLEPATLKIFTSFLRNRVFTFLINNRYIESHYQKGFTPGMSGSFEHIAEMSHIINHSRKLQKSLTITLIDLKNAFGEVHHSLIQTVLRYHQIPEEINNIVQTLYSKFRLSIITNDFSTKYIPVEKGVLQGDSFSPLIFNLIVNTFLQCIRDDKYTNFGYRAIKGFLPRNWFQFADDAVAVTSLEGENQILLNFFSKWCKWSEMRIKPSKCYAFGICKKGTLSVQYKPKLYLDNKLVPQIEIDHHFTYLGRHFDLKMTDEMHKKEIIKIVTEHLVIIDGLPLHPKNKLKLYQQWTLSKISWHLTVSKISNTWVKNNIDNLVSRYIRLWLEIPINGTLCVITQSKRKFGLGLILPSTRHTQCQVTFRNKIGRSHNENIRIIHKSTGAVNVQYDQFNKTREALKQIRLSDEHHLINNLTTQSLVIKSIWKYADSKFINQWSNVISHLPRNIFSFVVRYLNNTLANATNAVKWGIANDSTCRFCDRQQTLGHVVGGCQSALDELRYNWRHNSILLHIYKTVTSQGLQAYVDIDGYPNPSIITGDAQRPDLVIVKGDKLLILELTAGFETNIESNFDRKNQRYEQLLSDLSRRFKVYYVNLSLGTLGVFGKNSLIVSKLKSLDLNDETVKFIIKRSINICIRTSYFIFCMRNKEWTNLELLIW

SEQ ID NO: 2682 - protein, 1056 aa, Morbakka virulenta
MFGDVDEGSVDELNQENITSQIVRYDTVDTNHEPLIVNQKIEFDDLEFDGFKNDLIANTEKYDSLDMKERDGLVKLKLKKSQEKYLDMANSALADLCEEIEPDIIELNTIIYACAKTIESKVGVKRKPLKQRHQHKKPKWKRDIEKAVEEMRGEVSILDEMERGKDPKTRKSRKLKRKFKIESLLEIPPIKEELKQKMQAKAQRLRRFEKRSNFYRQNKVFQSDGKKFYRELGKKQEPVVEVPSQNGIENFWNGIWGEEKGFNETAAWISNTEANNANVNEQEWDDITMAELKSALTKSLKWKSPGLDKVPNFWLNALTSTHGLLTELFNKLLHHPEETPGWLCEGTTYLLSKCSETGDPKNYRPITCLSTTYKILTSILTDRTYKHLEENNLLPLEQKGCRRGSYGCKDQLLINKMLLENCIGSKRNMSCAWIDYKKAFDSVPHNWILRSLDLSKVSPILIKFLKFNMSQWTTNLHLFHENGAIICNNIRIKRGIFQGDSLSPLLFCISLIPLSLELNSSQYGYKIGNKKISHLFYMDDLKVYGKNDSELEGLLKIVKGFSNDIGMEFGLSKCAKATFKKGRLASSTSVQLDNDTEIKNLEQEEVYKYLGVNESSGIQHATMKEKLRKELVRRTRCILKSELNSKNRITAINTLAVPVITYSYNIINWNISEIKKLDTKLRKMLTTYNMHHPKADIDRLYVPRKEGGRGLTQLELAYKTSTIGLLRYLSLTEDWMLNLVYRHQERKNMHSITKEGRKFARELEIDLSIEGGGKKEGEKVTENAQKLKALAKTNGKKAINEAWKNKPLHGKYAQRSLKPDVNLSDTHRWLSSAGLKAETEGFIMAAQDQSLRTRNYEANVLRNGADPKCRICGKSTETIDHLISGCHILAPNEYTNRHNRVGQYIHWKVCKFYEIEIVDTWYEHKPLPVIDSSKVTILWDFSIRTDRTIQANRPDIVVKDKLSKQCRLIDVSVPSDSNISAKEFEKLTKYKDLEIEVGRMWNMRAKTIPVIIGALGMVKKGTDKYIKQIPGNIQLPEIQKIVLNSTAHILRKTLTL

SEQ ID NO: 2683 - protein, 1227 aa, Morbakka virulenta
MMKTRNQKTYHIVRRVGKQGTRPPRELNQLGIEKCATDSATSQNKETNNSDGNQARGNLPAGPSRETSNNRTKEKRQRWNREDYIEIMYAFYMSLEKPEGSHTNNTFKIWKNRNPNVKSYLDPNRLANVRRDILKNNRLTELELREIKEKVKADIRDNEAVRSEASVNEDVMFGDVDEGSVDELNQENITSQIVRYDTVDTNHEPLIVNQKIEFDDLEFDGFKNDLIANTEKYDSLDMKERDGLVKLKLKKSQEKYLDMANSALADLCEEIEPDIIELNTIIYACAKTIESKVGVKRKPLKQRHQHKKPKWKRDIEKAVEEMRGEVSILDEMERGKDPKTRKSRKLKRKFKIESLLEIPPIKEELKQKMQAKAQRLRRFEKRSNFYRQNKVFQSDGKKFYRELGKKQEPVVEVPSQNGIENFWNGIWGEEKGFNETAAWISNTEANNANVNEQEWDDITMAELKSALTKSLKWKSPGLDKVPNFWLNALTSTHGLLTELFNKLLHHPEETPGWLCEGTTYLLSKCSETGDPKNYRPITCLSTTYKILTSILTDRTYKHLEENNLLPLEQKGCRRGSYGCKDQLLINKMLLENCIGSKRNMSCAWIDYKKAFDSVPHNWILRSLDLSKVSPILIKFLKFNMSQWTTNLHLFHENGAIICNNIRIKRGIFQGDSLSPLLFCISLIPLSLELNSSQYGYKIGNKKISHLFYMDDLKVYGKNDSELEGLLKIVKGFSNDIGMEFGLSKCAKATFKKGRLASSTSVQLDNDTEIKNLEQEEVYKYLGVNESSGIQHATMKEKLRKELVRRTRCILKSELNSKNRITAINTLAVPVITYSYNIINWNISEIKKLDTKLRKMLTTYNMHHPKADIDRLYVPRKEGGRGLTQLELAYKTSTIGLLRYLSLTEDWMLNLVYRHQERKNMHSITKEGRKFARELEIDLSIEGGGKKEGEKVTENAQKLKALAKTNGKKAINEAWKNKPLHGKYAQRSLKPDVNLSDTHRWLSSAGLKAETEGFIMAAQDQSLRTRNYEANVLRNGADPKCRICGKSTETIDHLISGCHILAPNEYTNRHNRVGQYIHWKVCKFYEIEIVDTWYEHKPLPVIDSSKVTILWDFSIRTDRTIQANRPDIVVKDKLSKQCRLIDVSVPSDSNISAKEFEKLTKYKDLEIEVGRMWNMRAKTIPVIIGALGMVKKGTDKYIKQIPGNIQLPEIQKIVLNSTAHILRKTLSL

SEQ ID NO: 2684 - protein, 1236 aa, Morbakka virulenta
MKTRSQKSYHIVRRLGQQGTRPPRVLNQLGVEKCATESATSQNELNNENSDGHQVQGKLPAGPSRVTSSNKKTKEKRQRWNREDYVEIMYAFYMSLEKPAGSHTENTFNIWKKRNPNVRPYLDANKLANIRRDILKNNRLTEFELRETKENVKMDIRAVEGVAINVLENEDESFTDIPVDEGSDDELTQGGTRNHDNRYDDDDDQGIRIQDPNAAPDAERREVDDAELARFKDEIIANVEKFESVDMKERDGLAKIKLKRSQDKYLIMANLALQDFCEDVEVNITELNTILYACAKTIETSIGIKRKPPKKRNYHRKPKWKRDIEKEVEEMRGEISILSEIERGKDPKTRKSRKVKRKFRIASIPEIPQMKEELKQKMQAKAQRLRRFEKRSNFYRQNKIFQTDAKKFYRELGKKQDIVKETPSQENIESFWKGIWGEEKRHNESAAWIPNTANANENVNEQQWESITVSELKSALAKTQKWKTPGLDKLPNFWLNALSSAHHTFAKLLDKLMQNPEQTPSWLCEGTTYLLAKSSDTKDPKNYRPITCLSTMYKLLTSILTDRTYKHLEENNLLPLEQKGCKRGSYGCKDQLLINKMILENCNTRKRNMSCAWIDYKKAFDSVPHDWILRSLDLFKISPIIIEFLKFNMTQWKTRLHLSHENGTIICNDVFIKRGIFQGDSLSPLLFCISLIPLSSELNSSQYGYKINNDKISHLFYMDDLKLYGKNNSELEGLLKIVKGFSDDIGMEFGISKCAKATFKKGKLTRSVNVHLDKETVIKDLDQEEVYKYLGVNESNGIQHSNMKEKLRKELVRRTRIILKSELNSKNRITAINTLAIPVITYSYNVIDWNLSEIKKLDTKIRKILTMYNMHHPKADIDRLYVARKEGGRGLTQLELAYKTSTIGLHRYLSLTEDWMLKIVYRHHERKKLHSIVKEATKFAEELELGLQHAAEENRGEEHICDNAHKLKTFAKVKGKKAIGETWKMKPLHGQYAVRSQKPDVDLSDTHRWLSSAGLKAETEGFIIAAQDQSLLTRNYEANVIRNGANPKCRFCDKSVETIDHLVSGCQILAPNEYTNRHNRVGQYIHWKVCSYYGIEIVEKWYEHQPLPVIDTPQVTILWDFPIRTDRTIQANRPDIVIKDKLTKQCQMIDMSVPSDNKITAKEFEKLGKFKDLEIEISRMWNMRTKIIPVIVGALGMVKKGTRKYVDLIPGNIQLPEIQKIVLISTAHILRKALSL

SEQ ID NO: 2685 - protein, 1238 aa, Morbakka virulenta
MKTRSQKSYHIVRRVGQQGTRPPRVLNQLGVENCATESAASQNELNNENSDGHQVQGNLPAGPSRVTSSNKKTKEKRQRWNREDYVEIMYAFYMSLEKPAGNHTENTFNIWKKRNPNVRPYLDANKLANIRRDILKNNRLTEFELRETKENVKMDIRAVEGVAINVLENEDESFTDIPVDEGSDDELTQGGTRNHDNRYDVINDDDQGIRIQDPNAAPDAERREVDDAELARFKDEIIANVEKFESVDMKERDGLAKIKLKRSQDKYLIMANLALQDFCEDVEVNITELNTILYACAKTIETSIGIKRKPPKKRNYHRKPKWKRDIEKEVEEMRGEISILSEIERGKDPKTRKSRKVKRKFRIASIPEIPQMKEELKQKMQAKAQRLRRFEKRSNFYRQNKIFQTDAKKFYRELGKKQDLVKETPSQENIESFWKGIWGEEKRHNESAAWIPNTANANENVNEQQWESITVSELKSALAKTQKWKTPGLDKLPNFWLNALSSAHHTFAKLLDKLMQNPEQTPSWLCEGTTYLLAKSSDTKDPKNYRPITCLSTMYKLLTSILTDRTYKHLEENNLLPLEQKGCKRGSYGCKDQLLINKTILENCNTRKRNMSCAWIDYKKAFDSVPHDWILRSLDLFKISPIIIEFLKFNMTQWKTRLHLSHENGTIICNDVFIKRGIFQGDSLSPLLFCISLIPLSSELNSSQYGYKINNDKISHLFYMDDLKLYGKNNSELEGLLKIVKGFSDDIGMEFGISKCAKATFKKGKLTRSVNVHLDKETVIKDLDQEEVYKYLGVNESNGIQHSNMKEKLRKELVRRTRIILKSELNSKNRITAINTLAIPVITYSYNVIDWNLSEIKKLDTKIRKILTMYNMHHPKADIDRLYVARKEGGRGLTQLELAYKTSTIGLHRYLSLTEDWMLKIVYRHHERKKLHSIVKEATKFAEELELGLQHAAEENRGEEHICDNAHKLKTFAKVKGKKAIGETWKMKPLHGQYAVRSQKPDVDLSDTHRWLSSAGLKAETEGFIIAAQDQSLLTRNYEANVIRNGANPKCRFCDKSVETIDHLVSGCQILAPNEYTNRHNRVGQYIHWKVCSYYGIEIVEKWYEHQPLPVIDTPQVTILWDFPIRTDRTIQANRPDIVMKDKLTKQCQMIDMSVPSNNNITTKEFEKLGKYKDLEIEISRMWNMRTKIIPVIVGALGMVRKGTRKYVDLIPGNIQLPEIQKIVLNSTAHILRKALSL

SEQ ID NO: 2686 - protein, 1138 aa, Morbakka virulenta
MYAFYMSLEKREGSHTNNTFKIWKNRNPNVKSYLDPNRLANVRRDILKNNRLTELELREIKEKVKADIREAVRSEVSVNGDVMFGDVDEGSGDELNQENITSQIVRYDTVDTNHEPLIVNQKIEFDDLEFDGFKNDLIANTEKYDSLDMKERDGLVKLKLKKSQEKYLDMANSALADLCEEIEPDIIELNTIIYACAKTIESKVGVKRKPLKQRHQHKKPKWKRDIEKAVEEMRGEVSILDEMERGKDPKTRKSRKLKRKFKIESLLEIPPIKEELKQKMQAKAQRLRRFEKRSNFYRQNKVFQSDGKKFYRELGKKQEPVVEVPSQNGIENFWNGIWGEEKGFNETAAWISNTEANNANVNEQEWDDITMAELKSALTKSLKWKSPGLDKVPNFWLNALTSTHGLLTELFNKLLHHPEETPGWLCEGTTYLLSKCSETGDPKNYRPITCLSTTYKILTSILTDRTYKHLEENNLLPLEQKGCRRGSYGCKDQLLINKMLLENCIGSKRNMSCAWIDYKKAFDSVPHNWILRSLDLSKVSPILIKFLKFNMSQWTTNLHLFHENGAIICNNIRIKRGIFQGDSLSPLLFCISLIPLSLELNSSQYGYKIGNKKISHLFYMDDLKVYGKNDSELEGLLKIVKGFSNDIGMEFGLSKCAKATFKKGRLASSTSVQLDNDTEIKNLEQEEVYKYLGVNESSGIQHATMKEKLRKELVRRTRCILKSELNSKNRITAINTLAVPVITYSYNIINWNISEIKKLDTKLRKMLTTYNMHHPKADIDRLYVPRKEGGRGLTQLELAYKTSTIGLLRYLSLTEDWMLNLVYRHQERKNMHSITKEGRKFARELEIDLSIEGGGKKEGEKVTENAQKLKALAKTNGKKAINEAWKNKPLHGKYAQRSLKPDVNLSDTHRWLSSAGLKAETEGFIMAAQDQSLRTRNYEANVLRNGADPRCRICGKNTETIDHLIPGCHILAPNEYTNRHNRVGQYIHWKVCKFYDIEIVDTWYEHKPLPVIDSSKVTILWDFSIRTDRTIQANRPDIVVKDKLSKQCRLIDVSVPSDSNISAKEFEKLTKYKDLEIEVGRMWNMRAKIIPVIIGALGMMKKGTDKYIKQIPGNIQLAEIQKLVLNSTAHILRKTLSL

SEQ ID NO: 2687 - protein, 1227 aa, Morbakka virulenta
MIKTRNQKTYHIVCRVGKQGTRPSRELNQLGIEKCATDSATSQNKETNNSDGNQARGNLTAGPSRETSNNRTEEKRQRWNREDYIEIMYAFYMSLEKPEGSHTNNTFKIWKNRNPNVKSYLDPNRLANVRRDILKNNRLTELELREIKEKVKADIRDNEAVRSEASVNEDVMFGDVDEGSVDELNQENITSQIVRYDTVDTNHEPLIVNQKIEFDDLEFDGFKNDLIANTEKYDSLDMKERDGLVKLKLKKSQEKYLDMANSALADLCEEIEPDIIELNTIIYACAKTIESKVGVKRKPLKQRHQHKKPKWKRDIEKAVEEMRGEVSILDEMERGKDPKTRKSRKLKRKFKIESLLEIPPIKEELKQKMQAKAQRLRRFEKRSNFYRQNKVFQSDGKKFYRELGKKQEPVVEVPSQNGIENFWNGIWGEEKGFNETAAWISNTEANNANVNEQEWDDITMAELKSALTKSLKWKSPGLDKVPNFWLNALTSTHGLLTELFNKLLHHPEETPGWLCEGTTYLLSKCSETGDPKNYRPITCLSTTYKILTSILTDRTYKHLEENNLLPLEQKGCRRGSYGCKDQLLINKMLLENCIGSKRNMSCAWIDYKKAFDSVPHNWILRSLDLSKVSPILIKFLKFNMSQWTTNLHLFHENGAIICNNIRIKRGIFQGDSLSPLLFCISLIPLSLELNSSQYGYKIGNKKISHLFYMDDLKVYGKNDSELEGLLKIVKGFSNDIGMEFGLSKCAKATFKKGRLASSTSVQLDNDTEIKNLEQEEVYKYLGVNESSGIQHATMKEKLRKELVRRTRCILKSELNSKNRITAINTLAVPVITYSYNIINWNISEIKKLDTKLRKMLTTYNMHHPKADIDRLYVPRKEGGRGLTQLELAYKTSTIGLLRYLSLTEDWMLNLVYRHQERKNMHSITKEGRKFARELEIDLSIEGGGKKEGEKVTENAQKLKALAKTNGKKAINEAWKNKPLHGKYAQRSLKPDVNLSDTHRWLSSAGLKAETEGFIMAAQDQSLRTRNYEANVLRNGADPKCRICGKSTETIDHLISGCHILAPNEYTNRHNRVGQYIHWKVCKFYEIEIVDTWYEHKPLPVIDSSKVTILWDFSIRTDRTIQANRPDIVVKDKLSKQCRLIDVSVPSDSNISAKEFEKLTKYKDLEIEVGRMWNMRAKTILVIIGALGMVKKGTDKYIKQIPGNIQLPEIQKIVLNSTAHILRKTLSL

SEQ ID NO: 2688 - protein, 1227 aa, Morbakka virulenta
MKARSQKSYHIVRRVGQQGTRPPRVLNQLGVEKCATESATSQNELNNENSDGHQVQGNLPAGPSRVTSSNKKTKEKRQRWNREDYVEIMYAFYMSLEKPAGSHTENTFNIWKKRNPNVRPYLDANKLANIRRDILKNNRLTEFELRETKENVKMDIRAVEGVAINVLENEDESFTDIPVDEGSDDELTQGGTRNHDNRYDVINDDDQGIRIQDPNAAPDAERREVDDAELARFKDEIIANVEKFESVDMKERDGLAKIKLKRSQDKYLIMANLALQDFCEDVEVNITELNTILYACAKTIETSIGIKRKPPKKRNYHRKPKWKRDIEKEVEEMRGEISILSEIERGKDPKTRKSRKVKRKFRIASIPEIPQMKEELKQKMQAKAQRLRRFEKRSNFYRQNKIFQTDAKKFYRELGKKQDLVKETPSQENIESFWKRIWGEEKRHNESAAWIPNTANANENVNEQQWESITVSELKSALAKTQKWKTPGLDKLPNFWLNALSSAHHTFAKLLDKLMQNPEQTPSWLCEGTTYLLAKSSDTKDPKNYRPITCLSTMYKLLTSILTDRTYKHLEENNLLPLEQKGCKRGSYGCKDQLLINKTILENCNTRKRNMSCAWIDYKKAFDSVPHDWILRSLDLFKISPIIIEFLKFNMTQWKTRLHLSHENGTIICNDVFIKRGIFQGDSLSPLLFCISLIPLSSELNSSQYGYKINNDKISHLFYMDDLKLYGKNNSELEGLLKIVKGFSDDIGMEFGISKCAKATFKKGKLTRSVNVHLDKETVIKDLDQEEVYKYLGVNESNGIQHSNMKEKLRKELVRRTRIILKSELNSKNRITAINTLAIPVITYSYNVIDWNLSEIKKLDTKIRKILTMYNMHHPKADIDRLYVARKEGGRGLTQLELAYKTSTIGLHRYLSLTEDWMLKIVYRHHERKKLHSIVKEATKFAEELELGLQHAAEENRGEEHICDNAHKLKTFAKVKGKKAIGETWKMKPLHGQYAVRSQKPDVDLSDTHRWLNSAGLKAETEGFIIAAQDQSLLTRNYEANVIRNGANPKCRFCDKSVETIDHLVSGCQILAPNEYTNRHNRVGQYIHWKVCSYYGIEIVEKWYEHQPLPVIDTPQVTILWDFPIRTDRTIQANRPDIVIKDKLTKQCQMIDMSVPSDNNITAKEFEKLGKYKDLEIEISRMWNMKTKIILVIVGALGMVKKGTRKYVDLIPGNIQLPEIQKIVLHT

SEQ ID NO: 2689 - protein, 1227 aa, Morbakka virulenta
MMKTRNQKTYHIVRRVGKQGTRPLRELNQLGIEKCATDSATSQNKETNNSDGNQARGNLPAGPSRETSNNRTKEKRQRWNREDYIEIMYAFYMSLEKPEGSHTNNTFKIWKNRNPNVKSYLDPNRLANVRRDILKNNRLTELELREIKEKVKADIRDNEAVRSEASVNEDVMFGDVDEGSVDELNQENITSQIVRYDTVDTNHEPLIVNQKIEFDDLEFDGFKNDLIANTEKYDSLDMKERDGLIKLKLKKSQEKYLDMANSALADLCEEIEPDIIELNTIIYACAKTIESKVGVKRKPLKQRHQHKKPKWKRDIEKAVEEMRGEVSILDEMERGKDPKTRKSRKLKRKFKIESLLEIPPIKEELKQKMQAKAQRLRRFEKRSNFYRQNKVFQSDGKKFYRELGKKQEPVVEVPSQNGIENFWNGIWGEEKGFNETAAWISNTEANNANVNEQEWDDITMAELKSALTKSLKWKSPGLDKVPNFWLNALTSTHGLLTELFNKLLHHPEETPGWLCEGTTYLLSKCSETGDPKNYRPITCLSTTYKILTSILTDRTYKHLEENNLLPLEQKGCRRGSYGCKDQLLINKMLLENCIGSKRNMSCAWIDYKKAFDSVPHNWILRSLDLSKVSPILIKFLKFNMSQWTTNLHLFHENGAIICNNIRIKRGIFQGDSLSPLLFCISLIPLSLELNSSQYGYKIGNKKISHLFYMDDLKVYGKNDSELEGLLKIVKGFSNDIGMEFGLSKCAKATFKKGRLASSTSVQLDNDTEIKNLEQEEVYKYLGVNESSGIQHATMKEKLRKELVRRTRCILKSELNSKNRITAINTLAVPVITYSYNIINWNISEIKKLDTKLRKMLTTYNMHHPKADIDRLYVPRKEGGRGLTQLELAYKTSTIGLLRYLSLTEDWMLNLVYRHQERKNMHSITKEGRKFARELEIDLSIEGGGKKEGEKVTENAQKLKALAKTNGKKAINEAWKNKPLHGKYAQRSLKPDVNLSDTHRWLSSAGLKAETEGFIMAAQDQSLRTRNYEANVLRNGADPKCRICGKSTETIDHLISGCHILAPNEYTNRHNRVGQYIHWKVCKFYEIEIVDTWYEHKPLPVIDSSKVTILWDFSIRTDRTIQANRPDIVVKDKLSKQCRLIDVSVPSDSNISAKEFEKLTKYKDLEIEVGRMWNMRAKTIPVIIGALGMVKKGTDKYIKQIPENIQLPEIQKIVLNSTAHILRKTLFL

SEQ ID NO: 2690 - protein, 1238 aa, Morbakka virulenta
MKTRSQKSYHIVRRVGQQGTRPPRVLNQLGVEKCATESATSQNELNNENSDGHKVQGNLPAGPSRVTSSKKKTIEKRQRWNRENYVEIMYAFYMSLEKPAGSHTENTFNIWKKRNPNVRPYLDANKLANIRRDILKNNRLTEFELRETKENVKMDIRAVEGVAINVLENEDESFTDIPVDEGSDDELTQGGTRNHDNRYDVINDDDQGIRIQDPNAAPDAERREVDDAELARFKDEIIANVEKFESVDMKERDGLAKIKLKRSQDKYLIMANLALQDFCEDVEVNITELNTILYACAKTIETSIGIKRKPPKKRNYHRKPKWKRDIEKEVEEMRGEISILSEIERGKDPKTRKSRKVKRKFRIASIPEIPQMKEELKQKMQAKAQRLRRFEKRSNFYRQNKIFQTDAKKFYRELGKKQDIVKETPSQENIESFWKGIWGEEKRHNESAAWIPNTANANENVNEQQWESITVSELKSALAKTQKWKTPGLDKLPNFWLNALSSAHHTFAKLLDKLMQNPEQTPSWLCEGTTYLLAKSSDTKDPKNYRPITCLSTMYKLLTSILTDRTYKHLEENNLLPLEQKGCKRGSYGCKDQLLINKMILENCNTRKRNMSCAWIDYKKAFDSVPHDWILRSLDLFKISPIIIEFLKFNMTQWKTRLHLSHENGTIICNDVFIKRGIFQGDSLSPLLFCISLIPLSSELNSSQYGYKINNDKISHLFYMDDLKLYGKNNSELEGLLKIVKGFSDDIGMEFGISKCAKATFKKGKLTRSVNVHLDKETVIKDLDQEEVYKYLGVNESNGIQHSNMKEKLRKELVRRTRIILKSELNSKNRITAINTLAIPVITYSYNVIDWNLSEIKKLDTKIRKILTMYNMHHPKADIDRLYVARKEGGRGLTQLELAYKTSTIGLHRYLSLTEDWMLKIVYRHHERKKLHSIVKEATKFAEELELGLQHAAEENRGEERICDNAHKLKTFAKVKGKKAIGETWKMKPLHGQYAVRSQKPDVDLSDTHRWLSSAGLKAETEGFIIAAQDQSLLTRNYEANVIRNGANPKCRFCDKSVETIDHLVSGCQILAPNEYTNRHNRVGQYIHWKVCSYYGIEIVEKWYEHQPLPVIDTPQVTILWDFPIRTDRTIQANRPDIVIKDKLTKQCQMIDMSVPSDNNITAKEFEKLGKYKDLEIEISRMWNMRTKIIPVIVGALGMVKKGTRKYVDLIPGNIQLPEIQKIVLNSTAHILRKALSL

SEQ ID NO: 2691 - protein, 1102 aa, Morbakka virulenta
MHFMSLEKPAGSHTENTFNISKKRNPNVRPYLEANKLDNIRRDILKNNRLTEFELRETKENVKMDIRAVEGVAINVLENEDESFTDIPVDEGSDDELTQGGTRNHDNRYVNDDDQGIRIQDPNAAPDAERREVDDAELARFKDEIIANVEKFESVDMKERDGLAKIKLKRSQDKYLIMANLALQDFCEDVEVNITELNTILYACAKTIETSIGIKRKPPKKRNYHRKPKWKRDIEKEVEEMRGEISILSEIERGKDPKTRKSRKVKRKFRIASIPEIPQMKEELKQKMQAKAQRLRRFEKRSNFYRQNKIFQTDAKKFYRELGKKQDLVKETPSQENIESFWKGIWGEEKRHNESAAWIPNTANANENVNEQQWESITVSELKSALAKTQKWKTPGLDKLPNFWLNALSSAHHTFAKLLDKLMQNPEQTPSWLCEGTTYLLAKSSDTKDPKNYRPITCLSTMYKLLTSILTDRTYKHLEENNLLPLEQKGCKRGSYGCKDQLLINKTILENCNTRKRNMSCAWIDYKKAFDSVPHDWILRSLDLFKISPIIIEFLKFNMTQWKTRLHLSHENGTIICNDVFIKRGIFQGDSLSPLLFCISLIPLSSELNSSQYGYKINNDKISHLFYMDDLKLYGKNNSELEGLLKIVKGFSDDIGMEFGISKCAKATFKKGKLTRSVNVHLDKETVIKDLDQEEVYKYLGVNESNGIQHSNMKEKLRKELVRRTRIILKSELNSKNRITAINTLAIPVITYSYNVIDWNLSEIKKLDTKIRKLLTMYNMHHPKADIDRLYVARKEGGRGLTQLELAYKTSTIGLHRYLSLTEDWMLKIVYRHHERKKLHSIVKEATKFAEELELGLQHAAEENRGEEHICDNAHKLKTFAKVKGKKAIGETWKMKPLHGQYAVRSQKPDVDLSDTHRWLSSAGLKAETEGFIIAAQDQSLLTRNYEENVIRNGANPKCRFCDKSVETIDHLVSGCQILAPNEYTNRHNRVGQYIHWKVCSYYGIEIVEKWYEHQPLPAIDTPKVTILWDFPITTDRTIQANRPDIIIKDKLTKQCQMIDMSVPSDNNITAKEFEKLGKYKDLEIEIRRIWNMRTKIIPVIV

SEQ ID NO: 2692 - protein, 1056 aa, Morbakka virulenta
MFGDVDEGSGDELNQENITSQIVKYDTVDTNHEPLIVNQKIEFDDLEFDGFKNDLIANTEKYDSLDMKERDGLVKLKLKKSQEKYLDMANSALADLCEEIEPDIIELNTIIYACAKTIESKVGVKRKPLKQRHQHKKPKWKRDIEKAVEEMRGEVSILDEMERGKDPKTRKSRKLKRKFKIESLLEIPPIKEELKQKMQAKAQRLRRFEKRSNFYRQNKVFQSDGKKFYRELGKKQEPVVEVPSQNGIENFWNGIWGEEKGFNETAAWISNTEANNANVNEQEWDDITMAELKSALTKSLKWKSPGLDKVPNFWLNALTSTHGLLTELFNKLLHHPEETPGWLCEGTTYLLSKCSETGDPKNYRPITCLSTTYKILTSILTDRTYKHLEENNLLPLEQKGCRRGSYGCKDQLLINKMLLENCIGSKRNMSCAWIDYKKAFDSVPHNWILRSLDLSKVSPILIKFLKFNMSQWTTNLHLFHENGAIICNNIRIKRGIFQGDSLSPLLFCISLIPLSLELNSSQYGYKIGNKKISHLFYMDDLKVYGKNDSELEGLLKIVKGFSNDIGMEFGLSKCAKATFKKGRLASSTSVQLDNDTEIKNLEQEEVYKYLGVNESSGIQHATMKEKLRKELVRRTRCILKSELNSKNRITAINTLAVPVITYSYNIINWNISEIKKLDTKLRKMLTTYNMHHPKADIDRLYVPRKEGGRGLTQLELAYKTSTIGLLRYLSLTEDWMLNLVYRHQERKNMHSITKEGRKFARELEIDLSIEGGGKKEGEKVTENAQKLKALAKTNGKKAINEAWKNKPLHGKYAQRSLKPDVNLSDTHRWLSSAGLKAETEGFIMAAQDQSLRTRNYEANVLRNGADPKCRICGKSTETIDHLISGCHILAPNEYTNRHNRVGQYIHWKVCKFYEIEIVDTWYEHKPLPVIDSSKVTILWDFSIRTDRTIQANRPDIVVKDKLRKQCLQIDVSVPSDSNISAKEFEKLTKYKDLEIEVGRMWNMRAKTIPVIIGALGMVKKGTDKYIKQIPGNIQLPDIQKVILYSTAHILRKTLSL

SEQ ID NO: 2693 - protein, 1227 aa, Morbakka virulenta
MMKTRNQKTYHIVRRVGKQGTRPPRELNQLGIEKCATDSATSQNKETNNSDGNQARGNLPAGPSRETSNNRTKEKRQRWNREDYIEIMYAFYMSLEKPEGSHTNNTFKIWKNRNPNVKSYLDPNRLANVRRDILKNNRLTELELREIKEKVKADIRDNEAVRSEASVNEDVMFGDVDEGSVDELNQENITSQIVRYDTVDTNHEPLIVNQKIEFDDLEFDGFKNDLIANTEKYDSLDMKERDGLVKLKLKKSQEKYLDMANSALADLCEEIEPDIIELNTIIYACAKTIESKVGVKRKPLKQRHQHKKPKWKRDIEKAVEEMRGEVSILDEMERGKDPKTRKSRKLKRKFKIESLLEIPPIKEELKQKMQAKAQRLRRFEKRSNFYRQNKVFQSDGKKFYRELGKKQEPVVEVPSQNGIENFWNGIWGEEKGFNETAAWISNTEANNANVNEQEWDDITMAELKSALTKSLKWKSPGLDKVPNFWLNALTSTHGLLTELFNKLLHHPEETPGWLCEGTTYLLSKCSETGDPKNYRPITCLSTTYKILTSILTDRTYKHLEENNLLPLEQKGCRRGSYGCKDQLLINKMLLENCIGSKRNMSCAWIDYKKAFDSVPHNWILRSLDLSKVSPILIKFLKFNMSQWTTNLHLFHENGAIICNNIRIKRGIFQGDSLSPLLFCISLIPLSLELNSSQYGYKIGNKKISHLFYMDDLKVYGKNDSELEGLLKIVKGFSNDIGMEFGLSKCAKATFKKGRLASSTSVQLDNDTEIKNLEQEEVYKYLGVNESSGIQHATMKEKLRKELVRRTRCILKSELNSKNRITAINTLAVPVITYSYNIINWNISEIKKLDTKLRKMLTTYNMHHPKADIDRLYVPRKEGGRGLTQLELAYKTSTIGLLRYLSLTEDWMLNLVYRHQERKNMHSITKEGRKFARELEIDLSIEGGGKKEGEKVTENAQKLKALAKTNGKKAINEAWKNKPLHGKYAQRSLKPDVNLSDTHRWLSSAGLKAETEGFIMAAQDQSLRTRNYEANVLRNGADPKCRICGKSTETIDHLISGCHILAPNEYTNRHNRVGQYIHWKVCKFYEIEIVDTWYEHKPLPVIDSSKVTILWDFSIRTDRTIQANRPDIAVKDKLSKQCRLIDMSVPSDSNISVKEFEKVTKYKDLDIEVGRMWNMRAKTIPVIIGAPGMVKKGTDKYIKQIPGNIQLPEIQKIVLNSTADILRRTLSL

SEQ ID NO: 2694 - protein, 990 aa, Morbakka virulenta
MRERDGLVKLKRKKPQEKYLDMANSALADLCEEIEPDIIELNTIIYACAKTIESKVGVKRKPLKQRHQHKKPKWKRDIEKAVEEMRGEVSILDEMERGKDPKTRKSRKLKRKFKIESLLEIPPIKEELKQKMQAKAQRLRRFEKRSNFYRQNKVFQSDGKKFYRELGKKQEPVVEVPSQNGIENFWNGIWGEEKGFNETAAWISNTEANNANVNEQEWDDITMAELKSALTKSLKWKSPGLDKVPNFWLNALTSTHGLLTELFNKLLHHPEETPGWLCEGTTYLLSKCSETGDPKNYRPITCLSTTYKILTSILTDRTYKHLEENNLLPLEQKGCRRGSYGCKDQLLINKMLLENCIGSKRNMSCAWIDYKKAFDSVPHNWILRSLDLSKVSPILIKFLKFNMSQWTTNLHLFHENGAIICNNIRIKRGIFQGDSLSPLLFCISLIPLSLELNSSQYGYKIGNKKISHLFYMDDLKVYGKNDSELEGLLKIVKGFSNDIGMEFGLSKCAKATFKKGRLASSTSVQLDNDTEIKNLEQEEVYKYLGVNESSGIQHATMKEKLRKELVRRTRCILKSELNSKNRITAINTLAVPVITYSYNIINWNISEIKKLDTKLRKMLTTYNMHHPKADIDRLYVPRKEGGRGLTQLELAYKTSTIGLLRYLSLTEDWMLNLVYRHQERKNMHSITKEGRKFARELEIDLSIEGGGKKEGEKVTENAQKLKALAKTNGKKAINEAWKNKPLHGKYAQRSLKPDVNLSDTHRWLSSAGLKAETEGFIMAAQDQSLRTRNYEANVLRNGADPKCRICGKSTETIDHLISGCHILAPNEYTNRHNRVGQYIHWKVCKFYEIEIVDTWYEHKPLPVIDSSKVTILWDFSIRTDRTIQANRPDIVVKDKLSKQCRLIDMSVPSDSNISAKEFEKLTKYKDLEIEVGRMWNMSAKTIPVIIGALGMVKKGTDKYIKQITGNIQLPEIQRIVLNSTAHILRRTFSL

SEQ ID NO: 2695 - protein, 1048 aa, Morbakka virulenta
MRLIKRLKLYAKDAIDGGKIVRVGAPQLRWTRPLGEFTSKLKDTEWNEFEIQERAFRNSLTNKGILKNRFICKGDISKWTKVIKLVNNIFVKGGEFQQKKANGEPWNENLCKFCLRILKCMPHNPTTDLLSGDIPVILRLEKQISYITEAVQPFFTKHQPSVSRESVSRSKLTNLWLHNRKKALEVIKNDNKWPQRSLFEIRQEETEEFYEKKKLFIIQRNKNNRGKPQGNSQVICNLSVNLFTKAEIESVIKKLPDRKSPGLDGVQYEDVKKNIDSVIRDLVDSFNVTLINRKVPSDWKHDLVKRIPKKNFQQQDPTTLRDISLSSVIYKIFSRCIIQRILPTIAPQISFWQRAFMPGRNRQDLIFCLKTTLGDFKHLSTKIHILFIDFADAYGSVEHEEIKRTLREYDIPDDYCAIIEDIYDNPSFQVICGDTLSQKITITRGTKTGDPLSVIIFLMIINKVLQPAYNHALTTLTIENEKKIRPLPIQAYADDIALIAYDYNMLIEMIQASEPLFSRAGLNVKTSKCALFYERRSGNNWYKGKNDRKPTLKVQGEKIKVYKRNEGYKYLGKSLTVAGEDEKQIKEFIEDFKNIIDKIESCSLPVPLKMSAFNNMALAKILHHFDNSKLEEKQLEEMDSKISTTVKKMFNLYPKTTDKTFYISRLQGGLGIKKPSNVYRATRIAHLMKMLNHDDSNIQHIARESLKLDMRSRGVKMTNEENNFLGYELDNNNRLMKRKTYGGNSDWPDLLHHVNKMKGKVVYKGDSAIILVGGREINQRNLKQEIEKEFERIDLLECLELRMQGNFIKMENIEKKISHQIYYGWKLSDRLVVFIVRARMNQLPCNQIINMWNKEHQKRCTLCNHSIESVAHLLSSCRKFKDLYSRRHDRIVNTVSEKIRKSNPTSHVFVNKMANTVFPAFRNDIEQISGRKPDIVELKENGQECEIIEITVCFDMYMEQSYIGKTEKYKELIRILEQNGIKANINVLCFGSLGSVHNKVRICFKRLGLSNDEAKTTMKWCGVSNMINANIIWRERCKLLHEERNSEQ

SEQ ID NO: 2696 - protein, 1019 aa, Morbakka virulenta
MRLIKRLKLYAKDAIDGGKIVRVGAPQLRWTRPLGEFTSKLKDTEWNEFEIQERAFRNSLTNKGILKNRFICKGDISKWTKVIKLVNNIFVKGGEFQQKKANGEPWNENLCKFCLRILKCMPHNPTTDLLSGDIPVILRLEKQISYITEAVQPFFTKHQPSVSRESVSRSKLTNLWLHNRKKALEVIKNDNKWPQRSLFEIRQEETEEFYEKKKLFIIQRNKNNRGKPQGNSQVICNLSVNLFTKAEIESVIKKLPDRKSPGLDGVQYEDVKKNIDSVIRDLVDSFNVTLINRKVPSDWKHDLVKRIPKKNFQQQDPTTLRDISLSSVIYKIFSRCIIQRILPTIAPQISFWQRAFMPGRNRQDLIFCLKTTLGDFKHLSTKIHILFIDFADAYGSVEHEEIKRTLREYDIPDDYCAIIEDIYDNPSFQVICGDTLSQKITITRGTKTGDPLSVIIFLMIINKVLQPAYNHALTTLTIENEKKIRPLPIQAYADDIALIAYDYNMLIEMIQASEPLFSRAGLNVKTSKCALFYERRSGNNWYKGKNDRKPTLKVQGEKIKVYKRNEGYKYLGKSLTVAGEDEKQIKEFIEDFKNIIDKIESCSLPVPLKMSAFNNMALAKILHHFDNSKLEEKQLEEMDSKISTTVKKMFNLYPKTTDKTFYISRLQGGLGIKKPSNVYRATRIAHLMKMLNHDDSNIQHVARESLKLDMRSRGVKMTNEENNFLGYELDNNNRLMKRKTYGGNSDWPDLLHHVNKMKGKVVYKGDSAIILVGGREINQRNLKQEIEKEFERIDLLECLELRMQGNFIKMENIEKKISHQIYYGWKLSDRLVVFIVRARMNQLPCNQIINMWNKEHQKRCTLCNHSIESVAHLLSSCRKFKDLYSRRHDRIVNTVSEKIRKSNPTSHVFVNKMANTVFPAFRNDIEQISGRKPDIVELKENGQECEIIEITVCFDMYMEQSYIGKTEKYKELIRILEQNGIKANINVLCFGSLGSVHNKVRICFKRLGLSHDEAKTTMK

SEQ ID NO: 2697 - protein, 1048 aa, Morbakka virulenta
MRLIKRLKLYAKDAIDGGKIVRVGAPQLRWTRPLGEFTSKLKDTEWNEFEIQERAFRNSLTNKGILKNRFICKGDISKWTKVIKLVNNIFVKGGEFQQKKANGEPWNENLCKFCLRILKCMPHNPTTDLLSGDIPVILRLEKQISYITEAVQPFFTKHQPSVSRESVSRSKLTNLWLHNRKKALEVIKNDNKWPQRSLFEIRQEETEEFYEKKKLFIIQRNKNNRGKPQGNSQVICNLSVNLFTKAEIESVIKKLPDRKSPGLDGVQYEDVKKNIDSVIRDLVDSFNVTLINRKVPSDWKHDLVKRIPKKNFQQQDPTTLRDISLSSVIYKIFSRCIIQRILPTIAPQISFWQRAFMPGRNRQDLIFCLKTTLGDFKHLSTKIHILFIDFADAYGSVEHEEIKRTLREYDIPDDYCAIIEDIYDNPSFQVICGDTLSQKITITRGTKTGDPLSVIIFLMIINKVLQPAYNHALTTLTIENEKKIRPLPIQAYADDIALIAYDYNMLIEMIQASEPLFSRAGLNVKTSKCALFYERRSGNNWYKGKNDRKPTLKVQGEKIKVYKRNEGYKYLGKSLTVAGEDEKQIKEFIEDFKNIIDKIESCSLPVPLKMSAFNNMALAKILHHFDNSKLEEKQLEEMDSKISTTVKKMFNLYPKTTDKTFYISRLQGGLGIKKPSNVYRATRIAHLMKMLNHDDSNIQHVARESLKLDMRSRGVKMTNEENNFLGYELDNNNRLMKRKTYGGNSDWPDLLHHVNKMKGKVVYKGDSAIILVGGREINQRNLKQEIEKEFERIDLLECLELRMQGNFIKMENIEKKISHQIYYGWKLSDRLVVFIVRARMNQLPCNQIINMWNKEHQKRCTLCNHSIESVAHLLSSCRKFKDLYSRRHDRIVNTVSEKIRKSNPTSHVFVNKMANTVFPAFRNDIEQISGRKPDIVELKENGQECEIIEITVCFDMYMEQSYIGKTEKYKELIRILEQNGIKANINVLCFGSLGSVHNKVRICFKRLGLSNDEAKTTMKWCGVSNMINANIIWRERCKLLHEERNSEQ

SEQ ID NO: 2698 - protein, 1048 aa, Morbakka virulenta
MRLIKRLKLYAKDAIDGGKIVRVGAPQLRWTRPLGEFTSKLKDTEWNEFEIQERAFRNSLTNKGILKNRFICKGDISKWTKVIKLVNNIFVKGGEFQQKKANGEPWNENLCKFCLRILKCMPHNPTTDLLSGDIPVILRLEKQISYITEAVQPFFTKHQPSVSRESVSRSKLTNLWLHNRKKALEVIKNDNKWPQRSLFEIRQEETEEFYEKKKLFIIQRNKNNRGKPQGNSQVICNLSVNLFTKAEIESVIKKLPDRKSPGLDGVQYEDVKKNIDSVIRDLVDSFNVTLINRKVPSDWKHDLVKRIPKKNFQQQDPTTLRDISLSSVIYKIFSRCIIQRILPTIAPQISFWQRAFMPGRNRQDLIFCLKTTLGDFKHLSTKIHILFIDFADAYGSVEHEEIKRTLREYDIPDDYCAIIEDIYDNPSFQVICGDTLSQKITITRGTKTGDPLSVIIFLMIINKVLQPAYNHALTTLTIENEKKIRPLPIQAYADDIALIAYDYNMLIEMIQASEPLFSRAGLNVKTSKCALFYERRSGNNWYKGKNDRKPTLKVQGEKIKVYKRNEGYKYLGKSLTVAGEDEKQIKEFIEDFKNIIDKIESCSLPVPLKMSAFNNMALAKILHHFDNSKLEEKQLEEMDSKISTTVKKMFNLYPKTTDKTFYISRLQGGLGIKKPSNVYRATRIAHLMKMLNHDDSNIQHIARESLKLDMRSRGVKMTNEENNFLGYELDNNNRLMKRKTYGGNSDWPDLLHHVNKMKGKVVYKGDSAIILVGGREINQRNLKQEIEKEFERIDLLECLELRMQGNFIKMENIEKKISHQIYYGWKLSDRLVVFIVRARMNQLPCNQIINMWNKEHQKRCTLCNHSIESVAHLLSSCRKFKDLYSRRHDRIVNTVSEKIRKSNPTSHVFVNKMANTVFPAFRNDIEQISGRKPDIVELKENGQECEIIEITVCFDMYMEQSYIGKTEKYKELIRILEQNGIKANINVLCFGSLGSVHNKVRICFKRLGLSNDEAKTTMKWCGVSNMINANIIWRERCKLLHEERNSKQ

SEQ ID NO: 2699 - protein, 1130 aa, Morbakka virulenta
MSNIDLLHNGVDEAGTNGEGLSTGRCPIDEQGGLGRNHATATVRRKRGGKIDWSDLNGTVMECYILSEPERRGYMDRMREIWLQKAMFEVTKQHLGDQVRQIKKKGWLTDVEIEEIKRKAHGLDNTSNPERDNRSDNPETNESNILGKANEREEEVNHAQEEPELVEEDEVQLTDEELEIAEKLHNIMQSNKRERLPSIKKINKKKILVEVQKVNEVLNKIKSNDITTTNDLIYAAAVVVTEKLGVKMSKRDTAKEPWWKRRLEDQIKQLRKDIARVEILNNGGKIKSRFRVLLQKKYWLKQKGYKRVIEELKQRIKAKAAKVKRYKNRIEQFRQNRLFQTDQGRLYKELNGEEAVDLAPEKEEAKRFWSDIWSKEVKHNNDAEWLKKIREEQMGRFKQDRIEITISKVKKVLKGMPNWKSAGPDLVQGFWLKNFTAMHDRITVQLSACLEKGQTPQWMTKGRTVLLLKDIKKGNIVSNYRPITCLPIMWKLLTGMIAEDVYTHLEGRGVLPEEQKGCKKGSRGTNDLLYIDQQILREVKRRKKNLATAWIDYKKAYDNVPHSWIQECLRIFGIADNVVSLLDQNITWKTELTSGNEVIGEVEIKRGIFQGDTLSPLLFVLAMIPLTLVLRKAKAHYEFTNGEKINHLFFMDDLKLFARNEKALNSLVQTVRVVSEDIGMKFGIEKCAMLVLKRGNITKSDGIALPDDTIIKAMNDGDSYKYLGIMEADQILCKEMKDKVKKEYFRRIKKVLKSKLNGGNSITAINTWAVSLLRYSAAFLSWTREELRVIDRQTRKVMTMYRALHPRDSVDRIYLPRKEGGRGLVSIEDCVDIAELSLKEYVMKSKEKLISAARGSVTEEVESAESYKKRRKEERRTNIRGKELHGQHFRQMKDVGAKESWTWLQKGELKKETEGMIMAAQSQSLRTNAIKARIDKSREDAKCRMCSEKDETIHHIVSGCSNLAQKEYKRRHDCVARALHWDILRQRGFEISDKWYQHEPESVVENEHFKVLWDFTVQTDLEIHARRPDIIIVDKNLNETIIIDVAILVDVKIRNKEQEKIIKYQDLAREIRKIWNVSTKVIPIVIGALGTVTGRLEQYLKEIGVTTRIELIQKSTLLGTARIIRQVLYI

SEQ ID NO: 2700 - protein, 1281 aa, Salvelinus namaycush
MSGDKNGSVKVNYRSEHCRKRSRSWSSGPEGEESPPRKLVICENISSQDKSHASDPDLPDEPMVRADVGSVAPQCVGKPKTPTPGSKDGDGSVVKPPQPVLAVKNVPTSSSIRKDALSTLLISLPIQDLGCGKCNERLRTVGSAVKHYSVFHSAVRVIFVCRMCGKSSGNSHSISCHTPKCRGKAETRMESDSDHVCGQCRERFTTAMGLTQHKRHKHIALYCNEKESVRSAKVTGKKSAAGRWSEWEVKEMERLSVELVGTKNINQLIAARLDNGRTAEQVRDKRRNMRPERGQGDAIKEADDERNLIVWLSKPVTPSTSPDTIRGILRGKVNGGATEDGVKIGEVTLSLRGVEQDPSLLNTSALELQRLLGRGSESRGRLNPPRESKSRLPNERQKLMRPAGYKMKQKLYINNRPRLAKLILDGKREGKATSPTPEVANAFRNRWEASEEYHGLGRFCGRGEADSGEFRSLISAAEVKENLGAIRNGTAAGPDGITKKALVEWDPTGGKLAVTFSVWLTTGTLPGPFKRCRTTLIPKTDDPMLLTQVAGWRPITIGSVVLRLYSRILTHRLARACPISPRQRGFISSPGCSENLMILGGLIGLSRAKGEMLAVVLVDFARAFDSVSHSHILEALRRRGLDEHIIRIVGDSYTDVTTTIKINGEKSAPIDVRVGVKQGDPMSPLLFNLAIDPMIDTLERRGSGYRMGEKQITALAFADDLVLVSSSWSGMARNIKILEEFCRLTGLRIQPRKCHGFLAQGIQGVRTINLCEPWIMCGEELHMVGPEESVAYLGLRVSPWYGIMEPEPVERLRDWIRSIGRSSLKPSQRVKMLNAYAIPRMIYQADHGGLGQGILSVLDGMIRSAVKGWLHLPKCTCDGLLYSRCQDGGLGIVKMAHQIPSTQARRVYRLWHSEDAITRLVTRETVEPETYLGMWLRAGGDETSLPPLDERVEGPVQGTDPADSVKHANPVAPNWRKGEFLRWQNLTSQGIGVQAFGGDKNSNHWLANPETLGSRERHYIAGLQLRANVYPTREALSRGRGDLPKICRLCLSSTESCSHILGQCPAVKDSRIRRHHKLCDLLADEAESAGWKVTREMCCRTRAGALRRPDLVFVKNDSALVVDVTVRYEMAFDTLMMAYAEKVARYTPIIPFVRAALKAKKVKVFGFPLGARGKWPSDNGVLLHALGLKVERRKQLAKLFSRRALLYSLDVLRDFYRIEGEGVDSGEESGSSLPLAHSEAIEGCLPHGGGSPNTFHLVGESPNGGTQSPILERNPSLLGDP

SEQ ID NO: 2701 - protein, 1233 aa, Salmo salar
MSDKGIVEMSGCDEIICRNKHCLKRRWAWISGPKGETSPPCKRGTCKNVHIQDKSQTSDPDPLDAPEAREDEGSVVSQCVGESKIPTLASRDEGSDIVLPPQPVQAECVNPASCIVDSQAQESLLVSLPIHDSSCGRCERPLGSVGKAVKHFKEIHPAAPVVYVCRKCGKSNENSHAISCHVPKCKGVTEAMVESDSDFVCGHCPKRFKKASGLTQHKRHKHIAIYCREKEGVLTAKKGRKSAGDDWTREEEEELMRLSNKMAGLREVNRRVADYLGSGRTAEQVRQRRRLLRLKESESGEPKEAIERREFISMLSKPGKPSTPQCGIRGLLHERLIGDVTKDGIQIGEVTLSLRRAEQDPALLVSSALELQRLLGRGARNPSRSNHSPNSRATLPNDKIKRSRKAEYHRVQELYGKKQSRLAKYILDGNAGVEAVSPPLEVANEFKKRWEVTEAYHGLGQFGSSRGADNGGFGLPISAAEVCENLGDIKNGTAAGPDGITKLALRGWDPTGAKLAETFSIWLTLGTLPVPFKKCRTTLIPKTEDPTVLAQAAGWRPLTIGSVVLRLYSRILTHRLTRACPISPRQRGFISSPGCSENLMILGGLIKRSMGSGERLAVVLVDFARAFDSVSHVHILEVLRQRGLDEHVIGIIGNTYTDVTTTITVSGEPSPPIDVKVGVKQGDPMSPLLFNLAIDPLIETLECRGMGYAMDDQQITTLAFADDLVLVSSSWDGMAHNILILEEFCRLTGLKIQPKKCHGFLIQKIQRARMINLCQPWIMCGEELHMVGPEESVAYLGLRVSPWRGIMEPEPVERLRNWIRLIGRSSLKPSQRVRMLNVYAVPRLVYRADHGGLGASVLNVLDGMIRKAVKAWFHLPPSTCDGLLYSRCQDGGLGIGKLACQIPSTQFRRVFRLWHSDDAITRLVTRKTVEQKEYLGMWLRAGGDEASLPPFESRSELAVRCADPAGSVKLKRPVTPNWRQGEFLRWQNLTSQGIGIQAFGKDRNSNHWLANPETMGSRERHYIAGLQLRANVYPTREALARGREDLPTVCRHCLSGTESCSHILGQCPAVKDSRIMRHHKLCDLLADEAESTGWNVIREMCCRTRAGALRRPDLVFVKKGIALVVDVTVRYEMAYDTLRSAAGEKVARYTPITQYVATVLKVGKVKVFGFPLGARGKWPVGNNRLLHALGVKGGRGKQLARLFSRRALLYSLDVLRDFYRVEGVMVNSDDESE

SEQ ID NO: 2702 - protein, 1258 aa, Salvelinus namaycush
MSGDKNGSVKVNYRSEHCRKRSRSWSSGPEGEESPPRKLVICENISSQDKSHASDPDLPDEPMVRADVGSVAPQCVGKPKTPTPGSKDGDGSVVTPPQPVLAVKNVPTSSSIRKDALSTLLISLPIQDLGCGKCNERLRTVGSAVKHYSVFHSAVRVIFVCRMCGKSSENSHSISCHTPKCRGKAETRMESDSDHVCGQCRERFTTAMGLTQHKRHKHIALYCKEKESERSAKVTGKKSAAGRWSEWEVKEMERLSVELVGTKNINQLIAARLDNGRTAEQVRDKRRNMRPERGQGDAIKEADEERNLIVWLSKPVTPSTSPDTIRGILRGKVNGGATEDGVKIGEVTLSLRGVEQDPSLLITSALELQRLLGNGSESRGRLNPLRENKSGLPNERNKFVKPVGYGRVQYLYVNNRPRLAKLILDGKGRRGATSPSPEIAMAFKSRWEASEEYIGLGRFCAWGDADSGEFRSLISAAEVKENLGAIRNGTAAGPDGITKKTLVEWDPTGTKLASTFSVWLTTGTLPGPFKKCRTTLIPKTDDPILLTQEAGWRPITIGSVVLRLYSRILTHRLARACPISPRQRGFISSPGCSENLMILGGLIGLSRAKGEMLAVVLVDFARAFDSVSHSHILEALRRRGLDEHIIRIVGDSYTDVTTTIKINGEKSAPIDVRVGVKQGDPMSPLLFNLAIDPMIDTLERRGSGYRMGEKQITALAFADDLVLVSSSWSGMARNIKILEEFCRLTGLRIQPRKCHGFLAQGIQGVRTINLCEPWIMCGEELHMVGPEESVAYLGLRVSPWYGIMEPEPVERLRDWIRSIGRSSLKPSQRVKMLNAYAIPRMIYQADHGGLGQGILSVLDGMIRSAVKVWLHLPKCTCDGLLYSRCQDGGLGIVKMAHQIPSTQARRVYRLWHSEDAITRLVTRETVEPETYLGMWLRAGGDETSLPPLDERVEGPVQGTDPADSVKHANPVAPNWRKGEFLRWQNLTSQGIGVQAFGGDKNSNHWLANPETLGSRERHYIAGLQLRANVYPTREALSRGRGDLPKICRLCLSSTESCSHILGQCPAVKDSRIRRHHKLCDLLADEAESAGWKVIREMCCRTRAGALRRPDLVFVKNDSALVVDLTVRYEVAFDTLRMAYAEKVARYTPITPYVRAALKVRKAKVFGFPLGARGKWPDDNGRLLRALGVSAARGKQLAKLFSRRALLYSLDVLRDFYRVEGAAVDSDGESGSSHAQDRSVAVEGGRSQGGGSPNTIRPV

SEQ ID NO: 2703 - protein, 1214 aa, Salmo salar
MSGKRIVEMSGCDEKICQNKHCLKRRWAWISGPKGETSPPRKRGTCENVSFQDKSHASDPDPLKAPEAREDAGSVAPQWVGEIKTPSLTSRDGVSEVVLPPQPVHAEEYPSQRLKGQGYEDHLLISLPVCDLRCGRCERPLETVGKAVRHFAVAHPTVSVVFKCQKCEKSSKNSHSISCHIPKCKGMTETRTDVEGDHGCDHCQEKFTTAMGLTQHKRHRHIVQYCKEKEGEMTARRKGEVEAVKWSEWEESEVARLSDGLAGLKMINRRIADSLGTGKTAEQVRQKRRRMRPEKVRCDKPKEAKDKSNLIKMLSIPSATPTPQTGLKGFLLGELNGVATKGEVQIGGVTLSLRGVEQDSALLNTSALELQRLLGGRAGSANPLSLQRERETTLPSERRKTKQGEYRRVQKMFRSNEKKIAKYILDGNGDGEAASPPLEIALAFKSRWEEVETFHGLGQFYSRGEADGVVFRSLISMSEVCENLGAIKNNTAAGPDGITKPALLEWDPTGAKLAAIFSIWLTSGTLPGPFKKCRTTLIPKTDDPILLTQVAGWRPLTIGSVVLRLYSRILTHRLERACPINPRQRGFISSPGCSENLMILGGLIKRSWAKGERLAVVLVDFARAFDSVSHSHILEILRQRGLDEHIIGIVGDSYTDVTTTITVSGEQSPPIDMRVGVKQGDPMSPLLFNLALDPMIDTLERYGLGYRMGEQQITALAFADDLVLVSDSWEGMACNIRILEEFCRLTGLRIQPRKCHGFLIQKIQRARSVNLCKPWIVCGEELHMVGPEESVSYLGMKVSPWHGIMEPDPVERLCNWISSIGRSPLKPSQKVRMLNVYAAPRMTYQADHGGLGPIVLNVLDGMIRKAVKVWLHLPLCTCDGLLYSRCQDGGLGIVKLACQIPSIQARRVYRLWHSKEAITRVVTRRTVEAEEYRGMWLRAGGSEAGLPPLEDREEGAVQCTDTAGSVKPKNPVIPDWRRAEFLKWQNLTAQGVGVQVFGGDKNSNHWMANPETLGSKERHYIAGLQLRANVYPTREALSRGRPDLPKVCRQCLAGTESCAHILGQCPAVKDSRIRRHHKLCDLLASEAESAGWTVIREMCCRTRAGALRRPDLVFVKTGFALVVDVTVRYEMAYDTLMGAAAEKVARYTPITPYVAMTLKARRVKVFGFPLGARGKWPGSNDRLLKAMGVGGGRRKQLAKLFSRRALLYSLDVLR

SEQ ID NO: 2704 - protein, 1266 aa, Salvelinus namaycush
MSGDKNGSVKVNYRSEHCRKRSRSWSSGPEGEESPPRKLVICENISSQDKSHASDPDLPDEPMVRADVGSVAPQCVGKPKTPTPGSKDGDGSVVKPPQPVLAVKNVPTSSSIRKDALSTLLISLPIQDLGCGKCNERLRTVGSAVKHYSVFHSAVRVIFVCRMCGKSSENSHSISCHTPKCRGRAETRMESDSDHVCGQCRERFTTAMGLTQHKRHKHITLYCKKKERERSAKVTGKISARGRWSEGETREVERLSKELVGRKNVNKLIADCLGSGKSAEQVREKRRRMRCGRITGDKTKEADEESNLIIWLSKPGTPSTSPDTIRGILRGKMNGGATNDGVEIGKVTLSLRGVEQDSSLLNTSALELQRLLGKRSESRGRLNPSKESKSRLPNERKKVVKPAGYGLRQNLYRNNKPRLAKLILDGRKRGETTSPSPEIAMAFRKRWEASEEYHGLGQFRAWGDADSGEFRSLISAAEVKENLGAIRSGTAAGPDGITKEKLLEWDPTGAKLAVTFSVWLTTGTLPGPFKECRTTLIPKVDDPILLTQMAGWRPLTIGSVVLRLYSRILTHRLARACPISPRQRGFISSPGCSENLMILGGLIGKSRARGEMLAVVLVDFARAFDSVSHSHILEALRRRGLDEHIIRIVGDSYTDVTTTIKINGEKSAPIDVRVGVKQGDPMSPLLFNLAIDPMIDTLERRGSGYRMGDKQITALAFADDLVLVSSSWSGMARNIKILEEFCRLTGLRIQPKKCHGFLAQGIQGVRTINLCEPWIMCGEELHMVGPEESVAYLGLRVSPWYGIMEPEPVERLRDWIRSIGRSSLKPSQRVKMLNAYAIPRMIYQADHGGLGQGILSVLDGMIRSAVKGWLHLPKCTCDGLLYSRCQDGGLGIVKMAHQIPSTQARRVYRLWHSEDAITRLVTRETVEPETYLGMWLRAGGDETSLPPLDERVEGPVHGTDPADSVKHANPVAPNWRKGEFLRWQNLTSQGIGVQAFGGDKNSNHWLANPETLGSRERHYIAGLQLRANVYPTREALSRGRGDLPKICRLCLSSTESCSHILGQCPAVKDSRIRRHHKLCDLLADEAESAGWKVTREMGCRTRAGALRRPDLVFVKNDSALVVDLTVRYEMAYDTLMSAAAEKVARYTPTVPYIMSVMKVRKAKVFGFPLGARGKWPVSNNKLLRALGVSDVRSRRVAKLFSRRALLYSLDVLRDFYRVEGRGADSEVESGSSLPLAHSENIEGCLPREGGTLSPLLERNPSVLGDP

SEQ ID NO: 2705 - protein, 1241 aa, Salmo salar
MSEKRIVEMSGCDEKICQNKHCLKRRWAWISGPKGETSPPRKRGTCENVSLQDKSQASNPDPPEAPEAREDAGSLAPQCVGESKTLTPIARDGGGNVVPPPQPVLAVKSGGKMQAPANHTEYPPGAVLISLPVYDLKCGRCERALGTVGKAVKHYAVVHSAVPVFFVCRRCGRSSENSHSISCHVPKCKGVIETRMESDSDYVCGHCQKRFTTAMGLTQHGRHKHIALYCERKEGERTAGKKRIKWMEDEEEGVERRELARLCEKMAGDKHINSQVAVSLKTGKTAERVRQIRRKLRRGRMQEGSLQEVTNGRNLIGLLSKPGTPPTPKEGLHGILREAILGDGTEGGVQIGEVTLTLRGVEQDSALLNSSALELQRLLGRGSGAPGGLNQREERRPALPSERVYKNRRAEYHRMQELYENKQSRLGKYILDGNVGMTAASPPLEVALAFKSRWEVTEAYRGLGQFCSEGKADNGVFRSLISAAEVYENLRAIKNGTAAGPDGITKDALMEWDPSGAKLAATFSVWMAAGALPGAFKKCRTTLIPKTDDPMVLAQAAGWRPLTIGSMVLRLYSRVLTHRLARACPINPRQRGFVSSPGCSENLMILGGLIKMSWARSERLAVVLVDFARAFDSVSHLHILEILRQRGLDEHIIGIVGDSYTNVSTAIKVNGEMSPPVDVRVGVKQGDPMSPLLFNLALDPMIDTLERYGLGYKLGDQQITTLAFADDLVLVSGSWEGMAHNILILEEFCNLTGLRIQPKKCHGFFTQKTRRARQVNPCKPWIMCGEELHMVGPGESVAYLGMRVSPWYGIMEPEPVERLSNWISSIGRSPLKPHQKVRMLGVYALPRMVYRADHGGLGPGTLDVLDGMIRRAVKGWLHLPPSTCDGLLYSRCQDGGLGIVKLACQIPSIQARRVHRLWYSKDAITRLVTRKAVEPKEYLGMWLRAGGSEASVPPLEGEEGRARQGRDPTDLMRPKCPVSPNWRQTEFLKWQDLTSQGVGVQAFGNDKNSNHWLANPETLGGRQRHYIAGLQLRANVYPTREALSRGRRDLPKVCRHCRSGTESCSHILGQCPTVKDSRIKRHHKLCDLLANEAESAGWKVIREMCCRTRAGALRRPDLVVVKSGYALVVDVTVRYEMAMDTLMVAAAEKVARYTPITPYVAAALKVGKVKVFGFPLGARGKWPTDNNRLLKALGVNGGRMKQLAKLFSRRVLLYSLDVLRDFYRAEGETVGSDDGREEDHS

SEQ ID NO: 2706 - protein, 1281 aa, Salvelinus namaycush
MSGDKNGSVKVNYRSEHCRKRSRSWSSGPEGEESPPRKLVICENISSQDKSHASDPDLPDEPMVRADVGSVAPRCVGKPKTPTPGSKDGDGSVVKPPQPVLAVKNVPTSSSIRKDALSTLLISLPIQDLGCGKCNERLRTVGSAVKHYAVFHSAVRVIFVCRMCGKSSENSHSISCHTPKCRGEAETRMESDSDHVCGQCRERFTTAMGLTQHKRHKHIALYCKEKERERSAKVTGKKSAAGRWSEWEVKEMERLSVELVGTKNINQLIAARLDNGRTAEQVRDKRRNMRPERGQGDAIKEADEERNLIVWLSKPGTPLTSPDTIRGSLRGKMKGDATKDGVKIGEVTLSLRGVEQDPTLLNTSALELQRLLGRGLETRGRLNPPRESKSRLPNERQKFVRPAGYGRRQNLYRNNRPRLAKLILDGKRRGEATSPSTEIATAFRSRWEAPEEYLGLGQFCARGKADSGVFRSLISATEVKENLGAIRNGTAAGPDGITKKKLVEWDPTGDKMAATFSVWLTTGTLPGPFKKCRTTLIPKTDDPILLTQMAGWRPITIGSVVLRLYSRILTHRLARACPISPRQRGFISSPGCSENLMILGGLIGSSRAKGEMLAVVLVDFARAFDSVSHSHILEALRRRGLDEHITGIVGDSYTDVTTTIKINGEESAPIDVRVGVKQGDPMSPLLFNLAIDPMIDTLERRGSGYRMGDKQITALAFADDLVLVSSSWSGMARNIKILEEFCRLTGLRIQPKKCHGFLAQGIQGVRTINLCEPWIMCGEELHMVGPEESVAYLGLRVSPWYGIMEPEPVERLRDWIRSIGRSSLKPSQRVKMLNAYAIPRMIYQADHGGLGQGILSVLDGMIRSAVKVWLHLPKCTCDGLLYSRCQDGGLGIVKMAHQIPSTQARRVYRLWHSEDAITRLVTRETVEPETYLGMWLRAGGDETSLPPLDERVEGPVQGTDPADSVKHANPVAPNWRKGEFLRWQNLTSQGIGVQAFGGDKNSNHWLANPETLGSRERHYIAGLQLRANVYPTREALSRGRGDLPKICRLCLSSTESCSHILGQCPAVKDSRIRRHHKLCDLLADEAESAGWKVTREMCCRTRAGALRRPDLVFVKNDSALVVDVTVRYEMAFDTLMMAYAEKVARYTPIIPFVRAALKAKKVKVFGFPLGARGKWPSDNGVLLHALGLKVERRKQLAKLFSRRALLYSLDVLRDFYRIEGEGADSGEESGSSLPLAHSEAIEGCLPHGGGSPNTFHLVGESPNGGTQSPILERNPSLLGDP

SEQ ID NO: 2707 - protein, 1281 aa, Salvelinus namaycush
MSGDKSLSEMGNYRSEHCRKRSRSWSSGPEGEESPPRKLVICENISSQDKSHASDPDLPDEPMVRADVGSVAPQCVGKPKTPTPGSKDGDGSVVKPPQPVLAVKNVPTSSSIRKDALSTLLISLPIQDLGCGKCNERLRTVGSAVKHYSVFHSAVRVIFVCRMCGKSSENSHSISCHTPKCRGKAETRMESDSDHVCGQCRERFTTAMGLTQHKRHKHIALYCKEKESERSAKVTGKKSAAGRWSEWEVKEMERLSVELVGTKNINQLIAARLDNGRTAEQVRDKRRNMRPERGQGDAIKEADEERNLIVWLSKPVTPSTSPDTIRGILRGKVNGGATEDGVKIGEVTLSLRGVEQDPSLLNTSALELQRLLGRGSESRGRLNPSRESKSRLPNERKKLAMPAGYRRKQNLYKNNRPRLAKLILDGNRRGVATSPSPEIAMAFKSRWEASEEYNGLGHFGAWGEADSGEFRSLISAAEVKENLGAIRNGTAAGPDGIKKETLVGWDPTGAKLAVMFSVWLTTGTLPGSFKKCRTTLIPKTDDPMLLTQVAGWRPITIGSVVLRLYSRILTHRLARACPISPRQRGFISSPGCSENLMILGGLIGSSRAKGEMLAVVLVDFARAFDSVSHSHILEALRRRGLDEHITGIVGDSYTDVTTTIKINGEESAPINVRVGVKQGDPMSPLLFNLAIDPMIDTLERRGSGYRMGDKQITALAFADDLVLVSSSWGGMARNIKILEEFCRLTGLRIQPKKCHGFLAQGIQGVRTINLCEPWIMCGEELHMVGPEESVAYLGLRVSPWYGIMEPEPVERLRDWIRSIGRSSLKPSQRVKMLNAYAIPRMIYQADHGGLGQGILSVLDGMIRSAVKGWLHLPKCTCDGLLYSRCQDGGLGIVKMAHQIPSTQARRVYRLWHSEDAITRLVTRETVEPEKYLGMWLRAGGDETSLPPLDERVEGPVQGTDPADSVKLANPVAPNWRKGEFLRWQNLTSQGIGVQAFGGDKNSNHWLANPETLGSRERHYIAGLQLRANVYPTREALSRGRGDLPKICRLCLSSTESCSHILGQCPAVKDSRIRRHHKLCDLLADEAESAGWKVTREMCCRTRAGALRRPDLVFVKNDSALVVDVTVRYEMAFDTLMMAYAEKVARYTPIIPFVRAALKVKKVKVLGFPLGARGKWPSDNGVLLHALGVKVERRKQLAKLFSRRALLYSLDVLRDFYRIEGEGVDSGEESGSSLPLAHSEAIEGCLPHGGGSPNTFHLVGESPNGGTQSPILERNPSLLGDP

SEQ ID NO: 2708 - protein, 827 aa, Oncorhynchus tshawytscha
MFQKNQAQLSKRILDGDVSGAKVTPSLEIALAFKRRWEVTENYYGLGQFSSAGKAVNGEFESLVSAAEVCENLGAIKNGTAAGPDGVTKTALLKWDPTGAKLAATFSIWLTAGTLPGPFKECRTTLIPKSGDPVVLTQEAGWRPLTIGSVVLRLYSRILTHRLARACPISPRQRGFISSPGCSENLMILDGLIRQSWARSERLAVVLVDFARAFDSVSHVHILDVLRQRGLDEHIIGVVGDLYTSITTTITVSGELSPPIDVRVGVKQGDPMSPLLFNLALDPMIETLERCGQGYQLDDRQITTLAFADDLVLVSGSWDGMAHNILILEEFCRMTGLKIQPRKCHGFLIQKAGGARLVNLCEPWIMCGEILHMVGPEESVAYLGMMVSPWHGIVEPEPVERLRNWISSIGRSPLKPSQKVRMLGGYAVPRMAYRADHGGLGPKVLTVLDGMIRKAVKEWLHLPRCTCDGLLYSKNQDGGLGIVKLACQIPSIQARRVYRLWHSKDDITRLVTRRAVKAEEYRGMWLRAGGEEASLPPLELVIRGAVQGTEPTCSVKPKSPAAPNWRQEEFLRWQNLTSQGVGVQVFGRDRNSNHWLANPETWGFRQRHYIAGLQLRANVYPTREALARGRQDLLKTCRHCPSETESCSHILGQCPAVKDSRIARHHKLCELLTNEAESAGWSVTREMCCRTRAGALRRPDLVCVKDGNALVVDVTVRYEMAFDTLKVAAAEKVARYTPITQYVKTALKAKKVKVYGFPLGARGKWPVGNNKLIRALGVSGSREKRLAKLFSRRALLYSLDVLRDFYRVDGETVDSDDLSESDLSEAW

SEQ ID NO: 2709 - protein, 1278 aa, Oncorhynchus kisutch
MSSIHFPTQSVQTGGSNLDPRMLPQGHGREEQSLEERIEREKLQAKIRSQTSERKKKKCKTKHCLEMKGLWNSGPKGEKSPPRKRGICETVSFQDTSQASDPDPPNDLKERRDVGSVASQCVGEIKTPALSSWDGGRDVVMPPQPVHTVENSKEASTLASHSIVPTGAQLFLLPVRDVICGRCGRALSTIGSTVKHFAVVHPEVQVLFGCRACGKSSENSHSISCHIPKCKGVEETRMESDSDHICGHCLARFATARGLTQHKRHKHIAMYCMEKERGQTVGMKKIQWIENKKKGVERRKLAFLSDKLAGMNSTSRQATDSQATGSTVEGARLIRRELRYGKVQTDALQEATEELLPKPGTPPTPQTGLRGILREALIGEATYEGVRMGEVKLSLRGVEQDPTLLASSALELQRLLGGGAGSRARLNQSRERRPALPSEGMGETKTTEYHRIQLLYENNRSRLGEYILDGNVGGTAASPPLEVALAFKSRWEVTESYHGLGQFCSREVADNRVFQSLISAAEVGENLKAIKNGTAAGPDGITKEALKDWDPSGAKLAVTFSTWLTAGTLPEPFKKCRTTLIPKTSDPVLLTQEAGWRPLTIGSLVLRLYSRILTHRLARACPISPRQRGFISSPGCSENLMILGGLIKRSRREGEMLAVVLVDFARAFDSVSHLHILEALGQRGLDEHIIGIVKDSYTGVTTSIKVNEERFPPVDIRVGVKQGDPMSPLLFNLALNPLIDTLERYGLGYELDDQQITTLAFADDLVLVSGSWAGMAHNILILEEFCNRTGLRIQPGKCHGFLTQKTRRARLINLCEPWIMCGERLHMVGPEESVAYLGMRVSPWYGIMEPEPVERLRNWIRSIGRSPLKPSQKVKMLGIYAIPKMVYRADHGGLGPGILEVLDGMIRKAVKVWLHLPQCTCDGLLYSKCQDGGLGIVKLACHIPSIQVRRVYRLWHSDDAVTRIVTRRTVVRKEYLGMWLRAGGEGASLPPLEEERGSAVQGTDPAGSVRPSYPGSPNWRQAEYLKWQNLTSQGIGVQAFGGDKNSNHWLANPETLGSRERHYIAGLQLRANVYPTREALSRGRMDRTSVCRHCLLGTESCSHILGQCPAVKDSRIRRHHNLCELLASEAESAGWIVTREMCCRTRAGALRRPDLVFVKNENALVVDVTVRYEMAYDTLMVAAAEKVARYKPIARNVMAALKVKKVKVFGFPLGARGKWPDGNGRLLRALGVSRSREKRLAKLFSRRTLLYSLDVLRDFYRLGGEAVDSDDESEDSHP

SEQ ID NO: 2710 - protein, 1266 aa, Salvelinus namaycush
MSGDKSVSVKGNYRSEHCRKRSRSWSSGPEGEESPPRKLVICENISSQDKSHASDPDLPDEPMVRADVGSVAPQCVGKPKTPTPGSKDGDGSVVKPPQPVLAVKNVPTSSLTRKDAPSTLLISLPIQDLGCGKCKERLRTVGSAVKHYAVFHSAVLVIFVCRMCGKSSENSHSISCHTPKCRGEAETRMESDSDHVCGQCRERFTTAMGLTQHKRHKHIALYCKEKERERSAKVTGKVSATGRWSEWEVKEMERLGVELVGTKNINQLIAARLDNGRTAEQVRDKRRNMRPERGQGDTIKEANDERNLIVWLSKPGTPLTSPDTIRGSLRGKMKGDATKDGVKIGEVTLSLRGVEQDPTLLNTSALELQRLLGRRVETRGRLNPPRESKSRLPNERQKFVRPAGYGRRQNLYKNNRPRLAKLILDGKRRGEATSPSTEIATAFRSRWEAPEEYLGLGQFCARGKADSGVFRSLISATEVKENLGAIRNGTAAGPDGITKKTLVEWDPTGDKMAATFSVWLTTGTLPGPFKKCRTTLIPKTDDPILLTQMAGWRPITIGSVVLRLYSRILTHRLARACPISPRQRGFISSPGCSENLMILGGLIGSSRAKGEMLAVVLVDFARAFDSVSHSHILEALRRRGLDEHITGIVGDSYTDVTTTIKINGEESAPIDVRVGVKQGDPMSPLLFNLAIDPMIDTLERCGKGYKMGDKQITALAFADDLVLVSSSWSGMARNIKILEEFCRLTGLRIQPKKCHGFLAQGIQGVRTINLCEPWIMCGEELHMVGPEESVAYLGLRVSPWYGIMEPEPVERLRDWIRSIGRSSLKPSQRVKMLNAYAIPRMIYQADHGGLGQGILSVLDGMIRSAVKVWLHLPKCTCDGLLYSRCQDGGLGIVKMAHQIPSTQARRVYRLWHSEDAITRLVTRETVEPETYLGMWLRAGGDETSLPPLDERVEGPVQGTDPADSVKHANPVAPNWRKGEFLRWQNLTSQGIGVQAFGGDKNSNHWLANPETLGSRERHYIAGLQLRANVYPTREALSRGRGDLPKICRLCLSSTESCSHILGQCPAVKDSRIRRHHKLCDLLADEAESAGWKVTREMCCRTRAGALRRPDLVLVKNDSALVVDLTVRYEMAYDTLMSAAAEKVARYTPTVPYIMREMKVRKAKVFGFPLGARGKWPVSNNRLLRALGVSDERSKRVAKLFSRRALLYSLDVLRDFYRVEGRGADSEEESGSSLPIAHSENIEGCLPREGGTLSPLLERNPSVLGDP

SEQ ID NO: 2711 - protein, 1127 aa, Salmo salar
MRNPASCPKEAETVTLPVRDLRCGRCGTPLGTVGKVVTHYAAAHPAVSVIFACRECGRSSENSHPISCHVPKCKGVVEARMEPDSGYNCGHCPRSFTTVVGLTQHKRHKHIAHYCQEKEGEVTMREREKNGTRAGWSEREEDEVTRLEGELAEGKQKNRQIAESLGTGKTAEQVRMLRRKMRLAKARSDSTKEADHRSDLVAMLSKPGTPLTPPKALRRILRRKMEGGATKDGVQIGSVKLSLRGVEQDPALLNTAALELQRLLGGASRAQNPGNPAGERKTTLQREEGKMAKLIKYVRAQRMFQSNQSRLAKSILDGNGKVAAAASPPLEVASAFKRRWEVTEKYLGLGQFTSRGDADNGEFRSPISAVEVRENLGAIKNGTAAGPDGITKAALWKWDPSGAKLAATFSIWLTLGTLPETFKKCRTTLIPKTDDPILLTQAAGWRPLTIGSVVLRLYSRILTHRLARACPINPRQRGFISSPGCSENLMILGGLIKRSRAKGETLAVVLVDFARAFDSVSHLHILDVLGQRGLDEHVIGIVGDSYTNVTTTIAVNGERSPTVDVRVGVKQGDPMSPLLFNLALDPMIDTLERYGSGYKLDNEQVTTLAFADDLVLVSGSWGGMAHNIRILEEFCRLTGLRVQPKKCHGFLTQRVQEVRLVNHCTPWIMGGEQLHMVGSEESVAYLGLRVSPWHGIMEPEPVERLRGWISSIGRSPLKPSQKVRMLNVYALPRMIYQADHGGLRPNVLTVLDGMIRKAVKGWLHLPTCTCDGLLYSKCQDGGLGIGKLALQIPSIQARRVYRLWHSGDAITRLVTRRTVERKEYLGMWRRAGGDEENLPPLEGSAEGAAQCTEPTEPVRPKCLVTPDWRKAEFLRWQNLTAQGIGVQVFGGDRNSNHWLAKPEKLGARERHYIAGLQLRANVYPTREALARGGRDTAKICRHCLSETESCSHILGQCPAVKDSRVKRHHKLCGLLADEAESAGWNVTREMCCRTRAGALRRPDLVFVKNGNALVVDVTVRYEMAYDTLKVAAAEKVARYTPIIPYVKTALKVRTAKVFGFPLGARGKWPSSNGRLLQALGVSEGRRKRLAKLFSRRALLYSLDVLRDFYRTDGEAEVSEDEGGDSLP

SEQ ID NO: 2712 - protein, 1284 aa, Oncorhynchus kisutch
MYSKHFPTQSVQTGGPNVDPRMLLQGHGSEEQSLEANEKDKQKRKINTVQSSEHVKRTCKSKHCLVNDGLWISGPRGESGSPPRKIVICGKASFQDKSHASGPDPPNDLTGKEDVDSVVPQCVGKSKTPTPEARDGGRNVGQPPQPVQAAQVATVSRQGTGLIPSTLLVSIPVRDLRCGLCEKPLGAIGATVKHYKVVHPRVTVVYGCSVCGKSSKNSHSISCHVPKCKGVMGAGGEAGGDHGCGHCPKSFATVMGLTQHKRHQHIEVYCREKEGKVPAGKRGKSVRTALGRRGEESEIKRLSKELTGEQDVNRLIAESLGTGRTAEQVKQIRRKMRLEEMRMDQTKEACDKRDIVGMLSKPGRPPTPQNAIRRILRDRLVGDATEGGVQIGKVRLSLRGVEQNPTLLSTSALELQRSLRGGQRTRALRNPPGERKIALPNEGRLIERQMEYGVVQKMFLKNQARLSKRILDGDVSGAKVTPSLEIALAFKRRWEVTENYYGLGQFSSAGKAANGEFESLVSAAEVCENLGAIKNGTAAGPDGVTKTALLKWDPTGAKLAATFSIWLTAGTLPGPFKECRTTLIPKSGDPVVLTQEAGWRPLTIGSVVLRLYSRILTHRLARACPISPRQRGFIASPGCSENLMILDGLIRQSWARGEMLAVVLVDFARAFDSVSHVHILDVLRQRGLDEHIIGVVGDLYTSITTTIKVSGELSPPIDVRVGVKQGDPMSPLLFNLALDPMIETLERCGQGYQLDDQQITTLAFADDLVLVSGSWDGMAHNILILEKFCRMTGLRIQPRKCHGFLIQKAGGARLVNLCEPWTMCGEILHMVGPEESVAYLGMMVSPWHGIIEPEPVERLCNWISSIGRSPLKPSQKVGMLGCYAVPRMVYRADHGGLGPKVLMVLDGMIRRAVKEWLHLPMCTCDGLLYSEKQDGGLGVVKLACQIPSIQARRVYRLWHSKDDITRLVTRRAVKADEYRGMWLRAGGDEASLPPLEVVIRGAVQGTEPTGSVKPKSPVAPNWRQEEFLRWQNLTSQGVGVQVFGRDKNSNHWLANPEKWGFKQRHYIAGLQLRANVYPTREALARGRQDLPKTCRHCLSETESCSHILGQCPFVKDSRIARHHKLCDLLTNEAESNGWSVTREMCCRTRAGALRRPDLVCVKDGNALVVDVTVRYEMAFDTLKVAAAEKVARYTPITQYVKTALKVKRVRVYGFPLGARGKWPMDNNRLMRALGVSGSREKRLAKLFSRRALLYSLDVLRDFYRVDGVTVDSDDQSEGELSEAC

SEQ ID NO: 2713 - protein, 1278 aa, Oncorhynchus kisutch
MSSIHFPTQSVQTGGSNLDPRMLPQGHGREEQSLEERVEREKLQSKIRSQTSEKKKKKCKTKHCLEMKGLWNSGPKGEKSPPRKRGICETVSSQDTSQASDPDPPNDLKERRDVGSVASQCVGEIKTPALASWDGGRDVVMPPQPVHTVEISKEASTLASHSIVPTGAQLFLLPVRDVICGRCGRALSTIGSTVKHFAVVHPEVQVLFGCRACGKSSENSHSISCHIPKCRGVVETRMESDSDHRCGHCPARFATAVGLTQHKRHRHIAIYCMEKERGQTVGMKKIQWIENKKKGAERRKLTLLSDKLAGMNSTSRQATDSQATGSTVEGARLIRRELRYGKVQNDALQEATEELLPKPGTPPTPQTGLRGILRGALTGEATYEGVQIGEVKLSLRGVEQDPTLLTSSALELQRLLGRGAGAQVMLNQSRERRSALPSERMGKTKTTDYHRIQFRYENNQSRLAEYILDGNVGLTAASPPLEVALAFKSRWEVTEPYHGLGQFCSRGVADNRVFQSLISAAEVGENLKAVKNGTAAGPDGITKKAIKDWDPSGAKLAVTFSTWLTAGTLPEPFKKCRTTLIPKTSDPALLTQASGWRPLTIGSLVLRLYSRILTHRLARACPISPRQRGFISSPGCSENLMILGGLIKRSRREGERLAVVLVDFARAFDSVSHLHILEVLRQRGLDEHIIGIVQDSYTRVTTSIKVNEERVPPVDIRVGVKQGDPMSPLLFNLALDPLIDTLERYGLGYKLDDQQITTLAFADDLVLVSGSWEGMAHNILILEEFCNRTGLRIQPGKCHGFLAQKTRRARLINLCEPWIMCGEELHMVGPEESVAYLGMRVSPWYGIMEPEPVERLRNWIRSIGRSPLKPSQKVRMLGVYAVPRMVYRADHGGLGPKILEVLDGMIRKAVKVWLHLPQCTCDGLLYSRGQDGGLGIVKLACHIPSIQARRVYRLWHSEDVVTRMVTRRTVVRKEYLGMWLRAGGEGASLPPLEEERGSAVQGTDPAGSVRQIYPGSPNWRQAEYLRWQSLTSQGIGVQAFGGDKNSNHWLANPETLGSRERHYIAGLQLRANVYPTREALSRGRMDLTSVCRHCLLGTESCSHILGQCPAVKDSRIRRHHNLCELLASEAESAGWIVTREMCCRTRAGALRRPDLVFVKNENALVVDVTVRYEMAYDTLMVAAAEKVARYKPIALNVMAALKVKKVKVFGFPLGARGKWPDGNGRLLRALGVSRSREKRLAKLFSRRTLLYSLDVLRDFYRLGGEAVDSDDESEDSHP

SEQ ID NO: 2714 - protein, 1278 aa, Oncorhynchus kisutch
MSSIHFPTQSVQTGGSNLDPRMLPQGHGREEQSLEERIEREKLQAKIRSQTSERKKKKCKTKHCLEMKGLWNSGPKGEKSPPRKRGICETVSFQDTSQASDPDPPNDLKERRDVGSVASQCVGEIKTPALASWDGGRDVVMPPQPVHTVENSKEASTLASHSIVPTGAQLFLLPVRDVICGRCGRALSTIGSTVKHFAVVHPEVQVLFGCRACGKSSENSHSISCHIPKCRGVVETRMELDSDHICGHCPARFATAVGLTQHKRHRHIAIYCMEKERGQTVGMKKIQWIENKKKGVERRKLTLLSDKLAGMNSTSRQATDSQATDSTVEGARLIRRELRYGKVQNDALQEATEELLPKPGTPPTPQTGLRGILRGALTREATYEGVQIGEVKLSLRGVEQDPTLLASSALELQRLLGGGAGSRARLNQSRERRPALPSEGMGETKTTEYHRIQLLYENNRSRLGEYILDGNVGGTAASPPLEVALAFKSRWEVTESYHGLGQFCSREVADNRVFQSLISAAEVGENLKAIKNGTAAGPDGITKKGIKDWDPSGAKLAVTFSTWLTAGTLPEPFKKCRTTLIPKTSDPVLLTQEAGWRPLTIGSLVLRLYSRILTHRLARACPISPRQRGFISSPGCSENLMILGGLIKRSRREGEMLAVVLVDFARAFDSVSHLHILEALGQRGLDEHIIGIVKDAYTGVTTSIKVNEERFPPVGIRVGVKQGDPMSPLLFNLALNPLIDTLERYGLGYELDDQQITTLAFADDLVLVSGSWAGMAHNILILEEFCNRTGLRIQPGKCHGFLTQKTRRARLINLCEPWIMCGERLHMVGPEESVAYLGMRVSPWYGIMEPEPVERLRNWIRSIGRSPLKPSQKVKMLSVYAIPRMVYRADHGGLGPRILEVLDGMIRKAVKVWLHLPQCTCDGLLYSKCQDGGLGIVKLACHIPSIQVRRVYRLWHSDDAVTRIVTRRTVVRKEYLGMWLRAGGEGASLPPLEEERGSAVQGTDPAGSVRPSYPGSPSWRQAEYLKWQNLTSQGIGVQAFGGDKNSNHWLANPETLGSRERHYIAGLQLRANVYPTREALSRGRMDRTSVCRHCLLGTESCSHILGQCPAVKDSRIRRHHNLCELLANEAESAGWIVTREMCCRTRAGALRRPDLVFVKNENALVVDVTVRYEMAYDTLMVAAAEKVARYKPITLNVMAALKVKKVKVFGFPLGARGKWPDGNGRLLRALGVSRSRERRLAKLFSRRTLLYSLDVLRDFYRLGEEAVDSDDESEDSHP

SEQ ID NO: 2715 - protein, 1285 aa, Oncorhynchus nerka
MTSIHFPTQSVQTGGPTVDPRMLPQGHDREEQSLEEREVKERMQTEKPVQMSEHRKRMCKSKHCLVKVGLWNSGPKGEKAPPRKRGICETVSFQDISQASDPDPPNDLNGRWDVGSVASQCVGELKTPTLASWDGSRDVVMPPQPVHAVERKKRACTPASHSKEKIPKEAQLFLLPIRGVICERCGRALSTIGSTMKHFAVVHPEVQVLYGCRSCGKSGENSHSISCHIPKCRGVVETRMESDGDHICGHCPARFTSARGLTQHKRHRHIAIYCMEKERVQTAGKKKIQWIENKEKGVERRKLALLSDILAGKEPIKRQAADSQATGSTTEGARLIRRELRYGKVQNDALQEATEESNLTKLLSKPGTPPTPHTGLRGILREALIGEATYEGVQMGEVKLSLRGVEQDPVLLTSSALELQRLLGGGAGSLARLNHSRERRPALPSEGMGETKTTEYHRIQYLYENNRSRLGEYILDGNVGMTAASPPLEVAFAFKSRWEVTEAYHGLGQFCSRGVADNRVFQPLISAAEVSENLRAIKNGTAAGPDGITKKAIKEWDPSGAKLAVTFSTWLTAGTLPGPFKRCRTTLIPKTSDPVILTQVAGWRPLTIGSLVLRLYSRILTHRLARACPINPRQRGFISSPGCSENLMILGGLIKRSRREGEMLAVVLVDFARAFDSVSHLHILEVLRQRGLDEHIIRIVEDSYTGVTTSIRVNEERFPPVDIRVGVKQGDPMSPLLFNLALDPLIDTLERYGLGYELDDQQITTLAFADDLVLVSGTWEGMAHNILILEEFCNRTGLRIQPGKCHGFLAQKTRGARLINLCESWIMCGEKLHMVGPEESVAYLGMRVSPWYGIMEPEPVERLRNWIRSIGRSPLKPSQKVRMLSVYAIPRMVYRADHGGLGPKVLDVLDGIIRKAVKVWLHLPQCTCDGLLYSRGQDGGLGIVKLARQIPAIQARRVHRLWHSDDAITRIVTRRTVMRKEYLGMWLRAGGEGASLPPLEEERESAVQCTDPAGSVRPNYPGSPRWRQAEYLKWQNLTSQGIGVQAFGGDKNSNHWLANPETLGSRERHYIAGLQLRANVYPTREALSRGREDMTSVCRHCLLGTESCSHILGQCPSVKDSRIKRHHKLCELLANEAESAGWSVTREMCCRTQAGALRRPDLVFVKKENALVVDVTVRYEMAYDTLMVAAAEKVARYTPIARYVMAALKVKNVKVFGFPLGARGKWPAGNDRLLRTLGVSRSRERRLAKLFSRRTLLYSLDVLRDFYRLGGEAVDSDDDSVDSHP

SEQ ID NO: 2716 - protein, 1217 aa, Oncorhynchus kisutch
MKGLWNSGPKGEKSPPRKRGICETVSSQDTSQASDPDPPNDLKERRDVGSVASQCVGEIKTPALASWDGGRDVVMPPQPVHTVEKSKEASTLASHSIAPTGAQLFLLPIRDVICGRCGRALSTIGSAVKHFAVVHPEVQVLFECRACGKSSENSHSISCHIPKCRGVEETRMESDSDHICGHCPARFATARGLTQHKRHKHIAIYCMEKERGQTVGMKKIQWIENKEKGAERKTLALLSDKLAGMKSTSRQATDSQATGSAVEGARLIRRELRYGKVQNDALQEATEESKLNKLLSKPGTPPTPQTGLRGILRGALTGEATYEGVQIGEVKLSLRGVEQDPTLLTSSALELQRLLGKGAGARVMLNQSRERRSALPSERMGKTKTTDYHRVQFRYENNQSRLAEYILDGNVGLTAASPPLEVALAFKSRWEVTEPYHGLGQFCSRGVADNRVFQSLISAAEVGENLKAVKNGTAAGPDGITKKAIKDWDPSGAKLAVTFSTWLTAGTLPEPFKKCRTTLIPKTSDPALLTQAAGWRPLTIGSLVLRLYSRILTHRLARACPISPRQRGFISSPGCSENLMILGGLIKCSRREGERLAVVLVDFARAFDSVSHLHILEVLRQRGLDEHIIGIVKDSYTRVTTSIKVNEERVPPVDIRVGVKQGDPMSPLLFNLALDPLIDTLERYGLGYKLDDQQITTLAFADDLVLVSGSWEGMAHNILILEEFCNRTGLRIQPGKCHGFLAQKTRKARLINLCEPWIMCGEELHMVGPEESVAYLGMRVSPWYGIMEPEPVERLRNWIRSIGRSPLKPSQKVRMLGVYAVPRMVYRADHGGLGPKILEVLDGMIRKAVKVWLHLPQCTCDGLLYSRGQDGGLGIVKLACHIPSIQARRVYRLWHSEDAVTRMVTRRTVVREEYLGMWLRAGGEGANLPPLEEERGSAVQGTDPAGSVRLNYPGSPNWRQAEYLRWQSLTSQGIGVQAFGGDKNSNHWLANPETLGSRERHYIAGLQLRANVYPTREALSRGRMDLTSVCRHCLLGTESCSHILGQCPAVKDSRIRRHHNLCELLASEAESAGWIVTREMCCRTRAGALRRPDLVFVKNENALVVDVTVRYEMAYDTLMAAAAEKVARYKPIALNVMAALKVKKVKVFGFPLGARGKWPDGNGRLLRALGVSRSREKRLAKLFSRRTLLYSLDVLRDFYRLGGEAVDSDDESEDSHP

SEQ ID NO: 2717 - protein, 1283 aa, Oncorhynchus kisutch
MSSIHFPTQSVQTGGSNLDPRMLPQGHGREEQSLEERVEREKLQSKIRSQTSEKKKKKCKTKHCLEMKGLWNSGPKGEKSPPRKRGICETVSSQDTSQASDPDPPNDLKERRDVGSVASQCVGEIKTPALASWDGGRDVVMPPQPVHTVEKSKEASTLASHSIAPTGAQLFLLPIRDVICGRCGRALSTIGSAVKHFAVVHPEVQVLFECRACGKSSENSHSISCHIPKCRGVEETRMESDSDHICGHCPARFATARGLTQHKRHKHIAIYCMEKERGQTVGMKKIQWIENKEKGAERKTLALLSDKLAGMKSTSRQATDSQATGSAVEGARLIRRELRYGKVQNDALQEATEESKLNKLLSKPGTPPTPQTGLRGILRGALTGEATYEGVQIGEVKLSLRGVEQDPTLLTSSALELQRLLGKGAGARVMLNQSRERRSALPSERMGKTKTTDYHRVQFRYENNQSRLAEYILDGNVGLTAASPPLEVALAFKSRWEVTEPYHGLGQFCSRGVADNRVFQSLISAAEVGENLKAVKNGTAAGPDGITKKAIKDWDPSGAKLAVTFSTWLTAGTLPEPFKKCRTTLIPKTSDPALLTQAAGWRPLTIGSLVLRLYSRILTHRLARACPISPRQRGFISSPGCSENLMILGGLIKCSRREGERLAVVLVDFARAFDSVSHLHILEVLRQRGLDEHIIGIVKDSYTRVTTSIKVNEERVPPVDIRVGVKQGDPMSPLLFNLALDPLIDTLERYGLGYKLDDQQITTLAFADDLVLVSGSWEGMAHNILILEEFCNRTGLRIQPGKCHGFLAQKTRKARLINLCEPWIMCGEELHMVGPEESVAYLGMRVSPWYGIMEPEPVERLRNWIRSIGRSPLKPSQKVRMLGVYAVPRMVYRADHGGLGPKILEVLDGMIRKAVKVWLHLPQCTCDGLLYSRGQDGGLGIVKLACHIPSIQARRVYRLWHSEDAVTRMVTRRTVVREEYLGMWLRAGGEGANLPPLEEERGSAVQGTDPAGSVRLNYPGSPNWRQAEYLRWQSLTSQGIGVQAFGGDKNSNHWLANPETLGSRERHYIAGLQLRANVYPTREALSRGRMDLTSVCRHCLLGTESCSHILGQCPAVKDSRIRRHHNLCELLASEAESAGWIVTREMCCRTRAGALRRPDLVFVKNENALVVDVTVRYEMAYDTLMAAAAEKVARYKPIALNVMAALKVKKVKVFGFPLGARGKWPDGNGRLLRALGVSRSREKRLAKLFSRRTLLYSLDVLRDFYRLGGEAVDSDDESEDSHP

SEQ ID NO: 2718 - protein, 1283 aa, Oncorhynchus nerka
MYSKHFPTQRVQTGIQNLGPRVLPQGHGSEEQSLEERDKEMRKRDANTVQLSEKAKRKRKSKHCSVKEGSWIPGPRGESHSPPRKIVICENKSYQDESHASDPDPPSDLTGKEDVGSVAPQCVGKSKTPTPEARDGGRNVVQPPQPAQSVKVAPASSEAKGVTPSTLLVSIPVRDLRCRLCEKPLGTIGDTVKHFRVVHSRVTVVYGCSVCGKSSKNSHSISCHVPKCKGVMGAGGEAGGNHGCGYCPKSFATVMGLTQHKRHQHIEVYCREKEGKVPAEKRGKSGKADLERESEEREVKRLFEELAGEQKVNKLIAESLGTGKTAEQVRDIRRKMRREEARKDKTKETCDGKEPVGMLSKPVRPLTPQKAVRGILRDKLIGDATNDGVLIGDVRLSLRGVEQSPALLTTSALELQRLLRGGRRARNPRNPPSGRKTALPNERKTIEKQMEYGVVQKLFQKDPTRLSKIILDGGASGAKVTPSLEIALAFKRRWEVTENYRGLGQFSSVGEAENGEFGSLISAAEVCENLGAIRNGTAAGPDGVTKSALLKWDPTGAKLAAAFSIWLTTGTLPGPFKECRTTLIPKSSDPGVLAQVAGWRPLTIGSVVLRLYSRILTHRLARACPISPRQRGFISSPGCSENLMILDGLIRQSWASGERLAVVLVDFARAFDSVSHVHILEALRQRGLDEHIIGVVGDSYTDVTTTITVSGELSPPIDVRVGVKQGDPMSPLLFNLALDPMIEKLERCGQGYRLGDQQITTLAFADDLVLVSGSWDGMAHNILILEEFCRLTGLRIQPKKCHGFLIQKTLKARSVNPCEPWIMCGENLHMVGPGESVAYLGMMVSPWHGIMEPEPVERLHNWISSIGRSPLKPSQKVGMLVTYAVPRMVYQADHGGLGAGVLSVLDGIIRKAVKEWLHLPMCTCNGLLYSRNQDGGLGVMKLARVIPSIQVRRVYRLWHSEDVITRLVTRRTVEAKEYLGMWLRAGGEEASLPPLEAVIEGAVQGTEPTGSVKPKCPAPPNWRQEEFLRWQNLPSQGVGVQIFGRDRNSNHWLANPEMWGFRQRHYIAGLQLRANVYPTREALSRGRQDLPVTCRHCLSGTESCSHILGQCPAVKDSRIARHHKLCELLTNEAESAGWSVTREMCCRTHAGALRRPDLVCVKDGNALVVDVTVRYELAFDTLKVAAAEKVARYTPIAQYVKTALKVEKVMVYGFPLGARGKWPVGNNKVIRALGVSSSREKRLAKLFSRRALLYSLDVLRDFYRVDGETVDPDDHSDGDLADA

SEQ ID NO: 2719 - protein, 1236 aa, Salmo salar
MSDKRIVEMSGCDEIICRNKHCLKRRWAWISGPKGETSPPRKRGTCDNISFQDKSHASNPDPLEAPEAREDVGLMAPQCVGEIKTTTLASRDGGSEVVLPPQPVQAMGEALTSCSVGEAVPDILLVSLPIQDLKCGRCGRLLETVGKAMRHFTKAHSTVSVVFKCRRCGRSSDNSHSISCHIPKCKGMVETRVDGGGAHGCECCPERFATSRGLTQHMRHRHITHYCRKKDGEMTAKKDIEVAGVWSNWEKEKVLRLSEAMAGIRKINKRIADCLGTGKTAEQVREKRREMRSRKIQEDRPREACDEMGIITMLSKPRTPLTSPNSLRGILREGLERDDTKNGVQIGPVTLSLRGVEQDPALLNTSALELQRLLGEGSGTRNPTNPLRKNKTALPSERKKIVKQTQYVKIQKMFQNNQARLGKYILDGNESGTVVSPSLEVALAFKDRWEVTEEYIGLGQFESVGEAENGEFRSLISAAEVWENLRSIKNGTAAGPDGITKAALLKWDPSGAKLATTFSVWLTTGTLPVPFKKCRTTLIPKSNDPELLTQAAGWRPLTIGSVVLRLYSRILTHRLTRACPISPRQRGFISSPGCSENLMILGGLIKRSWAKGERLAVVLVDFARAFDSVSHLHILEVLRQRGLDEHIIGIVGDSYTDVVTTITVNGELSPPIDVRVGVKQGDPMSPLLFNLALDPMIETLERCGLGYKMDDQQITTLAFADDLVLVSGSWEGMARNILILEEFCRLTGLRIQPKKCHGFLIQKTQGVRQVNLCKPWIVCGEELHMVGPEESVAYLGMMVGPWQGIMEPKPVERLRNWIRSIGRSPLKPTQKVRMLKVYAIPRMVYQADHGGLGPTILNVLDGMIRRVVKKWLHLPQCTCDGLLYSRCQDGGLGIEKLACQIPSVQVRRVYRLWHSEDAITRVVTRRTIEPKEYLGMWLRAGGDEASLPPLEEGTEGTVRGTDPASSVKPKRPAAPNWRQAEFLKWQNLTSQGVGVQAFGRDRNSNHWLANPETLGLKERHYIAGLQLRANVYPTREALSRGRRDIPKACRRCLSGTESCSHILGQCPAVKDSRIARHHKLCDLLTNEAESAGWNVIREMCCRTQAGALRRPDMVCVKDGNVLVVDVTVRYEMAFDTLKVAAAEKVARYNPIAPYVAAVLKVKKVKVFGFPLGARGKWPTDNNRLLQALGVNGGRRKQLAKLFSRRALLYSLDVLRDFYRVEGVAGNLDDESEENHP

SEQ ID NO: 2720 - protein, 1278 aa, Oncorhynchus kisutch
MSSIHFPTQSVQTGGSNLDPRMLPQGHGREQQSLEERVEREKLQSKIRSQTSEKKKKKCKTKHCLEMKGLWNSGPKGEKSPPRKRGICETVSSQDTSQASDPDPPNDLKERRDVGSVASQCVGEIKTPALASWDGGRDVVMPPQPVHTVEISKEASTLASHSIVPTGAQLFLLPVRDVICGRCGRALSTIGSTVKHFAVVHPEVQVLFGCRACGKSSENSHSISCHIPKCRGVVETRMESDSDHRCGHCPARFATAVGLTQHKRHRHIAIYCMEKEREQTVGMKKIQWIENKKKGAERRKLTLLSDKLAGMNSTSRQATDSQATGSTVEGARLIRRELRYGKVQNDALQEATEELLPKPGTPPTPQTGLRGILRGALTGEATYEGVQIGEVKLSLRGVEQDPTLLTSSALELQRLLGRGAGAQVMLNQSRERRSALPSERMGKTKTTDYHRIQFRYENNQSRLAEYILDGNVGLTAASPPLEVALAFKSRWEVTEPYHGLGQFCSRGVADNRVFQSLISAAEVGENLKAVKNGTAAGPDGITKKAIKDWDPSGAKLAVTFSTWLTAGTLPEPFKKCRTTLIPKTSDPALLTQASGWRPLTIGSLVLRLYSRILTHRLARACPISPRQRGFISSPGCSENLMILGGLIKRSRREGERLAVVLVDFARAFDSVSHLHILEVLRQRGLDEHIIGIVQDSYTRVTTSIKVNEERVPPVDIRVGVKQGDPMSPLLFNLALDPLIDTLERYGLGYKLDDQQITTLAFADDLVLVSGSWEGMAHNILILEEFCNRTGLRIQPGKCHGFLAQKTRRARLINLCEPWIMCGEELHMVGPEESVAYLGMRVSPWYGIMEPEPVERLRNWIRSIGRSPLKPSQKVRMLGVYAVPRMVYRADHGGLGPKILEVLDGMIRKAVKVWLHLPQCTCDGLLYSRGQDGGLGIVKLACHIPSIQARRVYRLWHSEDVVTRMVTRRTVVRKEYLGMWLRAGGEGASLPPLEEERGSAVQGTDPAGSVRQIYPGSPNWRQAEYLRWQSLTSQGIGVQAFGGDKNSNHWLANPETLGSRERHYIAGLQLRANVYPTREALSRGRMDLTSVCRHCLLGTESCSHILGQCPAVKDSRIRRHHNLCELLASEAESAGWIVTREMCCRTRAGALRRPDLVFVKNENALVVDVTVRYEMAYDTLMVAAAEKVARYKPIALNVMAALKVKKVKVFGFPLGARGKWPDGNGRLLRALGVSRSREKRLAKLFSRRTLLYSLDVLRDFYRLGGEAVDSDDESEDSHP

SEQ ID NO: 2721 - protein, 1284 aa, Oncorhynchus kisutch
MYSKHFPTQSVQTGGPNVDPRMLLQGHGSEEQSLEANEKDKQKRKINTVQSSEHVKRTCKSKHCLVNDGLWISGPRGESGSPPRKIVICGKASFQDKSHASGPDPPNDLTGKEDVDSVAPQCVGESKTPTPEARDGGRNVVLPPQPAQAAQVATVSRQGTGLIPSTLLVSIPVRDLRCGLCEKPLGAIGATVKHYKVVHPKVTVVYGCSVCGKSSKNSHSISCHVPKCKGVMGAGGEAGGDHGCGHCPKSFATVMGLTQHKRHQHMEVYCREKEGKVPARKKGKSVRTDLERKEEEREVKRLLEELAGEQKVNRLIAESLGNGRTAEQVRQIRRRMGREEMRKDEAKGACDRTILVEMLPKPGRPSTPQNAIRNMLRERLVGDATKDGVLIGKVRLSLRGVERNPALLNTSALELQRLLRGGRRARNPNNPPSGRKTALPSERIMVQKLTEYGVVQKMFLKDQTKLSKRILDGDVSGAKVAPSLEIALAFKRRWEVTENYYGLGRFRSAGEAVNGEFGSLVSAAEVRENLGAIKSGTAAGPDGVTRAAILKWDPTGAKLAETFSIWLTTGTLPGPFKECRTTLIPKSSDPGVLTQVAGWRPLTIGSVVLRLYSRILTHRLARACPISPRQRGFISSPGCSENLMILDGLIRQSWASGERLAVVLVDFARAFDSVSHVHILEALRQRGLDEHIIGVVGDSYTGVTTTIKVSGELSPPIDVRVGVKQGDPMSPLLFNLALDPMMETLERCGQGYRLGDQQVTTLAFADDLVLVSGSWDGMAHNILILEEFCRLTGLRIQPKKCHGFLIQKTLKARSVNRCVPWIMCGEDLHMVGPGESVAYLGMMVSPWLGIMEPEPVERLRNWISSIGRSPLKPSQKVRMLVVYAVPRMVYRGDHGGLGAGVLSVLDGMIRKAVKEWLHLPMSTCNGLLYARNQDGGLGVTRLARVIPSIQVRRVYRLWHSEDAVTRLVTRRTVKANEYLGMWLRAGGNKASLPPLEAVIGGAVQGTEPTGSVKPKSPAPPSWRQEEFLRWQGLESQGVGVQIFGRDKNSNHWLAKPEAYGFRQRHYIAGLQLRANVYPTREALTRGRQDLPKTCRHCLSETESCSHILGQCPAVKDSRIVRHHKLCELLANEAESAGWSVTREMCCRTRAGALRRPDLVCVKEGNALVVDVTVRYELAFDTLKVAAAEKVARYTPITQYVKAALKVRKVEVYGFPLGARGKWPVDNNKVIRALGVSSSREKRLAKLFSRRALLYSLDVLRDFYRVDGATEDSDDQSEEDLSEAW

SEQ ID NO: 2722 - protein, 1285 aa, Salmo trutta
MASMRFSSQSDQTGIPKLAPTVGVSGHRQVVRPGSSTALCSGGPGRRSYGKGDTPVWPSQTREHRAGEGQAGGTETALEDISDLNEPRSSQPRKRRRLSESQPTGRDPPRRPDAEGDPGTVAPQWESESETSSGPPDNEGGRVVLPPQPVPAGGGKRKMRNPASCSKEAEIVKIPVRDLRCGRCGMPLETVGKVVTHYAAAHPAVPVVFACRVCGKSSENSHSISCHVPKCKGVVEIRMEPDSDYNCGHCPRSFTTAVGLTQHKRHRHTARYCKEKEGEITMREREKNETRAGWSEREKDEVTRLEGELAEGKQKNRQIAESLGTGKTAEQVRTIRRKMRLAKTRSDSPKEADDKSDLVAMLSKPGTPLTPPKALRGILRRELEGGATKDGVQIGAVKLSLRGVEQDPALLNTSALELQRLLGRAAGAQNPGNPAGERETTLQREGGRMAKQLKYGRAQRMYQSNQPRLAKSILDDNGKVAAAASPPLEVASAFKKRWEVTEKYLGLGQFTSRGDADNGEFRSTISAVEVRENLGAVKNGTAAGPDGITKAALREWDPSGVKLAATFSVWLTLGTLPEAFKRCRTTLIPKTDDPILLTQAAGWRPLTIGSVVLRLYSRILTHRLARACPINPRQRGFISSPGCSENLMILGGLIKRSRAKGETLAVVLVDFARAFDSVSHRHILEVLRQRGLDEHVIGIVGDSYTDVTTTITVNGERTTPVDVRVGVKQGDPMSPLLFNLALDPMIDTLERCGSGYKLDDEQITTLAFADDLVLVSGSWGGMAHNIRILEEFCRLTGLRIQPKKCHGFLIQRVQDVRLVNHCTPWIMCGEQLHMVGSEESVAYLGLRVSPRQGIMEPEPVERLRDWISSIGRAPLKPSQKVRMLNVYALPRMVYQADHGGLRSNVLTVLDGMIRKAVKGWLHLPTCTCDGLLYSKCQDGGLGIGKLALQIPSIQARRVYRLWHSGDAITRLVTRRTVERKEYIGMWRRAGGDEDSLPPLEGNAEGAAQCTETTEPVRPIRLVTPDWRKAEFLRWQNLTAQGIGVQVFGGDRNSNHWLAKPEKLGARERHYIAGLQLRANVYPTREALARGGRDTAKICRHCLSETESCSHILGQCPAVKDSRVKRHHKLCDLLADEAESAGWNVIREMCCRTRAGALRRPDLVFVKNGNALVVDVTVRYELAYDTLKVAAAEKVARYTPIIPYVETTLKVRKAKVFGFPLGARGKWPCSNGRLLQALGVSEGRRKQLAKLFSRRALLYSLDVLRDFYRTDGEAEVSEDEGGDSLP

SEQ ID NO: 2723 - protein, 1233 aa, Salmo trutta
MSDKRIVEMSGCDKIICRNKHCLKRRWAWISGPKGETSPPCKRGTCKKVSTKDKSQASDPDPLDAPEAREDEGSMVFQCVGEPKIPTLASRDEGSDIVQPPQPVQAECVNPTSCIMDNQAQESLLVSLPICKSRCERCGRPLGTVGEAVKHFKEIHPAVPVVYVCRKCGRSNENCHAISCHVPKCKGMTETMVESDSDFVCGHCPKRFKKASGLTQHKRHKHIAIYCRDKEGELTAKKGRRSARDDWTREEEEELMRLSNKMDGLKEVNRRVADCLGSGRTAEQVRQRRRLLRLKERKSDKPKEAIERREFISMLSKPGKPLTPQCGIRGLLHERLIGDATKDGIQIGVVTLSLRGAEQDPALLVSSALELQRLLGRGARNPSRYNHSPNSRATLPNDKIKRNRKAEYHRVQELYGKKQSRLAKYILDGNAEVEAVSPPLEVALEFKKRWEVTEAYHGLGRFGSSGGADNGVFGLPISAAEVCENLGDLKNGTAAGPDGITKLALREWDPTGAKLAGTFSIWLTLGTLPIPFKKCRTTLIPKTEDPTVLAQAAGWRPLTIGSVVLRLYSRILTHRLTRACPISPRQRGFISSPGCSENLMILGGLIKRSKGSGEMLAVVLVDFARAFDSVSHVHILEVLRQRGLDEHIIGIVGDSYTDVTTKISVSGELSSPIDVKIGVKQGDPMSPLLFNLALDPLIETLECHGMGYVMDDQQITTLAFADDLVLVSSSWDGMAHNILILEEFCRLTGLRIQPKKCHGFLTQKIQRARMINLCQPWIMCGEELHMVGPEESVEYLGLRVSPWQGIMEPEPVERLRNWIRAIGRSPLKPSQKVRMLNVYAVPRVVYRADHGGLGANVLNVLDGMIRKAVKAWFHLPPSTCDGLLYSRCQDGGLGIGKLACQIPSTQVRRVYRLWHSRDVITRLVTRTTVEQKEYLGMWLRAGGDEASLPLLEDRSEMAVPGIDPAGSVKPKRLITPNWRQGEFLRWQNLTSQGIGIQAFGKDRNSNHWLANPETLGSRERHYIAGLQLRANVYPTREALSRGREDLLTVCRHCQSGTESCSHILGQCPAVKDSRIKRHHKLCDLLAGEAESAGWNVIREMCCRTRAGALRRPDLVFVKKGYALVVDVTVRYEMAYDTLRAAAGEKVARYTPIAPYVATVLKVGKVKVFGFPLGARGKWPIGNNRLLHALGVKGGREKQLARLFSRRALLYSLDVLRDFYRVEGGTVDSDDGRE

SEQ ID NO: 2724 - protein, 1285 aa, Salmo trutta
MASMRFSSQSDQTGIPKLAPTVGVSGHRQVVRPGSSTALCSGGPGRKSYGKGDTPVWPSQTRKHRAGKGQAGGTETAREDISDLNEPRSSQPRKRRRLSESQPTGRDPPRGPDAEGDPGTVAPQWESESGTSSGPPDNEGGRVVLPPQPVPAGGGKRKMRNPASCPKEAEMVKIPVRDLRCGRCGMPLETVGKVVTHYAAAHPAVPVVFACRVCGKSSENSHSISCHVPKCKGVVEIRMEPDSDYTCGHCPRSFTTAVGLTQHKRQTHIARYGQEKEREVTMREREKNETRAGWSEREKDEVTRLEGELAEGKQKNRQIAESLGTGKTAEQVRTIRRKLRLAKTRSDSPKEADDKSDLVAMLSKPGTPLTPPKALREILRRELEGGATKDGVQIGAVKLSLRGVEQDPALLNTSALELQRLLGGASRAQNPGNPAGERETTLQREGGRMAKQLTYGRAQRMFQSNQPRLAKSILDGNGKVAAAASPPLEVASAFKKRWEVTEKYLGLGQFTSRGDADNDEFRSPISADEVRENLGAIKNGTAAGPDGITKAALREWDPSGAKLAATFSVWLTLGTLPEAFKRCRTTLIPKTDDPILLTQAAGWRPLTIGSVVLRLYSRILTHRLARACPINPRQRGFISSPGCSENLMILGGLIKRSRAKGETLAVVLVDFARAFDSVSHRHILEALGQRGLDEHVIGIVGDSYTEVTTTITVHGERTTPVDVRVGVKQGDPMSPLLFNLALDPMIDTLERCGSGYKLDVEQITTLAFADDLVLVSGSWGGMAHNIRILEEFCRLTGLRIQPKKCHGFLIQRVQDVRLVNHCTPWIMCGEQLHMVGSEESVAYLGLRVSPRQGIMEPEPVERLRDWISSIGRSPLKPSQKVRMLNVYALPRMVYQADHGGLRSNVLTVLDGMIRKAVKGWLHLPTCTCDGLLYSKCQDGGLGIGKLAYQIPSIQARRVYRLWHSGDAITRLVTRRTVKREEYLGMWRRAGGDEDSLPPLEGSAEGAAQCTEPTEPVRPKCLVTPDWRKAEFLRWQNLTAQGVGVQVFGGDRNSNHWLAKPEKLGARERHYIAALQLRANVYPTREALARGGRDAEKICRHCLSETESCSHILGQCPAVKDSRVKRHHKLCGLLADEAESAGWNVTREMCCRTRAGALRRPDLVFVKNGNALVVDVTVRYEMAYDTLEVAAAEKVARYTPITSYVKTALKVRKAKVFGFPLGARGKWPSSNGRLLQALGVSEGRKKQLAKLFSRRALLYSLDVLRDFYRTDGEAEVSEDEGGDSLP

SEQ ID NO: 2725 - protein, 1266 aa, Salvelinus namaycush
MSGDKNGSVKVNYRSEHCRKRSRSWSSGPEGEESPPRKLVICENISSQDKSHASDLDLPDEPMVRADVGSVAPQCVGKPKTPTPGSKDGDGSVVKPPQPVLAVKNVPTSSSIRKDALSTLLISLPIQDLGCGKCNERLRTVGSAVKHYSVFHSAVRVFFVCRMCGKSSENSHSISCHTPKCRGRAETRMESDSDHVCGQCRERFTTAMGLTQHKRHKHIALYCKEKESERSAKVTGKKSAAGRWSEWEVKEMERLSVELVGTKNINQLIAARLDNGRTAEQVRDKRRNMRPERGHGDAIKEADEERNLIVWLSKPVTPSTSPDTIRGILRGKVNGGATEDGVKIGEVTLSLRGVEQDPSLLNTSALELQRLLGNGSESRGRLNPLRENKSGLPNERNKFVKPVGYGRVQYLYVNNRPRLAKLILDGKGRRGATSPSPEIAMAFKSRWEASEEYIGLGRFCAKGDADGGEFRSLISAAEVKENLGAIRNGTAAGPDGITKKTLVEWDPTGTKLASTFSVWLTTGTLPGPFKKCRTTLIPKTDDPILLTQAAGWRPITIGSVVLRLYSRILTHRLARACPISPRQRGFISSPGCSENLMILGGLIGLSRAKGEMLAVVLVDFARAFDSVSHSHILEALRRRGLDEHIIRIVGDSYTDVTTTIKINGEKSAPIDVRVGVKQGDPMSPLLFNLAIDPMIDTLERRGSGYRMGDKQITALAFADDLVLVSSSWSGMARNIKILEEFCRLTGLRIQPRKCHGFLAQGIQGVRTINLCEPWIMCGEELHMVGPEESVAYLGLRVSPWYGIMEPEPVERLRDWIRSIGRSSLKPSQRVKMLNAYAIPRMIYQADHGGLGQGILSVLDGMIRSAVKGWLHLPKCTCDGLLYSRCQDGGLGIVKMAHQIPSTQARRVYRLWHSEDAITRLVTRETVEPETYLGMWLRAGGDETSLPPLDERVEGPVQGTDPADSVKHANPVAPNWRKGEFLRWQNLTSQGIGVQAFGGDKNSNHWLANPETLGSRERHYIAGLQLRANVYPTREALSRGRGDLPKICRLCLSSTESCSHILGQCPAVKDSRIRRHHKLCDLLADEAESAGWKVTREMCCRTRAGALRRPDLVFVKNDSALVVDLTVRYEMAYDTLMSAAAEKVARYTPTVPYIMNVMKVRKAKVFGFPLGARGKWPVSNNRLLSALGVSDVRSRRVAKLFSRRALLYSLDVLRDFYRVEGRGADSDEESGSSLPIAHSENIEGCLPREGGTLSPLLERNPSMLGDP

SEQ ID NO: 2726 - protein, 1281 aa, Salvelinus namaycush
MSGDKNGSVKVNYRSEHCRKRSRSWSSGPEGEESPPRKLVICENISSQDKSHASDPDLPDEPMVRADVGSVAPRCVGKPKTPTPGSKDGDGSVVKPPQPVLAVKNVPTSSSIRKDALSTLLISLPIQDLGCGKCNERLRTVGSAVKHYAVFHSAVRVIFVCRMCGKSSENSHSISCHTPKCRGEAETRMESDSDHVCGQCRERFTTAMGLTQHKRHKHIALYCKEKERERSAKVTGKKSAAGRWSEWEVKEMERLSVELVGTKNINQLIAARLDNGRTAEQVRDKRRNMRPERGQGDAIKEADEERNLIVWLSKPGTPLTSPDTIRGSLRGKMKGDATKDGVKIGEVTLSLRGVEQDPTLLNTSALELQRLLGRGLETRGRLNPPRESKSRLPNERQKFVRPAGYGRRQNLYRNNRPRLAKLILDGKRRGEATSPSTEIATAFRSRWEAPEEYLGLGQFCARGKADSGVFRSLISATEVKENLGAIRNGTAAGPDGITKKKLVEWDPTGDKMAATFSVWLTTGTLPGPFKKCRTTLIPKTDDPILLTQMAGWRPITIGSVVLRLYSRILTHRLARACPISPRQRGFISSPGCSENLMILGGLIGSSRAKGEMLAVVLVDFARAFDSVSHSHILEALRRRGLDEHITGIVGDSYTDVTTTIKINGEESAPIDVRVGVKQGDPMSPLLFNLAIDPMIDTLERRGSGYRMGDKQITALAFADDLVLVSSSWSGMARNIKILEEFCRLTGLRIQPKKCHGFLAQGIQGVRTINLCEPWIMCGEELHMVGPEESVAYLGLRVSPWYGIMEPEPVERLRDWIRSIGRSSLKPSQRVKMLNAYAIPRMIYQADHGGLGQGILSVLDGMIRSAVKVWLHLPKCTCDGLLYSRCQDGGLGIVKMAHQIPSTQARRVYRLWHSEDAITRLVTRETVEPETYLGMWLRAGGDETSLPPLDERVEGPVQGTDPADSVKHANPVAPNWRKGEFLRWQNLTSQGIGVQAFGGDKNSNHWLANPETLGSRERHYIAGLQLRANVYPTREALSRGRGDLPKICRLCLSSTESCSHILGQCPAVKDSRIRRHHKLCDLLADEAESAGWKVTREMCCRTRAGALRRPDLVFVKNDSALVVDVTVRYEMAFDTLMMAYAEKVARYTPIIPFVRAALKAKKVKVFGFPLGARGKWPSDNGVLLHALGLRVERRKQLAKLFSRRALLYSLDVLRDFYRIEGEGADSGEESGSSLPLAHSEAIEGCLPHGGGSPNTFHLVGESPNGGTQSPILERNPSLLGDP

SEQ ID NO: 2727 - protein, 1239 aa, Salvelinus namaycush
MSDNKTDRVMSNYRSKHCWKRSRSWISGPEGEESPPRKLGICGKMSFQDKFQTSDPDPSDEPMARGDVGSIVPLCVGELKTPTQAPGEGGSGVVKPPQPFQAVKRKGSVCSPASHPEEDAPLNTQRVSLPVHDLSCERCGRSLETVGRTVKHYAVVHPAVTVIYVCRKCGKANVNSHSISCHVPKCRGVVETQMEADGDFLCEHCPKRLTTAMGRTQHVRHKHIALYCQGRKGESTAVGKRVKWMGDEKEVGERAEMTRVNALLAGDKHIIGKAATSLGSGKTAGRVRMIRRKLKRGMIQSETLLEAAGESNFTSVLAEPGTPPTPQTGLRGFLREALTGDATRGGVQIGEVTLSLRGVEQDAALLVSSALELQRLLGGGGGLPGRLKQSRERKSAGPSERMRKSKTAEYHRMQELYEKKRSRLGKYILDGNVGVKATSPPPEVALAFRDRWGVKEAYHGLGQFCSVGKADNGAFRSLISAAEVGENLRAIRKGTAAGPDGITKEALLKWDPSGAKLADIFSVWLTAGTLPGPFKKCRTTLIPKTDDPILLTQVAGWRPLTIGSVVLRLYARILTGRLARACPINPRQRGFISSPGCSENLMILGGLIKESWARGEMLAVVLVDFARAFDSVSHLHILEALRQRGLDEHIIGIVGDSYTGVSTAIRANGESSPPIDVRVGVKQGDPMSPLLFNLALDPMIDTLERYGLGCKLDDRQITTLAFADDLVLVSGSWGGMAHNIEILETFCNLTGLRIQPGKCHGFLIQKVQGARQVNLCEPWIVCGENLHMVGPEESVAYLGMRVSPWYGIMEPEPVERLRNWIRSIGRSPLKPFQKVKMLGVYAVPRLVYRADHGGLGPKILDVLDGMVREAVKRWLSLPPCTCDGLLYSRNQDGGLGIVKLACQIPSIQARRVHRLWYSEDTITRLVTRRTVEREEYLGMWLRAGGEPASLPPLVEEEEGAVRSTITADSVRPKHPGGPDWRGAEFLRWQHLTSQGIGVQAFGKDRNSNHWLTSPETLGGRQSHYIAGLQLRANVYPTREALSRGREDLPKVCRRCLSGTESCSHILGQCPAVKDSRIARHHKLCALLACEAESAGWNVTREMGCRTKAGALRRPDLVFVKNGYALVVDVTVRYEMAFDTLSMAATEKVARYTPIVSYVRKALKVGRVKVFGFPLGARGKWPSGNGLLMRALGVSGSRVKQLARLFSRRTLLYSLDVLRDFYRVDGEAVDSDGESDNSRP

SEQ ID NO: 2728 - protein, 1289 aa, Salvelinus namaycush
MASMRFSSQSDQTGLPKLAPTVGVSGHRQVERAGSSMALYSGGPGGKSYGEGDTPMWPSKNRKRRAGIGEAGKTQAAQVEISNLNEPRPSQPRKRRRLNKPQPTSRESPGRQGAEGDPGTVAPLWVSESKTTPRPPEHRGKEVVPPPQPVHAGSEGKETQNPASCTKGRIPPSTLLVALPAHGLSCGRCATPLETVGKAVKHYAVMHPAVTVVYVCRRCGKSSENSHSISCHIPKCKGGAETRMESDSDYNCGHCTKRFTTAMGLTQHKRHQHVGVYCREKEGRATTGERGRNVAGETWSEWEENELTRMCGELAGVQDINRRIADSLGNGKTAEQVRRKRRRGKLEKGRNDRPKEADRENYLVGMLSEPATPSTPPNDLRGILRERLNGDATEDGVEIGDVKLSLRGVEEDPALLNTSALELQRVLGGSARKPGPWNPEGERKITSPSERRKETKRKKYRKAQELFRQNETKCAKHILDGDGNGEGASPPLEIALAFKSRWEVSETFNGLGQFHSRGDADNRVFEPLISAAEVWENLGAIKNGTAAGPDGITKAALVEWDPSGAKLAGTFSIWLAAGTLPGPFKKCRTTLIPKTSDPTILTQAAGWRPLTIGSVVLRLYSRILTHRLTRACPINPRQRGFISSPGCSENLMILGGLIKQSWAKGEMLAVVLIDFARAFDSVSHLHILEVLRQRGLDEHIVGIVGDSYTDVTTAITVNGEPSPPVDVRVGVKQGDPMSPLLFNLALDPMIDTLERRGLGYKLDDRQITALAFADDLVLVSGSWEGMARNILILEEFCQLTGMRIQPRKCHGFLTQKVRGVRSVNICKPWIMCGEELHMVGPEESVAYLGLRVSPWHGIMEPEPVERLRDWIRAIGRAALKPSQRVRMLNVYAVPRMVYRADHGGLGPKVLNVLDGMIRKAVKGWLKLPPCTCDGILYSRSQDGGLGIVKLACQIPSIQARRVYRLWHSGDAITRLVTRRTVDQREYLGMWKRAGGEEARLPPLEEDIEGVKRSTNADGTGTPKNLVTPDWRQAEFLRWQNLTSQGIGVQAFGRDRNSNHWMANPETWGFRERHYIAGLQLRANVYPTREALARGRHDIPIVCRHCLSETESCSHILGQCPAVRESRIKRHHKLCDLLANEAESAGWNVTREMCCKTRAGALRRPDLVMVKNGNALVVDVTVRYEMAYDTLMGAAAEKVARYTPISKYVAKALRVEKVKVFGFPLGARGKWPTSNGKLLREMGVSGSRGKQLARLFSRRALLYSLDILRDFYRTEGEVEDSDEESGDSQE

SEQ ID NO: 2729 - protein, 1266 aa, Salvelinus namaycush
MSGDKNGSVKVNYRSEHCRKRSRSWSSGPEGEESPPRKLVICENISSQDKSHASDPDLPDEPMVRADVGSVAPQCVGKPKTPTPGSKDGDGSVVKPPQPVLAVKNVPTSSSIRKDALSTLLISLPIQDLGCGKCNERLRTVGSAVKHYSVFHSAVRVIFVCRMCGKSSENSHSISCHTPKCRGKAETRMESDSDHVCGQCRERFTTAMGLTQHKRHKHIALYCKEKESERSAKVTGKKSAAGRWSEWEVKEMERLSVELVGRQNINKLIAVGLGNEKTAEQVREKRRRMRCGRITGDKTKEADDESNLIIWLSKPSTPSTSPDTIRGILRGKMNGGATNDGVEIGKVTLSLRGVEQDSSLLNTSALELQRLLGRGSESHGRLNPSRESKSSLPNERKKYVKPLGYGRKQFLYDNNRPRLAKLILDGKRRGEASSPSPEIAMAFKSRWEASEEFYGLGQFGARGEADGGEFRSLISAVEVKENLGAIKNGTAAGPDGITKKSLVEWDPTGARLAVMFSVWLTTGTLPGPFKKCRTTLIPKTDDPILLTQMAGWRPITIGSVVLRLYSRILTHRLARACPISPRQRGFISSPGCSENLMILGGLIGSSRAKGEMLAVVLVDFARAFDSVSHSHILEALRRRGLDEHITGIVGDSYTDVTTTIKINGEESAPIDVRVGVKQGDPMSPLLFNLAIDPMIDTLERRGSGYRMGDKQITALAFADDLVLVSSSWSGMARNIKILEEFCRLTGLRIQPRKCHGFLAQGIQGVRTINLCEPWIMCGEELHMVGPEESVAYLGLRVSPWYGIMEPEPVERLRDWIRSIGRSSLKPSQRVKMLNAYAIPRMIYQADHGGLGQGILSVLDGMIRSAVKGWLHLPKCTCDGLLYSRCQDGGLGIVKMAHQIPSTQARRVYRLWHSEDAITRLVTRETVEPETYLGMWLRAGGDETSLPPLDERVEGPVQGTDPADSVKHANPVAPNWRKGEFLRWQNLTSQGIGVQAFGGDKNSNHWLANPETLGSRERHYIAGLQLRANVYPTREALSRGRGDLPKICRLCLSSTESCSHILGQCPAVKDSRIRRHHKLCDLLADEAESAGWKVTREMCCRTRAGALRRPDLVFVKNDSALVVDLTVRYEMAYDTLMSAAAEKVARYTPTVPYIMRKMKVRKAKVFGFPLGARGKWPVSNNRLLRALGVSDARSKSVAKLFSRRALLYSLDVLRDFYRVEGRGADSDEESGSSLPIAHSENIEGCLPREGGTLSPLLERNPSMLGDP

SEQ ID NO: 2730 - protein, 1290 aa, Thymallus thymallus
MTSKHFSPQSVQTGLQTMDPPMLDQGHGCEWQSLENESVRVGMRKRRKRGRSRGSEPPGEKRPRGTPKNYKTSIERVHFLNMSQAADPDPPDPPVARGDVGPVAPLCVGEIKTPALALRDGGRDVVMPPQPDCAAAKVVKKATPKSGMVGSVSPSTLLISLPILDLSCEWCGIRLGTVGEAARHFAVKHSAVSVVYMCRACGRSSSNSHSISCHVPKCKGRTETRMETDGDWCCGHCPRRFTSAMGLTQHKRHKHIALYCQEKEGDTAVTEKGEKDTDRGGSERKENKLICLNGKLAMKKQIIQRIANSLGKKRAADQVRRRRRKLRLDRGPSDIPMETPDEGNLIGMLSKPATLVAPPSGLRGFLHDRLNKDATYDGVKIGNVTLSLRRVEQDPALLNSSALELQRLLGVRLDARDRSTHVRERKPTLPKGRGRCVKGAEYQRVQELWKSKRSRLAKEILEGNGNGGVAFPPLEVALAFKSRWEVAEAFHGLGQFRSGGETDNEVFRSPITAAEVSENLETVKTGTAAGPDGITKSALLKWDPSGAKLAVTFSVWMALGTLPGPLKRCKTTLIPKTADPALLTQASGWRPLTIGSVVLRLYSRILTNRLARACPINPRQRGFISSPGCSENLMILGGLIKQSRRSGETLAVVLVDFARAFDSVSHLHILEVLRQRGLDEHVIGIVGDSYTDVTTAVKVDGEQPSPIDVRVGVKQGDPMSPLLFNLALDPMINTLERLGLGYKLDDRQITTLAFADDLVLVSGSWDGMARNILILEEFCRLTGLRVQPKKCHGFLIQKVRGTASINLCRPWIMCGEPLHMVGPGESVEYLGLRVGPWCGIMEPEPVEQLREWISAIGRSSLKPSQKVGMLNVFAVPRMIYQADHGGLRPKILKVLDGDIRKAVKRWLHLPPCTCDGLLYARHRDGGLGIVKLAKQVSSIQARRVYRLWHSEDVITRLVTRRAVEPREYEEMWRRAGGDEASMPPLEKVVDGATVSLMPKNPVAPDWRQAELLRWQNLEVQGVGVQVFGGDRNSNHWLADPAVAGFKQRHYIAGLQLRANVYPTREALSRGRTGKTSACRHCLTGTESCSHILGQCPAVKDSRISRHHKLCDLLADEAESAGWKVIREMCCFTHAGALRRPDLVFIKDGNALVVDVTVRYEMAFDTLRVAAAEKVARYTPIIPYMLTALKLRKVKVFGFPLGARGKWPAGNDKLLAALGVGRKRTVRLAKLFSRRALLYSLDVLRDFFRTDGETVASDEDSDGESVGLVGDYQGMSTAGRDTFTVPPRTLP

SEQ ID NO: 2731 - protein, 1350 aa, Coregonus sp.
MLKFGYKTVKIWLRYGEGTITVCLCFTGDSPNRHSLSRSLSSWKSKQHIDAEEAEKSLPRSEHLTKQQQRPTRKKSHCCSDCGKSYTSSADLRRHQRIHTGEKPYSCDQCGKRFIQRLNLKAHQIIHSVKKPHCCSQCGERFVTLQSLKAHQRTHSGERLFHCSECGKSFKQASTLFEHKRIHTGEKPHHCEQCGGSFSSAKLLIIHQRIHLGEKSYQCTDCGKSFRMSSTLRCHQLRHTGDKPHQCTECGKRFAVKSGLWQHNIVHTGEKHYQCPKCGKKLGSSHSLEQHKRTHTGQKPFHCSPCKLSFGTSSALYKHQRIHTGEKPHSCNVCQRSFGRSDHLKNHMQIHTGEKPYHCQLFFQKEKKDGGDGWDAGEESELTRLSYELAGDKHINRLIAVSLGKTPEQVRQKRRRLRRGRLQSDILQEAAGESNIISMLSEPAAPLTPQSGIREILRKELLSGDTDDGVKIGEVTLSLRGVEQDPALLNSSALELQQLLGGRSGSQGLLNQSAKRKVTLPSEGEKIAKQSEYCRVQMLFDKNRTKLAKDILDGNGDVVDALPPLEVALAFKSRWEVTETFHGLCQFRSMGEADNGVFGSLISAAEVSENLGAFKTGTAAGPDGITKTALQKWDPTGAKLSRTFSVWLTSGTLPKLFKKCRTTLIPKTADPVLRTQESGWRPLTIGSLVLRLYSRILANRLARACPINPRQRGFISSPGCSENLMILGGLLKESRASGEVLAVVMVDFARAFDSISHLHILEVLKQRGLDEHIVRIIGDSYTEVTTMITVDGEQSPPIDVRIGVKQGDAMSPLLFNLALDPVMETLERLGSGYKVDGRQITTLAFADNLVLVSGSWDGMAKNILILETFCQLTGLRVQPKKCHGFLTQKIRGVFSVNSCRPWIMGGGELHMVGPAESVQYLGLRVGPWQGIIEPEPVERLRDWISSIGRSPLKPSQKVRMLNDYAVPRMVYQADNGGSGPKILNVLDGMIRKAVKVWFHLPQSTCDGLLYSRCQDGGLGIVKLACQIPSIQARRVYRLWHSEDAITRIVTRRTVKSKEYLGMWLRAGGDKASLPPLETSDDGAVGSTDPASLLTPIMKNPVKPNWRQGEFQRWQNLAVQGVGVQAFAGDRNSNHWLKDPAKVGFKQRSYIAGLQLRANVYPTREALARGREDIPSVCRHCLSGNESCSHILGQCPAVKDSHISRHNKLCGLLASEAESAGWIVTREMCCNTRAGALRRPDLVFVKNGTALVVDVTVRYEMASNTLEVAAAEKVARYTPIARYIMAALKVRKVKVFGFPLGARGKWPIRNETLLMNLGVNRLRRERLAKLFSRRALLYSLDVLRDFYRIDG

SEQ ID NO: 2732 - protein, 1131 aa, Salmo salar
MRVERLERKAILVERYKRKMSDKSIDKMSGCDEIICRNKHCLKRRWAWISGPKGELSPPRKRGTCGKLSLQDKSHASDPDLLEAPEAKEDEGSMAPRCVGESKIPTLASRDGGKEIVLPPQPVHAVGGTPASTSVVKVRQNTLLISLPVRDLRCGQCGRPLGTVGAAVKHFRVVHPAVPVVYACRVCGRSSRDSHSISCHVPKCKGVTETRMELDSDHVCDCCPKRFTSAMGLTQHKRHRHIAVYCGEKEREVTAKLEGGYSEEKKWKKEEEEVVALLSKKLAGVKEINRRIADCLGNGKTAEQVRQKRRQMRLNRTSNDKPKEVTDESVFIKMLSKPATPLTPQSGIRGLLHERLNGDDTKNEVEIGEVMLSLRRAEQDPVLLVSSALELQRLLGRGERAPSRMDKARERKITLPSDGKSKAEYHRVQELYGKKRARLAKYILDGNEDMDARLPPPEVVSAYRRRWEVTETYHGLGQFCSMRKSDNGVFRSPITAAEVCENLGDIKNQTAAGPDGITKTALHEWDPSGAKLAVTFSVWLATGTLPGPFKKCRTTLIPKTKDPSLLTQASGWRPLTIGSVVLRLYSRILTHRLARACPINPRQRGFISTPGCSENLMILGGLIKYSRAKGETLAVVLVDFARAFDSVSHLHILEVLGQRGLDEHIIGIVGDSYTEVTTTMSVSGEMPTPIDIRVGVKQGDPMSPLLFNLALDPMIDTLERHGLGYRMDGQQITSLAFADDLVLVSSTWDGMARNILILEKFCQLTGLRIQPKKCHGFLMRKVRGAHVINLCKPWIVCGEYLHMVGPEESVAYLGLSVSPWFGIMEPEPVERLRNWIRSIGRSPLKPSQKVRMLNVYAVPRMVYQADHGGLGTNVLKVLDGMIRKAVKLWLHLPTCTCDGLLYSRCQDGGLGIGKLACQIPGIQARRVYRLWHSEDVVTRVVTRRTVERKEYLGMWRRAGGDEASLPPLEGEVEGAALGAEPTGLVKHKHPVCPNWRQEEFQRWQNLTSQGIGVQVFGRDRNSNHWLANPETLGIRERHYIAGLLLRANVYPTREALSRGRRGLTEVCRLCLSGTESCSHILGQCPAVKDSRIRRHHKLCDLLASEAESTGWNVIREMCCRTPAGALRRPDL

SEQ ID NO: 2733 - protein, 1284 aa, Salmo salar
MASMRFSSQSDQTGIPKLAPTVGVSGHRQVVRPGSSTALCSGGPGRKSYGKGDTPVWPSQTRKRRAGEGQAGGTETALEDISDLNEPRSSQPRKRRRLSESQPTGRDPPRRPDAEGDPDTVAPQWESESETSSEPPDNEGERVVLPPQPVPAGGGKRGMRNPASCSKEAETVTLPARDLRCGRCGTPLETVGKVVTHYAAAHPAVSVVFACRECGRSSENSHSISCHVPKCKGVVETRMEPDSGYICGHCPRSFTTAVGLTQHKRHKHIARYCQETEEEVTTRERGNEARARWSEREKNEVTRLEGELAEGKQKNRQIAESLGTGKTAEQVRMMRRRMRLAKARSDSTKEADNKSDLVAMLSKPGTPLTPPKVLRGILRRELEGGATKDGVQIGAVKLSLRGVEQDSALLNTSALELQRLLGGASRAQNPGNPAGERETTLQREGGRMAKQLNYGRAQRMFQSNQPRLAKSILDGNGKVAAAASPPLEVASAFKKRWEVTEKYLGLGQFTSRGDADNGEFRSPISAVEVRENLGAIKNGTAAGPDGITKAALREWDPSGAKLAATFSVWLTLGTLPEAFKRCRTTLIPKTEDPIILTQAAGWRPLTIGSVVLRLYSRILTHRLARACPINPRQRGFISSPGCSENLMILGGLIKRSRAKGETLAVVLVDFARAFDSVSHLHILEVLGQRGLDEHVIGIVGDSYTDVTTTITVNGERTPNIDVRVGVKQGDPMSPLLFNLALDPMIDTLERYGSGYKLDNEQITTLAFADDLVLVSGSWEGMAHNIRILEEFCRLTGLRIQPKKCHGFLIQRVQDVRMVNHCTPWIMCGEQLHMVGSEESVAYLGLRVSPRHGIMEPEPVERLRDWISSIGRSPLKPSQKVRMLNVYALPRMVYQADHGGLRPNVLTVLDGMIRKAVKGWLHLPTCTCDGLLYSKCQDGGLGIGKLAYQIPSIQARRVYRLWHSGDAITRLVTRRTVKREEYLGMWRRAGGDEDSLPPLEGSAEGAAQCTEPTEPVRPKCLVTPDWRKAEFLRWQNLTAQGIGVQVFGGDRKSNHWLAKPEKLGARERHYIAGLQLRANVYPTREALARGGRDTAKICRHCLSETESCSHILGQCPAVKDSRVKRHHKLCGLLADEAESAGWNVTREMCCRTRAGALRRPDLVFVKNGNALVVDVTVRYEMAYDTLEVAAAEKVARYTPITSYVKTALKVRKAKVFGFPLGARGKWPSSNGRLLQALGVSEGRRKQLAKLFSRRVLLYSLDVLRDFYRTDGEAEASEDEGGDSLP

SEQ ID NO: 2734 - protein, 1236 aa, Salmo salar
MSDKRIVEMSGCDEIICRNKHCLKRRWAWISGPKGETSPPRKRGTCDNISFQDKSHASNPDPLEAPEAREDVGLMAPQCVGEIKTTTLASRDGGSEVVLPPQPVQAMGEALTSCSVGEAVPDILLVSLPIQDLKCGRCGRLLETVGKAMRHFTKAHSTVSVVFKCRRCGRSSDNSHSISCHIPKCKGMVETRVDGGGAHGCECCPERFATSRGLTQHMRHRHITHYCRKKDGEMTEKKDIEVAGVWSNWEKEKVLRLSEAMAGIRKINKRIADCLGTGKTAEQVREKRREMRSRKIQEDRPREACDEMGIITMLSKPRTPLTSPNSLRGILREGLERDDTKNGVQIGPVTLSLRGVEQDPALLNTSALELQRLLGEGSGTRNPTNPLRKNKTALPSERKKIVKQTQYVKIQKMFQNNQARLGKYILDGNESGTVVSPSLEVALAFKDRWEVTEEYIGLGQFESVGEAENGEFRSLISAAEVWENLRSIKNGTAAGPDGITKAALLKWDPSGAKLATTFSVWLTTGTLPVPFKKCRTTLIPKSNDPELLTQAAGWRPLTIGSVVLRLYSRILTHRLTRACPISPRQRGFISSPGCSENLMILGGLIKRSWAKGERLAVVLVDFARAFDSVSHLHILEVLRQRGLDEHIIGIVGDSYTDVVTTITVNGELSPPIDVRVGVKQGDPMSPLLFNLALDPMIETLERCGLGYKMDDQQITTLAFADDLVLVSGSWEGMARNILILEEFCRLTGLRIQPKKCHGFLIQKTQGVRQVNLCKPWIVCGEELHMVGPEESVAYLGMMVGPWQGIMEPKPVERLRNWIRSIGRSPLKPTQKVRMLKVYAIPRMVYQADHGGLGPTILNVLDGMIRRVVKKWLHLPQCTCDGLLYSRCQDGGLGIEKLACQIPSVQVRRVYRLWHSEDAITRVVTRRTIEPKEYLGMWLRAGGDEASLPPLEEGTEGTVRGTDPASSVKPKRPAAPNWRQAEFLKWQNLTSQGVGVQAFGRDRNSNHWLANPETLGLKERHYIAGLQLRANVYPTREALSRGRRDIPKACRRCLSGTESCSHILGQCPAVKDSRIARHHKLCDLLTNEAESAGWNVIREMCCRTQAGALRRPDMVCVKDGNVLVVDVTVRYEMAFDTLKVAAAEKVARYNPIAPYVAAVLKVKKVKVFGFPLGARGKWPTDNNRLLQALGVNGGRRKQLAKLFSRRALLYSLDVLRDFYRVEGVAGNLDDESEENHP

SEQ ID NO: 2735 - protein, 1254 aa, Salmo salar
MRVERLERKAILVERYKRKMSDKSIDKMSGCDEIICRNKHCLKRRWAWISGPKGELSPPRKRGTCGKLSLQDKSHASDPDLLEAPEAKEDEGSMAPRCVGESKIPTLASRDGGKEIVLPPQPVHAVGGTPASTSVVKVRQNTLLISLPVRDLRCGQCGRPLGTVGAAVKHFRVVHPAVPVVYACRVCGRSSRDSHSISCHVPKCKGVTETRMELDSDHVCDCCPKRFTSAMGLTQHKRHRHIAVYCGEKEREVTAKLEGGYSEEKKWKKEEEEVVALLSKKLAGVKEINRRIADCLGNGKTAEQVRQKRRQMRLNRTSNDKPKEVTDESVFIKMLSKPATPLTPQSGIRGLLHERLNGDDTKNEVEIGEVMLSLRRAEQDPVLLVSSALELQRLLGRGERAPSRMDKARERKITLPSDGKSKAEYHRVQELYGKKRARLAKYILDGNEDMDARLPPPEVVSAYRRRWEVTETYHGLGQFCSMRKSDNGVFRSPITAAEVCENLGDIKNQTAAGPDGITKTALHEWDPSGAKLAVTFSVWLATGTLPGPFKKCRTTLIPKTKDPSLLTQASGWRPLTIGSVVLRLYSRILTHRLARACPINPRQRGFISTPGCSENLMILGGLIKYSRAKGETLAVVLVDFARAFDSVSHLHILEVLGQRGLDEHIIGIVGDSYTEVTTTMSVSGEMPTPIDIRVGVKQGDPMSPLLFNLALDPMIDTLERHGLGYRMDGQQITSLAFADDLVLVSSTWDGMARNILILEKFCQLTGLRIQPKKCHGFLMRKVRGAHVINLCKPWIVCGEYLHMVGPEESVAYLGLSVSPWFGIMEPEPVERLRNWIRSIGRSPLKPSQKVRMLNVYAVPRMVYQADHGGLGTNVLKVLDGMIRKAVKLWLHLPTCTCDGLLYSRCQDGGLGIGKLACQIPGIQARRVYRLWHSEDVVTRVVTRRTVERKEYLGMWRRAGGDEASLPPLEGEVEGAALGAEPTGLVKHKHPVCPNWRQEEFQRWQNLTSQGIGVQVFGRDRNSNHWLANPETLGIRERHYIAGLLLRANVYPTREALSRGRRGLTEVCRLCLSGTESCSHILGQCPAVKDSRIRRHHKLCDLLASEAESTGWNVIREMCCRTPAGALRRPDLVFVKNGSALVVDLTVRYEMTSDTFMVAAAEKVARYNPITPCVAAALKVKKVKVFGFPLGARGKWPTGNNRLLSALGVKCGRRNKLAKLFSRRALLYSLDVLRDFYRAEGETVDSDDGSEDDHL

SEQ ID NO: 2736 - protein, 976 aa, Nymphon striatum
MPQPDNKCAQCRILSRRTRRGRECTSCLKWYHLACVHLKRVESDNLVVWSCPSCINSKLSIPPHTQGHTVQLIASDDPVIDSKCIIDKIRSLKNNYKVIPRIPKAARIAAAEKLSMLITKALSDPTPASWLNLICFPRIAFRLPSRNDQNESNNISTIIKRQIANYNNAIDFKIENKMAPLKFKPPEPNQRLKQAVEAKMADFDFSGAVRRIASNDTSAGYSEEVLEALRSKHPQAPEDIREAVTPCEQPSSLISCSTTRHAIVKMNSGSAAGPDGLRPIHIKHLIEVSNNEAGSNLLSALNSLVQLFVAGQIPEFARDSMYAASISALQKKDGGIRPIAVGNTYRRIASKICISLEADKLRECFYPTQLGFATKGGCEALVHSVRTLVEANHEPTVLVKIDMRNAFNTLRRDVFLEATRKHIPDAYPMVFQAYGTPSTLLFGEDGSISSESGLQQGDPFGPPIFALGINEVVKSVTTPFNAWYLDDATIAGNGKLVLANLQKILPDLLKCGLEVNPSKSEITFLGVNETERVEILDAVSQILPGLRITELRDLEMLGAPISIDKISVHLKAKQDTVELMSERLKLIDAHLAFAMLKGAFFIPRFTYLLRVTPAYAVPEALSNIDLRFRDMLASIANVNLDNAQWEQACLPTKHGGLGIRRATDVARPAYNSSIFSTIDAVKDMLANTTTYDFMTSETGRLLDEWSEEFDEVMPKNRTRQRDWDEISTQSKWLRSLTQADQLDKARLLAAASPKSGSWLEVLPVPNLGTRLDNEAFRIGIGLRIGAALCQPHKCRCGSTVDARGLHPLSCRYSEGRFPRHGAINDIVKRALGVAGFPSQLEPVGLDRGDGKRPDGLTTFPYKMGKSMVWDVTVVDSYAATNINASAIKASSAAANAEEAKSLKYAALSQRYIFEGLAFETSGALGPNAARVINEIGDMMRRSTGEPRRKTWLHQQIGLAIVRGNALSILSAGAPLI

SEQ ID NO: 2737 - protein, 1262 aa, Chrysotoxum bicinctum
METHNNNASERIPLPEVVGALPGASAGGDSMQAAGGQMPVGTLTGIPEEATHSNSPNLEFPQPSQPVSRRVLPRTSVATTIAGLPRQRIKWTVDMNRSVIRSYFISTNMETELHVYRTQMRELFLNQFPDLTRLTEQNLADRRRAIMVKQLLTVQEIQDLKIEAASHMSTSTTDRGVFQPNEEQTENNNSEATDQVVVQSNEDQSEEINNLEEGTDRRENTHTILENHINQQTESTSTNQAATNTQEQINVTTLLDENFRAALSQNENSDPSRRDIIPRIYNNRRVTELASIVNRDILPGYLASATSIQQVHCLIYSGAVAVVKTMGKKTIACTETHAPKTTSSMPAWERRLTNKINNIRQDIGRLTAFASGIRSWKIRKLLKVIISPLQIEQLTESKLTEIKDRKIQQLAAYSKRLARYKESRARKLENSLFKRNQKQFFRQLDRSGENQPNLETPPMEEVIKFWSEIWSKPKSMNLETEWLNKEFENNIGYTEMQNTDVSTEEVAKAIRESSNWKAPGPDKIHNVWLKKFTATHSLLAVFFTKLLRAPHETPPFFLMGNTYLISKGNNNTLDPANYRPITCLSTTYKLMTKILTNRIYEHCAKHNIITQEQKGCAKNSMGCKEQLTIDSVIVHQAVQGKRNLSMGYIDYKKAFDSLPHTYLLKILETYKIDSRIINFMKVTMKTWNVKLHLGQNDSQPIPIKRGIFQGDAFSPLWFCLCMNPLSRILKSLNLGFKLKAETGVFLVNHLFYVDDLKLYTSSKEKMHRMIQLVKQFSDDIGMEFGIEKCKMIHIQKGKVQNDIDGFHLDDNNIIANLDQEESYKYLGFLQLKGIQESELKTILRDKFRQRLTKVLKSHLNAGNKRKAINTWAIPVFTYSFGVVNWSNTNLDEISTLLRTTLTKYQSHHPRSAIERVNLSYEDGGRGFLDIPNLHFSQIKNLRDYFRSQIESSDLIRTVCLADKKYTPLNLKSSVIETPPNVLSREERLEVWKSKSIHGVHPFQLSQSFIDAPSSNLWLQRGSLFAETEGFIIAIQDKVIATKNYRKFVLREDLQNDSCRRCKSNTETIDHIIGGCTSLASHDYTARHNQVAKIIHQGLAIQNNLVKLKLPYYKYEPPPILENSSCKLYWDRSMITDRTIRANRPDILLFDKVGKKITLLDIAVPLNNNLQSTYSAKIEKYIDLANELKSMYHVERVDISPIIISATGLIPKHLIVQLKKHNLKDALEIMQKSVILNTCNIVRRFLQQTDTNGLEHGLRPNRA

SEQ ID NO: 2738 - protein, 804 aa, Chrysotoxum bicinctum
MEEVIRFWSEIWSKPKSMNLETEWLNKEFENNIGYTEMQNTDVSTEEVAKAIRESSNWKAPGPDRIHNVWLKKFTATHSLLAVFFTKLLRKPHETPPFFLMGNTYLISKGNNNTLDPANYRPITCLSTTYKLMTKILTNRIYEHCAKHNIITQEQKGCAKNSMGCKEQLTIDSVIVHQAVQGKRNLSMGYIDYKKAFDSLPHTYLLKILETYKIDSRIINFMKVTMETWNVKLHLVQNDSQPIPIKRGIFQGDAFSPLWFCLCMNPLSRILKSLNLGFKLKAETGVFLVNHLFYVDDLKLYTSSKEKMHRMIQLVKQFSDDIGMEFGIEKCKMIHIQKGKVQNDIDGFHLDDNNIIANLDQEESYKYLGFLQLKGIQESELKTILRDKFRQRLTKVLKSHLNAGNKRKAINTWAIPVFTYSFGVVNWSNTNLDEISTLLRTTLTKYQSHHPRSAIERVNLSYEDGGRGFLDIPNLHFSQIKNLRDYFRSQIESSDLIRTVCLADKKYTPLNLKSSVIETPPNVLSREERLEVWKSKSIHGVHPFQLSQSFIDAPSSNLWLQRGSLFAETEGFIIAIQDKVIATKNYRKFVLREYLQNDSCRRCQSNTETIDHIIGGCTSLASHDYTARHNQVAKIIHQGLAIQNNLVKLKLPYYKYEPPPILENSSCKLYWDRSMITDRTIRANRPDILLFDKVGKKITLLDIAVPLNNNLQSTYSAKIEKYINLANELKSMYHVERVDISPIIISATGLIPKHLIVQLKKHNLKDALEIMQKSVILNTCNIVRRFLQQTDTNGLEHGLRPNRA

SEQ ID NO: 2739 - protein, 1262 aa, Chrysotoxum bicinctum
METHNNNASERIPLPEVVGALPGASAGGDSMQAAGGQMPVGTLTGIPEEATHSNSPNLEFPQPSQPVSRRVLPRTSVATTIAGLPRQRIKWTVDMNRSVIRSYFISTNMETELHVYRTQMRELFLNQFPDLTRLTEQNLADRRRAIMVKQLLTVQEIQDLKIEAASHMSTSTTDRGVFQPNEEQTENNNSEATDQVVVQSNEDQSEEINNLEEGTDRRENTHTILENHINQQTESTSTNQAATNTQEQINVTTLLDENFRAALSQNENSDPSRRDIIPRIYNNRRVTELASIVNRDILPGYLASATSIQQVHCLIYSGAVAVVKTMGKKTIACTETHAPKTTSSMPAWERRLTNKINNIRQDIGRLTAFASGIRSWKIRKLLKVIISPLQIEQLTESKLTEIKDRKIQQLAAYSKRLARYKESRARKLENSLFKRNQKQFFRQLDRSGENQPNLETPPMEEVIRFWSEIWSKPKSMNLETEWLNKEFENNIGYTEMQNTDVSTEEVAKAIRESSNWKAPGPDKIHNVWLKKFTATHSLLAVFFTKLLREPHETPPFFLMGNTYLISKGNNNTLDPANYRPITCLSTTYKLMTKILTNRIYEHCAKHNIITQEQKGCAKNSMGCKEQLTIDSVIVHQAVQGKRNLSMGYIDYKKAFDSLPHTYLLKILETYKIDSRIINFMKVTMETWNVKLHLGQNDSQPIPIKRGIFQGDAFSPLWFCLCMNPLSRILKSLNLGFKLKAETGVFLVNHLFYVDDLKLYTSSKEKMHRMIQLVKQFSDDIGMEFGIEKCKMIHIQKGKVQNDIDGFHLDDNNIIANLDQEESYKYLGFLQLKGIQESELKTILRDKFRQRLTKVLKSHLNAGNKRKAINTWAIPVFTYSFGVVNWSNTNLDEISTLLRTTLTKYQSHHPRSAIERVNLSYEDGGRGFLDIPNLHFSQIKNLRDYFRSQIESSDLIRTVCLADKKYTPLNLKSSVIETPPNVLSREERLEVWKSKSIHGVHPFQLSQSFIDAPSSNLWLQRGSLFAETEGFIIAIQDKVIATKNYRKFVLREDLQNDSCRRCKSNTETIDHIIGGCTSLASHDYTARHNQVAKIIHQGLAIQNNLVKLKLPYYKYEPPPILENSSCKLYWDRSMITDRTIRANRPDILLFDKVGKKITLLDIAVPLNNNLQSTYSAKIEKYIDLANELKSMYHVERVDISPIIISATGLIPKHLIVQLKKHNLKDALEIMQKSVILNTCNIVRRFLQQTDTNGLEHGLRPNRA

SEQ ID NO: 2740 - protein, 906 aa, Platycheirus albimanus
MPQWERRLINKISKIRDDLGRLTAYSKGTRSRNIRKLLKVIIYPLRIQELTENVLIEIKDRKNQQLSAYAKRLARYRESRTRKLENSLFERNQKQFYRQLDQPKENQNNFHFPPIEEVTHFWREIWSKSKNINLDTDWLANELENCEGYREMQATDISTEEVTDAIRGCSNWKAPGPDKIHNVWLKKFTTTHALFAVFFTKLLRNPQETPLFLMSGNTFLISKGNDALDPANYRPITCLSTTYKLMTKIFANRVYEHCDKYNIITPEQKGCAKNSMGCKEQLTIDTVLVSQAVQGQRNLSMGYIDYKKAFDSLPHKFLIKILELYKIDSRIVNFMKKTMETWNVRLHLGLNTSQAVPIKCGIFQGDAFSPLWFCLSMNPLSRMLKNINLGFKLKAETGDLLINHLLYVDDLKLYTTNKEKMHRMIETVKRFSDDIGMEFGIEKCKMIHIKKGKVQNEEEGYLVDENMIIANLDQNENYKYLGFLQLRGIQESELKQIIRNKFKERMEKILKSHLNAANKRKAINTWAIPVFTYSFGVVNWSNTNLDEIATFTRTTLTKYLCHHPRSAVERVTLPYEDGGRGLLDIPNLHFCQINNLRNYFRSKMETCELTRIVCLADKNYTPLNLRSGEIQKPPNVLSREERIEIWKSKSLHGIHPFQLNQSFIDVPSSNLWLQRGSLFSETEGFMIAIQDKVIATKNYRKFVLREELQNDSCRRCQINAETIDHIIGGCTSLASRDYTARHNQVAKIIHQGLAMQYKLVKKKLPYYKYDPLPVLENSICKLYWDRSIITDRTIRANKPDIVVFDKVGKKITLFDIAVPLNNNIQSTYSTKIEKYTDLANEIQAMYHVERVDISPIIISATGLIPKHLIAQLKNHNLLEALEIIQKSVILNTCNIVRRFLQQNNTH

SEQ ID NO: 2741 - protein, 982 aa, Aelia acuminata
MDVNANRCPCCERRFGTRSGAGLHIKRAHPDFYNANLRTERQKQRWTEEELLLLAMNEASLMAQGRNVRIQDLIEMWPSRTKWSILNARRKEQYQEILRSVLARNVDRGADPSRSTATNIASNNKQEFLKAARLIWSEIKNPNSFLFTILEMAEEGKNISESLKAWLASLMPKSNTTITKTNEQEVRTLPANAAVRRREEFKRIQRLWAKDRRKAMNEVFNTTMARNKHSVEELETFWRPLMERASSPLAPDTPIPTQEMFTLWLPITVEEVKLSSMDRKSSPGPDGITVKQWESVCPLHRAVFYNLYLSDPSHLQELTAARTISIPKTDYPSDPSEYRPITVASVPLRQMHKVFAARLNELDLYHVSQRAFIAADGTAENIFSLQALIEESKSRKKDIHVTFIDIAKAFDNVSHNALFKILEWKGIPPGFINYCRGLYRQCYTRITDNKHWSKPILCGRGIRQGDPLSPSLFNLAMDWVVHSLPQGIGFNMQGTTVNCLAFADDLVLVSSSTNGMKRLLTHVAKSIQDLGLEINPKKCHSFSLIKAVKSSAMKVESRCHFTIKGTKLNQLGILDCWKYLGAKFSLNFKTTMGIINEFSSLLKKISTAPLKPQQKLIALRTYLTPKYIHLLTLSPYKTSELRKLDISTRNAIRCWLRLPKDTPTQYFHSSCNNGGLGVLSFVISIPALKLARMRRLEHSGSPVARSAFTSYFIRREIMKLSNSLTKMGLDPDNTSGDERKKVLSTKLHRSVDGRALRESKNCPPSTHWLKDYAAPVSGRTFIQSVKTHINALATRVRCSRGRRAYMETSCRAGCPVNETASHIIQHCFVSHGGIVRRHDFIVNLLEKALQNKGYRVIKEATFIGNKRRWRPDLVCTGPSGNYIIDAHIVGDNPSTSHWNKVKHNKYNDLDCRMAIGRRLQVPGVDIKVLPVTITWRGVWCRRSYRDMVTLGIAKRTMNAITVSVLRGSYLIYKSWFGLLSRL

SEQ ID NO: 2742 - protein, 972 aa, Aelia acuminata
MDVNANRCPCCERRFGTRSGAGLHIKRAHPDFYNANLRTERQKQRWTEEELLLLAMNEASLMAQGRNVRIQDLIEMWPSRTKWSILNARRKEQYQEILRSVLARNVDRGADPSRSTATNIASNNKQEFLKAARLIWSEIKNPNSFLFTILEMAEEGKNISESLKAWLASLMPKSNTTITKTNEQEVRTLPANAAVRRREEFKRIQRLWAKDRRKAMNEVFNTTLARNKHSVEELETFWRPLMEKASSPLVPDTPIPTQEMFTLWLPITVEEVKLSSMDRKSSPGPDGITVKQWESVCPLHRAVFYNLYLSDPSHLQELTAARTIFIPKTDYPSDPSEYRPITVASVPLRQMHKVFAARLNELDLYHVSQRAFIAADGTAENIFSLQALIEESKSRKKDIHVTFIDIAKAFDNVSHNALFKILEWKGIPPGFINYCRGLYRQCYTRITDNKHWSKPILCGRGIRQGDPLSPSLFNLAMDWVVHSLPQGIGFNMQGTTVNCLAFADDLVLVSSSTNGMKRLLTHVAKSIQDLGLEINPKKCHSFSLIKAVKSSAMKVESRCHFTIKGTKLNQLGILDCWKYLGAKFSLNFKTTMGIINEFSSLLKKISTAPLKPQQKLIALRTYLTPKYIHLLTLSPYKTSELRKLDISTRNAIRCWLRLPKDTPTQYFHSSCNNGGLGVLSFVISIPALKLARMRRLEHSGSPVARSAFTSYFIRREIMKLSNSLTKMGLDPDNTSGDERNKVLSTKLHRSVDGRALRESKNCPPSTHWLKDYAAPVSGRTFIQSVKTHINALATRVRCSRGRRAYMETSCRAGCPVNETASHIIQHCFVSHGGIVRRHDFIVNLLEKALQNKGYRVIKEATFIGIKRRWRPDLVCTGPSGNYISTSHWNKVKHNKYNDLDCRMAIGRRLQVPGVDIKVLPVTITWRGVWCRRSYQDMVTLGIAKRTMNAITVSVLRGSYLIYKSWFGLLSRL

SEQ ID NO: 2743 - protein, 982 aa, Aelia acuminata
MDVNANRCPCCERRFGTRSGAGLHIKRAHPDFYNANLRTERQKQRWTEEELLLLAMNEASLMAKGRNVRIQDLIEMWPSRTKWSILNARRKEQYQEILRSVLARNVDRGADPSRSTATNIASNNKQEFLKAARLIWSEIKNPNSFLFTILEMAEEGKNISESLKAWLASLMPKSNTTITKTNEQEVRTLPANAAVRRREEFKRIQRLWAKDRRKAMNEVFNTTMARNKHSVEELETFWRPLMERASSPLAPDTPIPTQEMFTLWLPITVEEVKLSSMDRKSSPGPDGITVKQWESVCPLHRAVFYNLYLSDPSHLQELTAARTIFIPKTDYPSDPSEYRPITVASVPLRQMHKVFAARLNELDLYHVSQRAFIAADGTAENIFSLQALIEESKSRKKDIHVTFIDIAKAFDNVSHNALFKILEWKGIPPGFINYCRGLYRQCYTRITDNKHWSKPILCGRGIRQGDPLSPSLFNLAMDWVVHSLPQGIGFNMQGTTVNCLAFADDLVLVSSSTNGMKRLLTHVAKSIQDLGLEINPKKCHSFSLIKAVKSSAMKVESRCHFTIKGTKLNQLGILDCWKYLGAKFSLNFKTTMGIINEFSSLLKKISTAPLKPQQKLIALRTYLTPKYIHLLTLSPYKTSELRKLDISTRNAIRCWLRLPKDTPTQYFHSSCNNGGLGVLSFVISIPALKLARMRRLEHSGSPVARSAFTSYFIRREIMKLSNSLTKMGLDPDNTSGDERKKVLSTKLHRSVDGRALRESKNCPPSTHWLKDYAAPVSGRTFIQSVKTHINALATRVRCSRGRRAYMETSCRAGCPVNETASHIIQHCFVSHGGIVRRHDFIVNLLEKALQNKGYRVIKEATFIGIKRRWRPDLVCTGPSGNYIIDAHIVGDNPSTSHWNKVKHNKYNDLDCRMAIGRRLQVPGVDIKVLPVTITWRGVWCRRSYQDMVTLGIAKRTMNAITVSVLRGSYLIYKSWFGLLSRL

SEQ ID NO: 2744 - protein, 982 aa, Aelia acuminata
MDVNANRCPCCERRFGTRSGAGLHIKRAHPDFYNDNLRTERQKQRWTEEELLLLAMNEASLMAQGRNVRIQDLIEMWPSRTKWSILNARRKEQYQEILRSVLARNVDRSADPSRSTATNIASNNKQEFLKAARLIWSEIKNPNSFLFTILEMAEEGKNISESLKAWLASLMPKSNTTITKTNEQEVRTLPANAAVRRREEFKRIQRLWAKDRRKAMNEVFNTTMARNKHSVEELETFWRPLMERASSPLAPDTPIPTQEMFTLWLPITVEEVKLSSMDRKSSPGPDGITVKQWESVCPLHRAVFYNLYLSDPSHLQELTAARTIFIPKTDYPSDPSEYRPITVASVPLRQMHKVFAARLNELDLYHVSQRAFIAADGTAENIFSLQALIEESKSRKKDIHVTFIDIAKAFDNVSHNALFKILEWKGIPPGFINYCRGLYRQCYTRITDNKHWSKPILCGRGIRQGDPLSPSLFNLAMDWVVHSLPQGIGFNMQGTTVNCLAFADDLVLVSSSTNGMKRLLTHVAKSIQDLGLEINPKKCHSFSLIKAVKSSAMKVESRCHFTIKGTKLNQLGILDCWKYLGAKFSLNFKTTMGIINEFSSLLKKISTAPLKPQQKLIALRTYLTPKYIHLLTLSPYKTSELRKLDISTRNAIRCWLRLPKDTPTQYFHSSCNNGGLGVLSFVISIPALKLARMRRLEHSGSPVARSAFTSYFIRREIMKLSNSLTKMGLDPDNTSGNERKKVLSTKLHRSVDGRALRESKNCPPSTHWLKDYAAPVSGRTFIQSVKTHINALATRVRCSRGRRAYMETSCRAGCPVNETASHIIQHCFVSHGGIVRRHDFIVNLLEKALQNKGYRVIKEATFIGIKRRWRPDLVCTGPSGNYIIDAHIVGDNPSTSHWNKVKHNKYNDLDCRMAIGRRLQVPGVDIKVLPVTITWRGVWCRRSYQDMVTLGIAKRTMNAITVSVLRGSYLIYKSWFGLLSRL

SEQ ID NO: 2745 - protein, 1176 aa, Apoderus coryli
MMSSNKNGPESPADLQWSQGAKNPREETINTRNTNQTQETIISKEQLESQEWNLSQNNKRMTRQNVEVPHEADRGARRTWSRNDNLDVFRAYFLGTQFETQKRGFRKNMLLEWRKIRPDLILNENQLANQLYAIKTHNLLTAVDIEELKQNMSETDQGIETDNTIIYEQTNESNTQTINIQNNLALNVDLDAGENVNDVVVRFQENIAVFKNSDPEKRLSLPKIKPTKKTKQLISIVNQEILKYMPTSNLEETQTLVYTAAKTVIESMGVKLGKKQKAKKEPKWRERIEQKIKTLRSWLTKIRDWERGNMSTKLSNDIHYYFRKNNIQHSNYQEKETFKEKIKQQIAALGNRLRRYNKSYKRKNDNKLFKNNEKEFYKKLNNEPPIEQGPDKEQLQTFWKNVWASKQQYNQKASWLKTEKKKYDTLIDMEISPITETEVKNALNRSHNWKAPGVDHVHNYWWKNINITKLLTKQINELLTNNTYHPKFLTKGITSMIPKKGDTTNPKNYRPITCLPTLYKIITSILSQKIIKHIEDSGILTEEQKGCRHGTLGSKEQLVIDSIVTQDAKKRNKNMAVAWIDYQKAFDSVPHSWLIDVLKLYKISPNIINFLATAMKTWRTKLVVKTEKTNIVTDEIPIQSGMFQGDSLSPFWFVLCLNPLSNMLKDTRIGYTLRYEDSDYTINHLFYVDDLKLYASTEKQLDRLIETTQKFTLDIKMKLGFDKCAKLVAQKGKLQTYENLENSETFRYLNNDYYKYLGYNQKLVLDQKNIIENTEQKMVDRIRKILRSELTGKNKIKAINTYALPVLSYSFGIIRWSKTSIEAMNRKIRVLLTEYRCHHPHACTERLYLPRNVGGRGLLDLHRLCDRQINLLKTYFNRKSLLSPLHRQVKRLDYYSPLQLSNNTMRETLTNDHIREQWLEKSLHGKYPYALSQADAELSTMWLKHGLLFAETEGFLVSIQDGVTPTRNYQKYIQKIPIENDKCRMCFAKSETTEHILSACSSLAPTEYTKRHNLTAGIIHQEIAVQCKLIEKKEKYFLYNPFPFLQNDNYKLYWDFPIITDRPIASNRPDITLVDRKNKTAYFVDISHPADHNLLNKEKEKINKYQDLCTEFKNIYKLDKVLTVPIIISVTGLIGKNLPRFLKQIDIDQRNITTLMQRSVILESCRIMRKTLNLPE

SEQ ID NO: 2746 - protein, 1175 aa, Apoderus coryli
MMSSNKNGPESPADLQWSQGAKNPREETINTRNTNQTQETIISKEQLESQEWNLSQNNKRMTRQNVEVPHEADRGARRTWSRNDNLDVFRAYFLGTQFETQKRGFRKNMLLEWRKIRPDLILNENQLANQLYAIKTHNLLTAVDIEELKQNMSETDQGIETDNTIIYEQTNESNTQTINIQNNLALNVDLDAGENVNDVVVRFQENIAVFKNSDPEKRLSLPKIKPTKKTKQLISIVNQEILKYMPTSNLEETQTLVYTAAKTVIESMGVKLGKKQKAKKEPKWRERIEQKIKTLRSWLTKIRDWERGNMSTKLSNDIHYYFRKNNIQHSNYQEKETFKEKIKQQIAALGNRLRRYNKSYKRKNDNKLFKNNEKEFYKKLNNEPPIEQGPDKEQLQTFWKNVWASKQQYNQKASWLKTEKKKYDTLIDMEISPITETEVKNALNRSHNWKAPGVDHVHNYWWKNINITKLLTKQINELLTNNTYHPKFLTKGITSMIPKKGDTTNPKNYRPITCLPTLYKIITSILSQKIIKHIEDSGILTEEQKGCRHGTLGSKEQLVIDSIVTQDAKKRNKNMAVAWIDYQKAFDSVPHSWLIDVLKLYKISPNIINFLATAMKTWRTKLVVKTEKTNIVTDEIPIQSGIFQGDSLSPFWFVLCLNPLSNMLKDTRIGYTLRYEDSDYTINHLFYVDDLKLYASTEKQLDRLIETTQKFSLDIKMRLGFDKCAKLVAQKGKLQTYENLENSETFRYLNNDYYKYLGYNQKLVLDQKNIIENTEQKMVDRIRKILRSELTGKNKIKAINTYALPVLSYSFGIIRWSKTSIEAMNRKIRVLLTEYRCHHPHACTERLYLPRNVGGRGLLDLHRLCDRQINLLKTYFNRKSLLSPLHRQVKRLDYYSPLQLSNNTMRETLTNDHIREQWLEKSLHGKYPYALSQADAELSTMWLKHGLLFAETEGFLVSIQDGVTPTRNYQKYIQKIPIENDKCRMCFAKSETTEHILSACSSLAPTEYTKRHNLTAGIIHQEIAVQCKLIEKKEKYFLYNPFPFLQNDNYKLYWDFPIITDRPIASNRPDITLVDRKNKTAYFVDISHPADHNLLNKEKEKINKYQDLCTEFKNIYKLDKVLTVPIIISVTGLIGKNLPRFLKQIDIDQRNITLMQRSVILESCRIMRNTLNLPE

SEQ ID NO: 2747 - protein, 1175 aa, Apoderus coryli
MMSSNKNGPESPADLQWSQGAKNPREETINTRNTNQTQETIISKEQLESQEWNLSQNNKRMTRQNVEVPHEADRGARRTWSRNDNLDVFRAYFLGTQFETQKRGFRKNMLLEWRKIRPDLILNENQLANQLYAIKTHNLLTAVDIEELKQNMSETDQGIETDNTIIYEQTNESNTQTINIQNNLALNVDLDAGENVNDVVVRFQENIAVFKNSDPEKRLSLPKIKPTKKTKQLISIVNQEILKYMPTSNLEETQTLVYTAAKTVIESMGVKLGKKQKAKKEPKWRERIEQKIKTLRSWLTKIRDWERGNMSTKLSNDIHYYFRKNNIQHSNYQEKETFKEKIKQQIAALGNRLRRYNKSYKRKNDNKLFKNNEKEFYKKLNNEPPIEQGPDKEQLQTFWKNVWASKQQYNQKASWLKTEKKKYDTLIDMEISPITETEVKNALNRSHNWKAPGVDHVHNYWWKNINITKLLTKQINELLTNNTYHPKFLTKGITSMIPKKGDTTNPKNYRPITCLPTLYKIITSILSQKIIKHIEDSGILTEEQKGCRHGTLGSKEQLVIDSIVTQDAKKRNKNMAVAWIDYQKAFDSVPHSWLIDVLKLYKISPNIINFLATAMKTWRTKLVVKTEKTNIVTDEIPIQSGIFQGDSLSPFWFVLCLNPLSNMLKDTRIGYTLRYEDSDYTINHLFYVDDLKLYASTEKQLDRLIETTQKFSLDIKMRLGFDKCAKLVAQKGKLQTYENLENSETFRYLNNDYYKYLGYNQKLVLDQKNIIENTEQKMVDRIRKILRSELTGKNKIKAINTYALPVLSYSFGIIRWSKTSIEAMNRKIRVLLTEYRCHHPHACTERLYLPRNVGGRGLLDLHRLCDRQINLLKTYFNRKSLLSPLHRQVKRLDYYSPLQLSNNTMRETLTNDHIREQWLEKSLHGKYPYALSQADAELSTMWLKHGLLFAETEGFLVSIQDGVTPTRNYQKYIQKIPIENDKCRMCFAKSETTEHILSACSSLAPTEYTKRHNLTAGIIHQEIAVQCKLIEKKEKYFLYNPFPFLQNDNYKLYWDFPIITDRPIASNRPDITLVDRKNKTAYFVDISHPADHNLLNKEKEKINKYQDLCTEFKNIYKLDKVLTVPIIISVTGLIGKNLPRFLKQIDIDQRNITLMQRSVILESCRIMRKTLNLPE

SEQ ID NO: 2748 - protein, 1175 aa, Apoderus coryli
MMSSNKNGPESPADLQWSQGAKNPREETINTRNTNQTQETIISKEQLESQEWNLSQNNKRMTRQNVEVPHEADRGARRTWSRNDNLDVFRAYFLGTQFETQKRGFRKNMLLEWRKIRPDLILNENQLANQLYAIKTHNLLTAVDIEELKQNMSETDQGIETDNTIIYEQTNESNTQTINIQNNLALNVDLDAGENVNDVVVRFQENIAVFKNSDPEKRLSLPKIKPTKKTKQLISIVNQEILKYMPTSNLEETQTLVYTAAKTVIESMGVKLGKKQKAKKEPKWRERIEQKIKTLRSWLTKIRDWERGNMSTKLSNDIHYYFRKNNIQHSNYQEKETFKEKIKQQIAALGNRLRRYNKSYKRKNDNKLFKNNEKEFYKKLNNEPPIEQGPDKEQLQTFWKNVWASKQQYNQKASWLKTEKKKYDTLIDMEISPITETEVKNALNRSHNWKAPGVDHVHNYWWKNINITKLLTKQINELLTNNTYHPKFLTKGITSMIPKKGDTTNPKNYRPITCLPTLYKIITSILSQKIIKHIEDSGILTEEQKGCRHGTLGSKEQLVIDSIVTQDAKKRNKNMAVAWIDYQKAFDSVPHSWLIDVLKLYKISPNIINFLATAMKTWRTKLVVKTEKTNIVTDEIPIQSGIFQGDSLSPFWFVLCLNPLSNMLKDTRIGYTLRYEDSDYTINHLFYVDDLKLYASTEKQLDRLIETTQKFTLDIKMKLGFDKCAKLVAQKGKLQTYENLENSETFRYLNNDYYKYLGYNQKLVLDQKNIIENTEQKMVDRIRKILRSELTGKNKIKAINTYALPVLSYSFGIIRWSKTSIEAMNRKIRVLLTEYRCHHPHACTERLYLPRNVGGRGLLDLHRLCDRQINLLKTYFNRKSLLSPLHRQVKRLDYYSPLQLSNNTMRETLTNDHIREQWLEKSLHGKYPYALSQADAELSTMWLKHGLLFAETEGFLVSIQDGVTPTRNYQKYIQKIPIENDKCRMCFAKSETTEHILSACSSLAPTEYTKRHNLTAGIIHQEIAVQCKLIEKKEKYFLYNPFPFLQNDNYKLYWDFPIITDRPIASNRPDITLVDRKNKTAYFVDISHPADHNLLNKEKEKINKYQDLCTEFKNIYKLDKVLTVPIIISVTGLIGKNLPRFLKQIDIDQRNITLMQRSVILESCRIMRKTLNLPE

SEQ ID NO: 2749 - protein, 1025 aa, Apoderus coryli
MSETDQGIETDNTIIYEQTNESNTQTINIQNNLALNVDLDAGENVNDVVVRFQENIAVFKNSDPEKRLSLPKIKPTKKTKQLISIVNQEILKYMPTSNLEETQTLVYTAAKTVIESMGVKLGKKQKAKKEPKWRERIEQKIKTLRSWLTKIRDWERGNMSTKLSNDIHYYFRKNNIQHSNYQEKETFKEKIKQQIAALGNRLRRYNKSYKRKNDNKLFKNNEKEFYKKLNNEPPIEQGPDKEQLQTFWKNVWASKQQYNQKASWLKTEKKKYDTLIDMEISPITETEVKNALNRSHNWKAPGVDHVHNYWWKNINITKLLTKQINELLTNNTYHPKFLTKGITSMIPKKGDTTNPKNYRPITCLPTLYKIITSILSQKIIKHIEDSGILTEEQKGCRHGTLGSKEQLVIDSIVTQDAKKRNKNMAVAWIDYQKAFDSVPHSWLIDVLKLYKISPNIINFLATAMKTWRTKLVVKTEKTNIVTDEIPIQSGIFQGDSLSPFWFVLCLNPLSNMLKDTRIGYTLRYEDSDYTINHLFYVDDLKLYASTEKQLDRLIETTQKFTLDIKMKLGFDKCAKLVAQKGKLQTYENLENSETFRYLNNDYYKYLGYNQKLVLDQKNIIENTEQKMVDRIRKILRSELTGKNKIKAINTYALPVLSYSFGIIRWSKTSIEAMNRKIRVLLTEYRCHHPHACTERLYLPRNVGGRGLLDLHRLCDRQINLLKTYFNRKSLLSPLHRQVKRLDYYSPLQLSNNTMRETLTNDHIREQWLEKSLHGKYPYALSQADAELSTMWLKHGLLFAETEGFLVSIQDGVTPTRNYQKYIQKIPIENDKCRMCFAKSETTEHILSACSSLAPTEYTKRHNLTAGIIHQEIAVQCKLIEKKEKYFLYNPFPFLQNDNYKLYWDFPIITDRPIASNRPDITLVDRKNKTAYFVDISHPADHNLLNKEKEKINKYQDLCTEFKNIYKLDKVLTVPIIISVTGLIGKNLPRFLKQIDIDQRNITTLMQRSVILESCRIMRKTLNLPE

SEQ ID NO: 2750 - protein, 1175 aa, Apoderus coryli
MMSSNKNGPESPADLQWSQGAKNPREETINTRNTNQTQETIISKEQLESQEWNLSQNNKRMTRQNVEVPHEADRGARRTWSRNDNLDVFRAYFLGTQFETQKRGFRKNMLLEWRKIRPDLILNENQLANQLYAIKTHNLLTAVDIEELKQNMSETDQGIETDNTIIYEQTNESNTQTINIQNNLALNVDLDAGENVNDVVVRFQENIAVFKNSDPEKRLSLPKIKPTKKTKQLISIVNQEILKYMPTSNLEETQTLVYTAAKTVIESMGVKLGKKQKAKKEPKWRERIEQKIKTLRSWLTKIRDWERGNMSTKLSNDIHYYFRKNNIQHSNNQEKETFKEKIKQQIAALGNRLRRYNKSYKRKNDNKLFKNNEKEFYKKLNNEPPIEQGPDKEQLQTFWKNVWASKQQYNQKASWLKTEKKKYDTLIDMEISPITETEVKNALNRSHNWKAPGVDHVHNYWWKNINITKLLTKQINELLTNNTYHPKFLTKGITSMIPKKGDTTNPKNYRPITCLPTLYKIITSILSQKIIKHIEDSGILTEEQKGCRHGTLGSKEQLVIDSIVTQDAKKRNKNMAVAWIDYQKAFDSVPHSWLIDVLKLYKISPNIINFLATAMKTWRTKLVVKTEKTNIVTDEIPIQSGIFQGDSLSPFWFVLCLNPLSNMLKDTRIGYTLRYEDSDYTINHLFYVDDLKLYASTEKQLDRLIETTQKFSLDIKMRLGFDKCAKLVAQKGKLQTYENLENSETFRYLNNDYYKYLGYNQKLVLDQKNIIENTEQKMVDRIRKILRSELTGKNKIKAINTYALPVLSYSFGIIRWSKTSIEAMNRKIRVLLTEYRCHHPHACTERLYLPRNVGGRGLLDLHRLCDRQINLLKTYFNRKSLLSPLHRQVKRLDYYSPLQLSNNTMRETLTNDHIREQWLEKSLHGKYPYALSQADAELSTMWLKHGLLFAETEGFLVSIQDGVTPTRNYQKYIQKIPIENDKCRMCFAKSETTEHILSACSSLAPTEYTKRHNLTAGIIHQEIAVQCKLIEKKEKYFLYNPFPFLQNDNYKLYWDFPIITDRPIASNRPDITLVDRKNKTAYFVDISHPADHNLLNKEKEKINKYQDLCTEFKNIYKLDKVLTVPIIISVTGLIGKNLPRFLKQIDIDQRNITLMQRSVILESCRIMRKTLNLPE

SEQ ID NO: 2751 - protein, 1175 aa, Apoderus coryli
MMSSNKNGPESPADLQWSQGAKNPREETINTRNTNQTQETIISKEQLESQEWNLSQHNKRMTRQNVEVPHEADRGARRTWSRNDNLDVFRAYFLGTQFETQKRGFRKNMLLEWRKIRPDLILNENQLANQLYAIKTHNLLTAVDIEELKQNMSETDQGIETDNTIIYEQTNESNTQTINIQNNLALNVDLDAGENVNDVVVRFQENIAVFKNSDPEKRLSLPKIKPTKKTKQLISIVNQEILKYMPTSNLEETQTLVYTAAKTVIESMGVKLGKKQKAKKEPKWRERIEQKIKTLRSWLTKIRDWERGNMSTKLSNDIHYYFRKNNIQHSNYQEKETFKEKIKQQIAALGNRLRRYNKSYKRKNDNKLFKNNEKEFYKKLNNEPPIEQGPDKEQLQTFWKNVWASKQQYNQKASWLKTEKKKYDTLIDMEISPITETEVKNALNRSHNWKAPGVDHVHNYWWKNINITKLLTKQINELLTNNTYHPKFLTKGITSMIPKKGDTTNPKNYRPITCLPTLYKIITSILSQKIIKHIEDSGILTEEQKGCRHGTLGSKEQLVIDSIVTQDAKKRNKNMAVAWIDYQKAFDSVPHSWLIDVLKLYKISPNIINFLATAMKTWRTKLVVKTEKTNIVTDEIPIQSGIFQGDSLSPFWFVLCLNPLSNMLKDTRIGYTLRYEDSDYTINHLFYVDDLKLYASTEKQLDRLIETTQKFSLDIKMKFGFDKCAKLVAQKGKLQTYENLENSETFRYLNNDYYKYLGYNQKLVLDQKNIIENTEQKMVDRIRKILRSELTGKNKIKAINTYALPVLSYSFGIIRWSKTSIEAMNRKIRVLLTEYRCHHPHACTERLYLPRNVGGRGLLDLHRLCDRQINLLKTYFNRKSLLSPLHRQVKRLDYYSPLQLSNNTMRETLTNDDIREQWLEKSLHGKYPYALSRADSELSTMWLKHGLLFAETEGFLVSIQDGVTPTRNYQKYIQKIPIENDKCRMCFAKSETTEHILSACSSLAPTEYTKRHNLTAGIIHQEIAVQCKFIEKREKYFLYNPFPFLQNDNYKLYWDFPIITDRPIASNRPDITLVDRKNKTAYFVDISHPADHNLLNKEKEKINKYQDLCTEFKNIYKLDKVLTVPIIISVTGLIGKNLPRFLKQIDIDQRNITLMQRSVILESCRIMRKTLNLPE

SEQ ID NO: 2752 - protein, 1176 aa, Apoderus coryli
MMSSNKNGPESPADLQWSQGAKNPREETINTRNTNQTQETIISKEQLESQEWNLSQNNKRMTRQNVEVPHEADRGARRTWSRNDNLDVFRAYFLGTQFETQKRGFRKNMLLEWRKIRPDLILNENQLANQLYAIKTHNLLTAVDIEELKQNMSETDQGIETDNTIIYEQTNESNTQTINIQNNLALNVDLDAGENVNDVVVRFQENIAVFKNSDPEKRLSLPKIKPTKKTKQLISIVNQEILKYMPTSNLEETQTLVYTAAKTVIESMGVKLGKKQKAKKEPKWRERIEQKIKTLRSWLTKIRDWERGNMSTKLSNDIHYYFRKNNIQHSNYQEKETFKEKIKQQIAALGNRLRRYNKSYKRKNDNKLFKNNEKEFYKKLNNEPPIEQGPDKEQLQTFWKNVWASKQQYNQKASWLKTEKKKYDTLIDMEISPITETEVKNALNRSHNWKAPGVDHVHNYWWKNINITKLLTKQINELLTNNTYHPKFLTKGITSMIPKKGDTTNPKNYRPITCLPTLYKIITSILSQKIIKHIEDSGILTEEQKGCRHGTLGSKEQLVIDSIVTQDAKKRNKNMAVAWIDYQKAFDSVPHSWLIDVLKLYKISPNIINFLATAMKTWRTKLVVKTEKTNIVTDEIPIQSGIFQGDSLSPFWFVLCLNPLSNMLKDTRIGYTLRYEDSDYTINHLFYVDDLKLYASTEKQLDRLIETTQKFTLDIKMKLGFDKCAKLVAQKGKLQTYENLENSETFRYLNNDYYKYLGYNQKLVLDQKNIIENTEQKMVDRIRKILRSELTGKNKIKAINTYALPVLSYSFGIIRWSKTSIEAMNRKIRVLLTEYRCHHPHACTERLYLPRNVGGRGLLDLHRLCDRQINLLKTYFNRKSLLSPLHRQVKRLDYYSPLQLSNNTMRETLTNDHIREQWLEKSLHGKYPYALSQADAELSTMWLKHGLLFAETEGFLVSIQDGVTPTRNYQKYIQKIPIENDKCRMCFAKSETTEHILSACSSLAPTEYTKRHNLTAGIIHQEIAVQCKLIEKKEKYFLYNPFPFLQNDNYKLYWDFPIITDRPIASNRPDITLVDRKNKTAYFVDISHPADHNLLNKEKEKINKYQDLCTEFKNIYKLDKVLTVPIIISVTGLIGKNLPRFLKQIDIDQRNITTLMQRSVILESCRIMRKTLNLPE

SEQ ID NO: 2753 - protein, 1175 aa, Apoderus coryli
MMSSNKNGPESPADLQWSQGAKNPREETINTRNTNQTQETIISKEQLESQEWNLSQNNKRMTRQNVEVPHEADRGARRTWSRNDNLDVFRAYFLGTQFETQKRGFRKNMLLEWRKIRPDLILNENQLANQLYAIKTHNLLTAVDIEELKQNRSETDQGIETDNTIIYEQTNESNTQTINIQNNLALNVDLDAGENVNDVVVRFQENIAVFKNSDPEKRLSLPKIKPTKKTKQLISIVNQEILKYMPTSNLEETQTLVYTAAKTVIESMGVKLGKKQKAKKEPKWRERIEQKIKTLRSWLTKIRDWERGNMSTKLSNDIHYYFRKNNIQHSNYQEKETFKEKIKQQIAALGNRLRRYNKSYKRKNDNKLFKNNEKEFYKKLNNEPPIEQGPDKEQLQTFWKNVWASKQQYNQKASWLKTEKKKYDTLIDMEISPITETEVKNALNRSHNWKAPGVDHVHNYWWKNINITKLLTKQINELLTNNTYHPKFLTKGITSMIPKKGDTTNPKNYRPITCLPTLYKIITSILSQKIIKHIEDSGILTEEQKGCRHGTLGSKEQLVIDSIVTQDAKKRNKNMAVAWIDYQKAFDSVPHSWLIDVLKLYKISPNIINFLATAMKTWRTKLVVKTEKTNIVTDEIPIQSGIFQGDSLSPFWFVLCLNPLSNMLKDTRIGYTLRYEDSDYTINHLFYVDDLKLYASTEKQLDRLIETTQKFSLDIKMRLGFDKCAKLVAQKGKLQTYENLENSETFRYLNNDYYKYLGYNQKLVLDQKNIIENTEQKMVDRIRKILRSELTGKNKIKAINTYALPVLSYSFGIIRWSKTSIEAMNRKIRVLLTEYRCHHPHACTERLYLPRNVGGRGLLDLHRLCDRQINLLKTYFNRKSLLSPLHRQVKRLDYYSPLQLSNNTMRETLTNDHIREQWLEKSLHGKYPYALSQADAELSTMWLKHGLLFAETEGFLVSIQDGVTPTRNYQKYIQKIPIENDKCRMCFAKSETTEHILSACSSLAPTEYTKRHNLTAGIIHQEIAVQCKLIEKKEKYFLYNPFPFLQNDNYKLYWDFPIITDRPIASNRPDITLVDRKNKTAYFVDISHPADHNLLNKEKEKINKYQDLCTEFKNIYKLDKVLTVPIIISVTGLIGKNLPRFLKQIDIDQRNITLMQRSVILESCRIMRKTLNLPE

SEQ ID NO: 2754 - protein, 1175 aa, Apoderus coryli
MMSSNKNGPESPADLQWSQGAKNPREETINTRNTNQTQETIISKEQLESQEWNLSQNNKRMTRQNVEVPHEADRGARRTWSRNDNLDVFRAYFLGTQFETQKRGFRKNMLLEWRKIRPDLILNENQLANQLYAIKTHNLLTAVDIEELKQNMSETDQGIETDNTIIYEQTNESNTQTINIQNNLALNVDLDAGENVNDVVVRFQENIAVFKNSDPEKRLSLPKIKPTKKTKQLISIVNQEILKYMPTSNLEETQTLVYTAAKTVIESMGVKLGKKQKAKKEPKWRVRIEQKIKTLRSWLTKIRDWERGNMSTKLSNDIHYYFRKNNIQHSNYQEKETFKEKIKQQIAALGNRLRRYNKSYKRKNDNKLFKNNEKEFYKKLNNEPPIEQGPDKEQLQTFWKNVWASKQQYNQKASWLKTEKKKYDTLIDMEISPITETEVKNALNRSHNWKAPGVDHVHNYWWKNINITKLLTKQINELLTNNTYHPKFLTKGITSMIPKKGDTTNPKNYRPITCLPTLYKIITSILSQKIIKHIEDSGILTEEQKGCRHGTLGSKEQLVIDSIVTQDAKKRNKNMAVAWIDYQKAFDSVPHSWLIDVLKLYKISPNIINFLATAMKTWRTKLVVKTEKTNIVTDEIPIQSGIFQGDSLSPFWFVLCLNPLSNMLKDTRIGYTLRYEDSDYTINHLFYVDDLKLYASTEKQLDRLIETTQKFSLDIKMRLGFDKCAKLVAQKGKLQTYENLENSETFRYLNNDYYKYLGYNQKLVLDQKNIIENTEQKMVDRIRKILRSELTGKNKIKAINTYALPVLSYSFGIIRWSKTSIEAMNRKIRVLLTEYRCHHPHACTERLYLPRNVGGRGLLDLHRLCDRQINLLKTYFNRKSLLSPLHRQVKRLDYYSPLQLSNNTMRETLTNDHIREQWLEKSLHGKYPYALSQADAELSTMWLKHGLLFAETEGFLVSIQDGVTPTRNYQKYIQKIPIENDKCRMCFAKSETTEHILSACSSLAPTEYTKRHNLTAGIIHQEIAVQCKLIEKKEKYFLYNPFPFLQNDNYKLYWDFPIITDRPIASNRPDITLVDRKNKTAYFVDISHPADHNLLNKEKEKINKYQDLCTEFKNIYKLDKVLTVPIIISVTGLIGKNLPRFLKQIDIDQRNITLMQRSVILESCRIMRKTLNLPE

SEQ ID NO: 2755 - protein, 1175 aa, Apoderus coryli
MMSSNKNGPESPADLQWSQGAKNPREETINTRNTNQTQETIISKEQLESQEWNLSQNNKRMTRQNVEVPHEADRGARRTWSRNDNLDVFRAYFLGTQFETQKRGFRKNMLLEWRKIRPDLILNENQLANQLYAIKTHNLLTAVDIEELKQNMSETDQGIETDNTIIYEQTNESNTQTINIQNNLALNVDLDAGENVNDVVVRFQENIAVFKNSDPEKRLSLPKIKPTKKTKQLISIVNQEILKYMPTSNLEETQTLVYTAAKTVIESMGVKLGKKQKAKKEPKWRERIEQKIKTLRSWLTKIRDWERGNMSTKLSNDIHYYFRKNNIQHSNYQEKETFKEKIKQQIAALGNRLRRYNKSYKRKNDNKLFKNNEKEFYKKLNNEPPIEQGPDKEQLQTFWKNVWASKQQYNQKASWLKTEKKKYDTLIDMEISPITETEVKNALNRSHNWKAPGVDHVHNYWWKNINITKLLTKQINELLTNNTYHPKFLTKGITSMIPKKGDTTNPKNYRPITCLPTLYKIITSILSQKIIKHIEDSGILTEEQKGCRHGTLGSKEQLVIDSIVTQDAKKRNKNMGVAWIDYQKAFDSVPHSWLIDVLKLYKISPNIINFLATAMKTWRTKLVVKTEKTNIVTDEIPIQSGIFQGDSLSPFWFVLCLNPLSNMLKDTRIGYTLRYEDSDYTINHLFYVDDLKLYASTEKQLDRLIETTQKFSLDIKMRLGFDKCAKLVAQKGKLQTYENLENSETFRYLNNDYYKYLGYNQKLVLDQKNIIENTEQKMVDRIRKILRSELTGKNKIKAINTYALPVLSYSFGIIRWSKTSIEAMNRKIRVLLTEYRCHHPHACTERLYLPRNVGGRGLLDLHRLCDRQINLLKTYFNRKSLLSPLHRQVKRLDYYSPLQLSNNTMRETLTNDHIREQWLEKSLHGKYPYALSQADAELSTMWLKHGLLFAETEGFLVSIQDGVTPTRNYQKYIQKIPIENDKCRMCFAKSETTEHILSACSSLAPTEYTKRHNLTAGIIHQEIAVQCKLIEKKEKYFLYNPFPFLQNDNYKLYWDFPIITDRPIASNRPDITLVDRKNKTAYFVDISHPADHNLLNKEKEKINKYQDLCTEFKNIYKLDKVLTVPIIISVTGLIGKNLPRFLKQIDIDQRNITLMQRSVILESCRIMRKTLNLPE

SEQ ID NO: 2756 - protein, 1175 aa, Apoderus coryli
MMSSNKNGPESPADLQWSQGAKNPREETINTRNTNQTQETIISKEQLESQEWNLSQNNKRMTRQNVEVPHEADRGARRTWSRNDNLDVFRAYFLGTQFETQKRGFRKNMLLEWRKIRPDLILNENQLANQLYAIKTHNLLTAVDIEELKQNMSETDQGIETDNTIIYEQTNESNTQTINIQNNLALNVDLDAGENVNDVVVRFQENIAVFKNSDPDKRLSLPKIKPTKKTKQLISIVNQEILKYMPTSNLEETQTLVYTAAKTVIESMGVKLGKKQKAKKEPKWRERIEQKIKTLRSWLTKIRDWERGNMSTKLSNDIHYYFRKNNIQHSNYQEKETFKEKIKQQIAALGNRLRRYNKSYKRKNDNKLFKNNEKEFYKKLNNEPPIEQGPDKEQLQTFWKNVWASKQQYNQKASWLKTEKKKYDTLIDMEISPITETEVKNALNRSHNWKAPGVDHVHNYWWKNINITKLLTKQINELLTNNTYHPKFLTKGITSMIPKKGDTTNPKNYRPITCLPTLYKIITSILSQKIIKHIEDSGILTEEQKGCRHGTLGSKEQLVIDSIVTQDAKKRNKNMAVAWIDYQKAFDSVPHSWLIDVLKLYKISPNIINFLATAMKTWRTKLVVKTEKTNIVTDEIPIQSGIFQGDSLSPFWFVLCLNPLSNMLKDTRIGYTLRYEDSDYTINHLFYVDDLKLYASTEKQLDRLIETTQKFSLDIKMRLGFDKCAKLVAQKGKLQTYENLENSETFRYLNNDYYKYLGYNQKLVLDQKNIIENTEQKMVDRIRKILRSELTGKNKIKAINTYALPVLSYSFGIIRWSKTSIEAMNRKIRVLLTEYRCHHPHACTERLYLPRNVGGRGLLDLHRLCDRQINLLKTYFNRKSLLSPLHRQVKRLDYYSPLQLSNNTMRETLTNDHIREQWLEKSLHGKYPYALSQADAELSTMWLKHGLLFAETEGFLVSIQDGVTPTRNYQKYIQKIPIENDKCRMCFAKSETTEHILSACSSLAPTEYTKRHNLTAGIIHQEIAVQCKLIEKKEKYFLYNPFPFLQNDNYKLYWDFPIITDRPIASNRPDITLVDRKNKTAYFVDISHPADHNLLNKEKEKINKYQDLCTEFKNIYKLDKVLTVPIIISVTGLIGKNLPRFLKQIDIDQRNITLMQRSVILESCRIMRKTLNLPE

SEQ ID NO: 2757 - protein, 1175 aa, Apoderus coryli
MMSSNKNGPESPADLQWSQGAKNPREETINTRNTNQTQETIISKEQLESQEWNLSQNNKRMTRQNVEVPHEADRGARRTWSRNDNLDVFRAYFLGTQFETQKRGFRKNMLLEWRKIRPDLILNENQLANQLYAIKTHNLLTAVDIEELKQNMSETDQGIETDNTIIYEQTNESNTQTINIQNNLALNVDLDAGENVNDVVVRFQENIAVFKNSDPEKRLSLPKIKPTKKTKQLISIVNQEILKYMPTSNLEETQTLVYTAAKTVIESMGVKLGKKQKAKKEPKWRERIEQKIKTLRSWLTKIRDWERGNMSTKLSNDIHYYFRKNNIQHSNYQEKETFKEKIKQQIAALGNRLRRYNKSYKRKNDNKLFKNNEKEFYKKLNNEPPIEQGPDKEQLQTFWKNVWASKQQYNQKASWLKTEKKKYDTLIDMEISPITETEVKNALNRSHNWKAPEVDHVHNYWWKNINITKLLTKQINELLTNNTYHPKFLTKGITSMIPKKGDTTNPKNYRPITCLPTLYKIITSILSQKIIKHIEDSGILTEEQKGCRHGTLGSKEQLVIDSIVTQDAKKRNKNMAVAWIDYQKAFDSVPHSWLIDVLKLYKISPNIINFLATAMKTWRTKLVVKTEKTNIVTDEIPIQSGIFQGDSLSPFWFVLCLNPLSNMLKDTRIGYTLRYEDSDYTINHLFYVDDLKLYASTEKQLDRLIETTQKFSLDIKMRLGFDKCAKLVAQKGKLQTYENLENSETFRYLNNDYYKYLGYNQKLVLDQKNIIENTEQKMVDRIRKILRSELTGKNKIKAINTYALPVLSYSFGIIRWSKTSIEAMNRKIRVLLTEYRCHHPHACTERLYLPRNVGGRGLLDLHRLCDRQINLLKTYFNRKSLLSPLHRQVKRLDYYSPLQLSNNTMRETLTNDHIREQWLEKSLHGKYPYALSQADAELSTMWLKHGLLFAETEGFLVSIQDGVTPTRNYQKYIQKIPIENDKCRMCFAKSETTEHILSACSSLAPTEYTKRHNLTAGIIHQEIAVQCKLIEKKEKYFLYNPFPFLQNDNYKLYWDFPIITDRPIASNRPDITLVDRKNKTAYFVDISHPADHNLLNKEKEKINKYQDLCTEFKNIYKLDKVLTVPIIISVTGLIGKNLPRFLKQIDIDQRNITLMQRSVILESCRIMRKTLNLPE

SEQ ID NO: 2758 - protein, 908 aa, Apoderus coryli
MGVKLGKKQKAKKEPKWRERIEQKIKTLRSWLTKIRDWERGNMSTKLSNDIHYYFRKNNIQHSNYQEKETFKEKIKQQIAALGNRLRRYNKSYKRKNDNKLFKNNEKEFYKKLNNEPPIEQGPDKEQLQTFWKNVWASKQQYNQKASWLKTEKKKYDTLIDMEISPITETEVKNALNRSHNWKAPGVDHVHNYWWKNINITKLLTKQINELLTNNTYHPKFLTKGITSMIPKKGDTTNPKNYRPITCLPTLYKIITSILSQKIIKHIEDSGILTEEQKGCRHGTLGSKEQLVIDSIVTQDAKKRNKNMAVAWIDYQKAFDSVPHSWLIDVLKLYKISPNIINFLATAMKTWRTKLVVKTEKTNIVTDEIPIQSGIFQGDSLSPFWFVLCLNPLSNMLKDTRIGYTLRYEDSDYTINHLFYVDDLKLYASTEKQLDRLIETTQKFSLDIKMGLGFDKCAKLVAQKGKLQTYENLENSETFRYLNNDYYKYLGYNQKLVLDQKNIIENTEQKMVDRIRKILRSELTGKNKIKAINTYALPVLSYSFGIIRWSKTSIEAMNRKIRVLLTEYRCHHPHACTERLYLPRNVGGRGLLDLHRLCDRQINLLKTYFNRKSLLSPLHRQVKRLDYYSPLQLSNNTMRETLTNDHIREQWLEKSLHGKYPYALSQADAELSTMWLKHGLLFAETEGFLVSIQDGVTPTRNYQKYIQKIPIENDKCRMCFAKSETTEHILSACSSLAPTEYTKRHNLTAGIIHQEIAVQCKLIEKKEKYFLYNPFPFLQNDNYKLYWDFPIITDRPIASNRPDITLVDRKNKTAYFVDISHPADHNLLNKEKEKINKYQDLCTEFKNIYKLDKVLTVPIIISVTGLIGKNLPRFLKQIDIDQRNITLMQRSVILESCRIMRKTLNLPE

SEQ ID NO: 2759 - protein, 1175 aa, Apoderus coryli
MMSSNKNGPESPADLQWSQGAKNPREETINTRNTNQTQETIISKEQLESQEWNLSQNNKRMTRQNVEVPHEADRGARRTWSRNDNLDVFRAYFLGTQFETQKRGFRKNMLLEWRKIRPDLILNENQLANQLYAIKTHNLLTAVDIEELKQNMSETDQGIETDNTIIYEQTNESNTQTINIQNNLALNVDLDAGENVNDVVVRFQENIAVFKNSDPEKRLSLPKIKPTKKTKQLISIVNQEILKYMPTSNLEETQTLVYTAAKTVIESMGVKLGKKQKAKKEPKWRERIEQKIKTLRSWLTKIRDWERGNMSTKLSNDIHYYFRKNNIQHSNYQEKETFKEKIKQQIAALGNRLRRYNKSYKRKNDNKLFKNNEKEFYKKLNNEPPIEQGPDKEQLQTFWKNVWASKQQYNQKASWLKTEKKKYDTLIDMEISPITETEVKNALNRSHNWKAPGVDHVHNYWWKNINITKLLTKQINELLTNNTYHPKFLTKGITSMIPKKGDTTNPKNYRPITCLPTLYKIITSILSQKIIKHIEDSGILTEEQKGCRHGTLGSKEQLVIDSIVTQDAKKRNKNMAVAWIDYQKAFDSVPHSWLIDVLKLYKISPNIINFLATAMKTWRTKLVVKREKTNIVTDEIPIQSGIFQGDSLSPFWFVLCLNPLSNMLKDTRIGYTLRYEDSDYTINHLFYVDDLKLYASTEKQLDRLIETTQKFSLDIKMRLGFDKCAKLVAQKGKLQTYENLENSETFRYLNNDYYKYLGYNQKLVLDQKNIIENTEQKMVDRIRKILRSELTGKNKIKAINTYALPVLSYSFGIIRWSKTSIEAMNRKIRVLLTEYRCHHPHACTERLYLPRNVGGRGLLDLHRLCDRQINLLKTYFNRKSLLSPLHRQVKRLDYYSPLQLSNNTMRETLTNDHIREQWLEKSLHGKYPYALSQADAELSTMWLKHGLLFAETEGFLVSIQDGVTPTRNYQKYIQKIPIENDKCRMCFAKSETTEHILSACSSLAPTEYTKRHNLTAGIIHQEIAVQCKLIEKKEKYFLYNPFPFLQNDNYKLYWDFPIITDRPIASNRPDITLVDRKNKTAYFVDISHPADHNLLNKEKEKINKYQDLCTEFKNIYKLDKVLTVPIIISVTGLIGKNLPRFLKQIDIDQRNITLMQRSVILESCRIMRKTLNLPE

SEQ ID NO: 2760 - protein, 1175 aa, Apoderus coryli
MMSSNKNGPESPADLQWSQGAKNPREETINTRNTSQTQETIISKEQLESQEWNLSQNNKRMTRQNVEVPHEADRGARRTWSRNDNLDVFRAYFLGTQFETQKRGFRKNMLLEWRKIRPDLILNENQLANQLYAIKTHNLLTAVDIEELKQNMSETDQGIETDNTIIYEQTNESNTQTINIQSNLALNVDLDAGENVNDVVVRFQENIAVFKNSDPEKRLSLPKIKPTKKTKQLISIVNQEILKYMPTSNLEETQTLVYTAAKTVIEYMGVKLGKKQKAKKEPKWRERIEQKIKTLRSWLTKIRDWERGNMSTKLSNDIHYYFRKNNIQHSNYQEKETFKEKIKQQIAALGNRLRRYNKSYKRKNDNKLFKNNEKEFYKKLNNEPPIEQGPDKEQLQTFWKNVWASKQQYNQKASWLKTEKKKYDTLIDMEISPITETEVKNALNRSHNWKAPGVDHVHNYWWKNINITKLLTKQINELLTNNTYHPKFLTKGITSMIPKKGDTTNPKNYRPITCLPTLYKIITSILSQKIIKHIEDSGILTEEQKGCRHGTLGSKEQLVIDSIVTQDAKKRNKNMAVAWIDYQKAFDSVPHSWLIDVLKLYKISPNIINFLATAMKTWRTKLVVKTEKTNIVTDEIPIQSGIFQGDSLSPFWFVLCLNPLSNMLKDTRIGYTLRYEDSDYTINHLFYVDDLKLYASTEKQLDRLIETTQKFSLDIKMKFGFDKCAKLVAQKGKLQTYENLENSETFRYLNNDYYKYLGYNQKLVLDQKNIIENTEQKMVDRIRKILRSELTGKNKIKAINTYALPVLSYSFGIIRWSKTSIEAMNRKIRVLLTEYRCHHPHACTERLYLPRNVGGRGLLDLHRLCDRQINLLKTYFNRKSLLSPLHRQVKRLDYYSPLQLSNNTMRETLTNDDIREQWLEKSLHGKYPYALSRADSELSTMWLKHGLLFAETEGFLVSIQDGVTPTRNYQKYIQKIPIENDKCRMCFAKSETTEHILSACSSLAPTEYTKRHNLTAGIIHQEIAVQCKFIEKREKYFLYNPFPFLQNDNYKLYWDFPIITDRPIASNRPDITLVDRKNKTAYFVDISHPADHNLLNKEKEKINKYQDLCTEFKNIYKLDKVLTVPIIISVTGLIGKNLPRFLKQIDIDQRNITLMQRSVILESCRIMRKTLNLPE

SEQ ID NO: 2761 - protein, 1175 aa, Apoderus coryli
MMSSNKNGPESPADLQWSQGAKNPREETINTRNTNQTQETIISKEQLESQEWNLSQNNKRMTRQNVEVPHEADRGARRTWSRNDNLDVFRAYFLGTQFETQKRGFRKNMLLEWRKIRPDLILNENQLANQLYAIKTHNLLTAVDIEELKQNMSETDQGIETDNTIIYEQTNESNTQTINIQNNLALNVDLDAGENVNDVVVRFQENIAVFKNSDPEKRLSLPKIKPTKKTKQLISIVNQEILKYMPTSNLEETQTLVYTAAKTVIESMGVKLGKKQKAKKEPKWRERIEQKIKTLRSWLTKIRDWERGNMSTKLSNDIHYYFRKNNIQHSNYQEKETFKEKIKQQIAALGNRLRRYNKSYKRKNDNKLFKNNEKEFYKKLNNEPPIEQGPDKEQLQTFWKNVWASKQQYNQKASWLKTEKKKYDTLIDMEISPITETEVKNALNRSHNWKAPGVDHVHNYWWKNINITKLLTKQINELLTNNTYHPKFLTKGITSMIPKKGDTTNPKNYRPITCLPTLYKIITSILSQKIIKHIEDSGILTEEQKGCRHGTLGSKEQLVIDSIVTQDAKKRNKNMAVAWIDYQKAFDSVPHSWLIDVLKLYKISPNIINFLATAMKTWRTKLVVKTEKTNIVTDEIPIQSGIFQGDSLSPFWFVLCLNPLSNMLKDTRIGYTLRYEDSDYTINHLFYVDDLKLYASTEKQLDRLIETTQKFSLDIKMKFGFDKCAKLVAQKGKLQTYENLENSETFRYLNNDYYKYLGYNQKLVLDQKNIIENTEQKMVDRIRKILRSELTGKNKIKAINTYALPVLSYSFGIIRWSKTSIEAMNRKIRVLLTEYRCHHPHACTERLYLPRNVGGRGLLDLHRLCDRQINLLKTYFNRKSLLSPLHRQVKRLDYYSPLQLSNNTMRETLTNDDIREQWLEKSLHGKYPYALSRADSELSTMWLKHGLLFAETEGFLVSIQDGVTPTRNYQKYIQKIPIENDKCRMCFAKSETTEHILSACSSLAPTEYTKRHNLTAGIIHQEIAVQCKFIEKREKYFLYNPFPFLQNDNYKLYWDFPIITDRPIASNRPDITLVDRKNKTAYFVDISHPADHNLLNKEKEKINKYQDLCTEFKNIYKLDKVLTVPIIISVTGLIGKNLPRFLKQIDIDQRNITLMQRSVILESCRIMRKTLNLPE

SEQ ID NO: 2762 - protein, 1115 aa, Apoderus coryli
MTRQNVEVPHEADRGARRTWSRNDNLDVFRAYFLGTQFETQKRGFRKNMLLEWRKIRPDLILNENQLANQLYAIKTHNLLTAVDIEELKQNMSETDQGIETDNTIIYEQTNESNTQTINIQNNLALNVDLDAGENVNDVVVRFQENIAVFKNSDPEKRLSLPKIKPTKKTKQLISIVNQEILKYMPTSNLEETQTLVYTAAKTVIESMGVKLGKKQKAKKEPKWRERIEQKIKTLRSWLTKIRDWERGNMSTKLSNDIHYYFRKNNIQHSNYQEKETFKEKIKQQIAALGNRLRRYNKSYKRKNDNKLFKNNEKEFYKKLNNEPPIEQGPDKEQLQTFWKNVWASKQQYNQKASWLKTEKKKYDTLIDMEISPITETEVKNALNRSHNWKAPGVDHVHNYWWKNINITKLLTKQINELLTNNTYHPKFLTKGITSMIPKKGDTTNPKNYRPITCLPTLYKIITSILSQKIIKHIEDSGILTEEQKGCRHGTLGSKEQLVIDSIVTQDAKKRNKNMAVAWIDYQKAFDSVPHSWLIDVLKLYKISPNIINFLATAMKTWRTKLVVKTEKTNIVTDEIPIQSGIFQGDSLSPFWFVLCLNPLSNMLKDTRIGYTLRYEDSDYTINHLFYVDDLKLYASTEKQLDRLIETTQKFSLDIKMRLGFDKCAKLVAQKGKLQTYENLENSETFRYLNNDYYKYLGYNQKLVLDQKNIIENTEQKMVDRIRKILRSELTGKNKIKAINTYALPVLSYSFGIIRWSKTSIEAMNRKIRVLLTEYRCHHPHACTERLYLPRNVGGRGLLDLHRLCDRQINLLKTYFNRKSLLSPLHRQVKRLDYYSPLQLSNNTMRETLTNDHIREQWLEKSLHGKYPYALSQADAELSTMWLKHGLLFAETEGFLVSIQDGVTPTRNYQKYIQKIPIENDNCRMCFAKSETTEHILSACSSLAPTEYTKRHNLTAGIIHQEIAVQCKLIEKKEKYFLYNPFPFLQNDNYKLYWDFPIITDRPIASNRPDITLVDRKNKTAYFVDISHPADHNLLNKEKEKINKYQDLCTEFKNIYKLDKVLTVPIIISVTGLIGKNLPRFLKQIDIDQRNITLMQRSVILESCRIMRKTLNLPE

SEQ ID NO: 2763 - protein, 1068 aa, Apoderus coryli
MLLEWRKIRPDLILNENQLANQLYAIKTHNLLTAVDIEELKQNMSETDQGIETDNTIIYEQTNESNTQTINIQNNLALNVDLDAGENVNDVVVRFQENIAVFKNSDPEKRLSLPKIKPTKKTKQLISIVNQEILKYMPTSNLEETQTLVYTAAKTVIESMGVKLGKKQKAKKEPKWRERIEQKIKTLRSWLTKIRDWERGNMSTKLSNDIHYYFRKNNIQHSNYQEKETFKEKIKQQIAALGNRLRRYNKSYKRKNDNKLFKNNEKEFYKKLNNEPPIEQGPDKEQLQTFWKNVWASKQQYNQKASWLKTEKKKYDTLIDMEISPITETEVKNALNRSHNWKAPGVDHVHNYWWKNINITKLLTKQINELLTNNTYHPKFLTKGITSMIPKKGDTTNPKNYRPITCLPTLYKIITSILSQKIIKHIEDSGILTEEQKGCRHGTLGSKEQLVIDSIVTQDAKKRNKNMAVAWIDYQKAFDSVPHSWLIDVLKLYKISPNIINFLATAMKTWRTKLVVKTEKTNIVTDEIPIQSGIFQGDSLSPFWFVLCLNPLSNMLKDTRIGYTLRYEDSDYTINHLFYVDDLKLYASTEKQLDRLIETTQKFSLDIKMRLGFDKCAKLVAQKGKLQTYENLENSETFRYLNNDYYKYLGYNQKLVLDQKNIIENTEQKMVDRIRKILRSELTGKNKIKAINTYALPVLSYSFGIIRWSKTSIEAMNRKIRVLLTEYRCHHPHACTERLYLPRNVGGRGLLDLHRLCDRQINLLKTYFNRKSLLSPLHRQVKRLDYYSPLQLSNNTMRETLTNDHIREQWLEKSLHGKYPYALSQADAELSTMWLKHGLLFAETEGFLVSIQDGVTPTRNYQKYIQKIPIENDKCRMCFAKSETTEHILSACSSLAPTEYTKRHNLTAGIIHQEIAVQCKLIEKKEKYFLYNPFPFLQNDNYKLYWDFPIITDRPIASNRPDITLVDRKNKTAYFVDISHPADHNLLNKEKEKINKYQDLCTEFKNIYKLDKVLTVPIIISVTGLIGKNLPRFLKQIDIDQRNITTLMQRSVILESCRIMRKTLNLPE

SEQ ID NO: 2764 - protein, 1175 aa, Apoderus coryli
MMSSNKNGPESPADLQWSQGAKNPREETINTRNTNQTQETIISKEQLESQEWNLSQNNKRMTRQNVEVPHEADRGARRTWSRNDNLDVFRAYFLGTQFETQKRGFRKNMLLEWRKIRPDLILNENQLANQLYAIKTHNLLTAVDIEELKQNMSETDQGIETDNTIIYEQTNESNTQTINIQNNLALNVDLDAGENVNDVVVRFQENIAVFKNSDPEKRLSLQKIKPTKKTKQLISIVNQEILKYMPTSNLEETQTLVYTAAKTVIESMGVKLGKKQKAKKEPKWRERIEQKIKTLRSWLTKIRDWERGNMSTKLSNDIHYYFRKNNIQHSNYQEKETFKEKIKQQIAALGNRLRRYNKSYKRKNDNKLFKNNEKEFYKKLNNEPPIEQGPDKEQLQTFWKNVWASKQQYNQKASWLKTEKKKYDTLIDMEISPITETEVKNALNRSHNWKAPGVDHVHNYWWKNINITKLLTKQINELLTNNTYHPKFLTKGITSMIPKKGDTTNPKNYRPITCLPTLYKIITSILSQKIIKHIEDSGILTEEQKGCRHGTLGSKEQLVIDSIVTQDAKKRNKNMAVAWIDYQKAFDSVPHSWLIDVLKLYKISPNIINFLATAMKTWRTKLVVKTEKTNIVTDEIPIQSGIFQGDSLSPFWFVLCLNPLSNMLKDTRIGYTLRYEDSDYTINHLFYVDDLKLYASTEKQLDRLIETTQKFSLDIKMRLGFDKCAKLVAQKGKLQTYENLENSETFRYLNNDYYKYLGYNQKLVLDQKNIIENTEQKMVDRIRKILRSELTGKNKIKAINTYALPVLSYSFGIIRWSKTSIEAMNRKIRVLLTEYRCHHPHACTERLYLPRNVGGRGLLDLHRLCDRQINLLKTYFNRKSLLSPLHRQVKRLDYYSPLQLSNNTMRETRTNDHIREQWLEKSLHGKYPYALSQADAELSTMWLKHGLLFAETEGFLVSIQDGVTPTRNYQKYIQKIPIENDKCRMCFAKSETTEHILSACSSLAPTEYTKRHNLTAGIIHQEIAVQCKLIEKKEKYFLYNPFPFLQNDNYKLYWDFPIITDRPIASNRPDITLVDRKNKTAYFVDISHPADHNLLNKEKEKINKYQDLCTEFKNIYKLDKVLTVPIIISVTGLIGKNLPRFLKQIDIDQRNITLMQRSVILESCRIMRKTLNLPE

SEQ ID NO: 2765 - protein, 1223 aa, Apoderus coryli
MLMNLETLFSDSKAKYTLMVKKKKKKKKKKKKKKKIIIIIIIIIIIKIMMSSNKNGPESPADLQWSQGAKNPREETINTRNTNQTQETIISKEQLESQEWNLSQNNKRMTRQNVEVPHEADRGARRTWSRNDNLDVFRAYFLGTQFETQKRGFRKNMLLEWRKIRPDLILNENQLANQLYAIKTHNLLTAVDIEELKQNMSETDQGIETDNTIIYEQTNESNTQTINIQNNLALNVDLDAGENVNDVVVRFQENIAVFKNSDPEKRLSLPKIKPTKKTKQLISIVNQEILKYMPTSNLEETQTLVYTAAKTVIESMGVKLGKKQKAKKEPKWRERIEQKIKTLRSWLTKIRDWERGNMSTKLSNDIHYYFRKNNIQHSNYQEKETFKEKIKQQIAALGNRLRRYNKSYKRKNDNKLFKNNEKEFYKKLNNEPPIEQGPDKEQLQTFWKNVWASKQQYNQKASWLKTEKKKYDTLIDMEISPITETEVKNALNRSHNWKAPGVDHVHNYWWKNINITKLLTKQINELLTNNTYHPKFLTKGITSMIPKKGDTTNPKNYRPITCLPTLYKIITSILSQKIIKHIEDSGILTEEQKGCRHGTLGSKEQLVIDSIVTQDAKKRNKNMAVAWIDYQKAFDSVPHSWLIDVLKLYKISPNIINFLATAMKTWRTKLVVKTEKTNIVTDEIPIQSGIFQGDSLSPFWFVLCLNPLSNMLKDTRIGYTLRYEDSDYTINHLFYVDDLKLYASTEKQLDRLIETTQKFSLDIKMRLGFDKCAKLVAQKGKLQTYENLENSETFRYLNNDYYKYLGYNQKLVLDQKNIIENTEQKMVDRIRKILRSELTGKNKIKAINTYALPVLSYSFGIIRWSKTSIEAMNRKIRVLLTEYRCHHPHACTERLYLPRNVGGRGLLDLHRLCDRQINLLKTYFNRKSLLSPLHRQVKRLDYYSPLQLSNNTMRETLTNDHIREQWLEKSLHGKYPYALSQADAELSTMWLKHGLLFAETEGFLVSIQDGVTPTRNYQKYIQKIPIENDKCRMCFAKSETTEHILSACSSLAPTEYTKRHNLTAGIIHQEIAVQCKLIEKKEKYFLYNPFPFLQNDNYKLYWDFPIITDRPIASNRPDITLVDRKNKTAYFVDISHPADHNLLNKEKEKINKYQDLCTEFKNIYKLDKVLTVPIIISVTGLIGKNLPRFLKQIDIDQRNITLMQRSVILESCRIMRKTLNLPE

SEQ ID NO: 2766 - protein, 1176 aa, Apoderus coryli
MMSSNKNGPESPADLQWSQGAKNPREETINTRNTNQTQETIISKEQLESQEWNLSQNNKRMTRQNVEVPHEADRGARRTWSRNDNLDVFRAYFLGTQFETQKRGFRKNMLLEWRKIRPDLILNENQLANQLYAIKTHNLLTAVDIEELKQNMSETDQGIETDNTIIYEQTNESNTQTINIQNNLALNVDLDAGENVNDVVVRFQENIAVFKNSDPEKRLSLPKIKPTKKTKQLISIVNQEILKYMPTSNLEETQTLVYTAAKTVIESMGVKLGKKQKAKKEPKWRERIEQKIKTLRSWLTKIRDWERGNMSTKLSNDIHYYFRKNNIQHSNYQEKETFKEKIKQQIAAMGNRLRRYNKSYKRKNDNKLFKNNEKEFYKKLNNEPPIEQGPDKEQLQTFWKNVWASKQQYNQKASWLKTEKKKYDTLIDMEISPITETEVKNALNRSHNWKAPGVDHVHNYWWKNINITKLLTKQINELLTNNTYHPKFLTKGITSMIPKKGDTTNPKNYRPITCLPTLYKIITSILSQKIIKHIEDSGILTEEQKGCRHGTLGSKEQLVIDSIVTQDAKKRNKNMAVAWIDYQKAFDSVPHSWLIDVLKLYKISPNIINFLATAMKTWRTKLVVKTEKTNIVTDEIPIQSGIFQGDSLSPFWFVLCLNPLSNMLKDTRIGYTLRYEDSDYTINHLFYVDDLKLYASTEKQLDRLIETTQKFTLDIKMKLGFDKCAKLVAQKGKLQTYENLENSETFRYLNNDYYKYLGYNQKLVLDQKNIIENTEQKMVDRIRKILRSELTGKNKIKAINTYALPVLSYSFGIIRWSKTSIEAMNRKIRVLLTEYRCHHPHACTERLYLPRNVGGRGLLDLHRLCDRQINLLKTYFNRKSLLSPLHRQVKRLDYYSPLQLSNNTMRETLTNDHIREQWLEKSLHGKYPYALSQADAELSTMWLKHGLLFAETEGFLVSIQDGVTPTRNYQKYIQKIPIENDKCRMCFAKSETTEHILSACSSLAPTEYTKRHNLTAGIIHQEIAVQCKLIEKKEKYFLYNPFPFLQNDNYKLYWDFPIITDRPIASNRPDITLVDRKNKTAYFVDISHPADHNLLNKEKEKINKYQDLCTEFKNIYKLDKVLTVPIIISVTGLIGKNLPRFLKQIDIDQRNITTLMQRSVILESCRIMRKTLNLPE

SEQ ID NO: 2767 - protein, 1176 aa, Apoderus coryli
MMSSNKNGPESPADLQWSQGAKNPREETINTRNTNQTQETIISKEQLESQEWNLSQNNKRMTRQNVEVPHEADRGARRTWSRNDNLDVFRAYFLGTQFETQKRGFRKNMLLEWRKIRPDLILNENQLANQLYAIKTHNLLTAVDIEELKQNMSETDQGIETDNTIIYEQTNESNTQTINIQNNLALNVDLDAGENVNDVVVRFQENIAVFKNSDPEKRLSLPKIKPTKKTKQLISIVNQEILKYMPTSNLEETQTLVYTAAKTVIESMGVKLGKKQKAKKEPKWRERIEQKIKTLRSWLTKIRDWERGNMSTKLSNDIHYYFRKNNIQHSNYQEKETFNEKIKQQIAALGNRLRRYNKSYKRKNDNKLFKNNEKEFYKKLNNEPPIEQGPDKEQLQTFWKNVWASKQQYNQKASWLKTEKKKYDTLIDMEISPITETEVKNALNRSHNWKAPGVDHVHNYWWKNINITKLLTKQINELLTNNTYHPKFLTKGITSMIPKKGDTTNPKNYRPITCLPTLYKIITSILSQKIIKHIEDSGILTEEQKGCRHGTLGSREQLVIDSIVTQDAKKRNKNMAVAWIDYQKAFDSVPHSWLIDVLKLYKISPNIINFLATAMKTWRTKLVVKTEKTNIVTDEIPIQSGIFQGDSLSPFWFVLCLNPLSNMLKDTRIGYTLRYEDSDYTINHLFYVDDLKLYASTEKQLDRLIETTQKFSLDIKMKFGFDKCAKLVAQKGKLQTYENLENSETFRYLNNDYYKYLGYNQKLVLDQKNIIENTEQKMVDRIRKILRSELTGKNKIKAINTYALPVLSYSFGIIRWSKTSIEAMNRKIRVLLTEYRCHHPHACTERLYLPRNVGGRGLLDLHRLCDRQINLLKTYFNRKSLLSPLHRQVKRLDYYSPLQLSNNTMRETLTNDDIREQWLEKSLHGKYPYALSRADSELSTMWLKHGLLFAETEGFLVSIQDGVTPTRNYQKYIQKIPIENDKKCRMCFAKSETTEHILSACSSLAPTEYTKRHNLTAGIIHQEIAVQCKLIEKREKYFLYNPFPFLQNDNYKLYWDFPIITDRPIASNRPDITLVDRKNKIAYFVDISHPADHNLLNKEKEKINKYQDLCTEFKNIYKLDKVLTVPIIISLTGLIGKNLPRFLKQIDIDQRNITLMQRSVILESCRIMRKTLNLPE

SEQ ID NO: 2768 - protein, 1176 aa, Apoderus coryli
MMSSNKNGPESPADLQWSQGAKNPREETINTRNTNQTQETIISKEQLESQEWNLSQNNKRMTRQNVEVPHEADRGARRTWSRNDNLDVFRAYFLGTQFETQKRGFRKNMLLEWRKIRPDLILNENQLANQLYAIKTHNLLTAVDIEELKQNMSETDQGIETDNTIIYEQTNESNTQTINIQNNLALNVDLDAGENVNDVVVRFQENIAVFKNSDPEKRLSLPKIKPTKKTKQLISIVNQEILKYMPTSNLEETQTLVYTAAKTVIESMGVKLGKKQKAKKEPKWRERIEQKIKTLRSWLTKIRDWERGNMSTKLSNDIHYYFRKNNIQHSNYQEKETFKEKIKQQIAALGNRLRRYNKSYKRKNDNKLFKNNEKEFYKKLNNEPPIEQGPDKEQLQTFWKNVWASKQQYNQKASWLKTEKKKYDTLIDMEISPITETEVKNALNRSHNGKAPGVDHVHNYWWKNINITKLLTKQINELLTNNTYHPKFLTKGITSMIPKKGDTTNPKNYRPITCLPTLYKIITSILSQKIIKHIEDSGILTEEQKGCRHGTLGSKEQLVIDSIVTQDAKKRNKNMAVAWIDYQKAFDSVPHSWLIDVLKLYKISPNIINFLATAMKTWRTKLVVKTEKTNIVTDEIPIQSGIFQGDSLSPFWFVLCLNPLSNMLKDTRIGYTLRYEDSDYTINHLFYVDDLKLYASTEKQLDRLIETTQKFTLDIKMKLGFDKCAKLVAQKGKLQTYENLENSETFRYLNNDYYKYLGYNQKLVLDQKNIIENTEQKMVDRIRKILRSELTGKNKIKAINTYALPVLSYSFGIIRWSKTSIEAMNRKIRVLLTEYRCHHPHACTERLYLPRNVGGRGLLDLHRLCDRQINLLKTYFNRKSLLSPLHRQVKRLDYYSPLQLSNNTMRETLTNDHIREQWLEKSLHGKYPYALSQADAELSTMWLKHGLLFAETEGFLVSIQDGVTPTRNYQKYIQKIPIENDKCRMCFAKSETTEHILSACSSLAPTEYTKRHNLTAGIIHQEIAVQCKLIEKKEKYFLYNPFPFLQNDNYKLYWDFPIITDRPIASNRPDITLVDRKNKTAYFVDISHPADHNLLNKEKEKINKYQDLCTEFKNIYKLDKVLTVPIIISVTGLIGKNLPRFLKQIDIDQRNITTLMQRSVILESCRIMRKTLNLPE

SEQ ID NO: 2769 - protein, 1001 aa, Apoderus coryli
MKILLIQNNLALNVDLDAGENVNDVVVRFQENIAVFKNSDPEKRLSLPKIKPTKKTKQLISIVNQEILKYMPTSNLEETQTLVYTAAKTVIESMGVKLGKKQKAKKEPKWRERIEQKIKTLRSWLTKIRDWERGNMSTKLSNDIHYYFRKNNIQHSNYQEKETFKEKIKQQIAALGNRLRRYNKSYKRKNDNKLFKNNEKEFYKKLNNEPPIEQGPDKEQLQTFWKNVWASKQQYNQKASWLKTEKKKYDTLIDMEISPITETEVKNALNRSHNWKAPGVDHVHNYWWKNINITKLLTKQINELLTNNTYHPKFLTKGITSMIPKKGDTTNPKNYRPITCLPTLYKIITSILSQKIIKHIEDSGILTEEQKGCRHGTLGSKEQLVIDSIVTQDAKKRNKNMAVAWIDYQKAFDSVPHSWLIDVLKLYKISPNIINFLATAMKTWRTKLVVKTEKTNIVTDEIPIQSGIFQGDSLSPFWFVLCLNPLSNMLKDTRIGYTLRYEDSDYTINHLFYVDDLKLYASTEKQLDRLIETTQKFSLDIKMRLGFDKCAKLVAQKGKLQTYENLENSETFRYLNNDYYKYLGYNQKLVLDQKNIIENTEQKMVDRIRKILRSELTGKNKIKAINTYALPVLSYSFGIIRWSKTSIEAMNRKIRVLLTEYRCHHPHACTERLYLPRNVGGRGLLDLHRLCDRQINLLKTYFNRKSLLSPLHRQVKRLDYYSPLQLSNNTMRETLTNDHIREQWLEKSLHGKYPYALSQADAELSTMWLKHGLLFAETEGFLVSIQDGVTPTRNYQKYIQKIPIENDKCRMCFAKSETTEHILSACSSLAPTEYTKRHNLTAGIIHQEIAVQCKLIEKKEKYFLYNPFPFLQNDNYKLYWDFPIITDRPIASNRPDITLVDRKNKTAYFVDISHPADHNLLNKEKEKINKYQDLCTEFKNIYKLDKVLTVPIIISVTGLIGKNLPRFLKQIDIDQRNITLMQRSVILESCRIMRKTLNLPE

SEQ ID NO: 2770 - protein, 1067 aa, Apoderus coryli
MLLEWRKIRPDLILNENQLANQLYAIKTHNLLTAVDIEELKQNMSETDQGIETDNTIIYEQTNESNTQTINIQNNLALNVDLDAGENVNDVVVRFQENIAVFKNSDPEKRLSLPKIKPTKKTKQLISIVNQEILKYMPTSNLEETQTLVYTAAKTVIESMGVKLGKKQKAKKEPKWRERIEQKIKTLRSWLTKIRDWERGNMSTKLSNDIHYYFRKNNIQHSNYQEKETFKEKIKQQIAALGNRLRRYNKSYKRKNDNKLFKNNEKEFYKKLNNEPPIEQGPDKEQLQTFWKNVWASKQQYNQKASWLKTEKKKYDTLIDMEISPITETEVKNALNRSHNWKAPGVDHVHNYWWKNINITKLLTKQINELLTNNTYHPKFLTKGITSMIPKKGDTTNPKNYRPITCLPTLYKIITSILSQKIIKHIEDSGILTEEQKGCRHGTLGSKEQLVIDSIVTQDAKKRNKNMAVAWIDYQKAFDSVPHSWLIDVLKLYKISPNIINFLATAMKTWRTKLVVKTEKTNIVTDEIPIQSGIFQGDSLSPFWFVLCLNPLSNMLKDTRIGYTLRYEDSDYTINHLFYVDDLKLYASTEKQLDRLIETTQKFSLDIKMRLGFDKCAKLVAQKGKLQTYENLENSETFRYLNNDYYKYLGYNQKLVLDQKNIIENTEQKMVDRIRKILRSELTGKNKIKAINTYALPVLSYSFGIIRWSKTSIEAMNRKIRVLLTEYRCHHPHACTERLYLPRNVGGRGLLDLHRLCDRQINLLKTYFNRKSLLSPLHRQVKRLDYYSPLQLSNNTMRETLTNDHIREQWLEKSLHGKYPYALSQADAELSTMWLKHGLLFAETEGFLVSIQDGVTPTRNYQKYIQKIPIENDKCRMCFAKSETTEHILSACSSLAPTEYTKRHNLTAGIIHQEIAVQCKLIEKKEKYFLYNPFPFLQNDNYKLYWDFPIITDRPIASNRPDITLVDRKNKTAYFVDISHPADHNLLNKEKEKINKYQDLCTEFKNIYKLDKVLTVPIIISVTGLIGKNLPRFLKQIDIDQRNITLMQRSVILESCRIMRKTLNLPE

SEQ ID NO: 2771 - protein, 1175 aa, Apoderus coryli
MMSSNKNGPESPADLQWSQGAKNPREETINTRNTNQTQETIISKEQLESQEWNLSQNNKRMTRQNVEVPHEADRGARRTWSRNDNLDVFRAYFLGTQFETQKRGFRKNMLLEWRKIRPDLILNENQLANQLYAIKTHNLLTAVDIEELKQNMSETDQGIETDNTIIYEQTNESNTQTINIQNNLALNVDLDAGENVNDVVVRFQENIAVFKNSDPEKRLSLPKIKPTKKTKQLISIINQEILKYMPTSNLEETQTLVYTAAKTVIESMGVKLGKKQKAKKEPKWRERIEQKIKTLRSWLTKIRDWERGNMSTKLSNDIHYYFRKNNIQHSNYQEKETFKEKIKQQIAALGNRLRRYNKSYKRKNDNKLFKNNEKEFYKKLNNEPPIEQGPDKEQLQTFWKNVWASKQQYNQKASWLKTEKKKYDTLIDMEISPITETEVKNALNRSHNWKAPGVDHVHNYWWKNINITKLLTKQINELLTNNTYHPKFLTKGITSMIPKKGDTTNPKNYRPITCLPTLYKIITSILSQKIIKHIEDSGILTEEQKGCRHGTLGSKEQLVIDSIVTQDAKKRNKNMAVAWIDYQKAFDSVPHSWLIDVLKLYKISPNIINFLATAMKTWRTKLVVKTEKTNIVTDEIPIQSGIFQGDSLSPFWFVLCLNPLSNMLKDTRIGYTLRYEDSDYTINHLFYVDDLKLYASTEKQLDRLIETTQKFTLDIKMKLGFDKCAKLVAQKGKLQTYENLENSETFRYLNNDYYKYLGYNQKLVLDQKNIIENTEQKMVDRIRKILRSELTGKNKIKAINTYALPVLSYSFGIIRWSKTSIEAMNRKIRVLLTEYRCHHPHACTERLYLPRNVGGRGLLDLHRLCDRQINLLKTYFNRKSLLSPLHRQVKRLDYYSPLQLSNNTMRETLTNDHIREQWLEKSLHGKYPYALSQADAELSTMWLKHGLLFAETEGFLVSIQDGVTPTRNYQKYIQKIPIENDKCRMCFAKSETTEHILSACSSLAPTEYTKRHNLTAGIIHQEIAVQCKLIEKKEKYFLYNPFPFLQNDNYKLYWDFPIITDRPIASNRPDITLVDRKNKTAYFVDISHPADHNLLNKEKEKINKYQDLCTEFKNIYKLDKVLTVPIIISVTGLIGKNLPRFLKQIDIDQRNITLMQRSVILESCRIMRKTLNLPE

SEQ ID NO: 2772 - protein, 1175 aa, Apoderus coryli
MMSSNKNGPESPADLQWSQGAKNPREETINTRNTNQTQETIISKEQLESQEWNLSQNNKRMTRQNVEVPHEADRGARRTWSRNDNLDVFRAYFLGTQFETQKRGFRKNMLLEWRKIRPDLILNENQLANQLYAIKTHNLLTAVDIEELKQNMSETDQGIETDNTIIYEQTNESNTQTINIQNNLALNVDLDAGENVNDVVVRFQENIAVFKNSDPEKRLSLPKIKPKKKTKQLISIVNQEILKYMPTSNLEETQTLVYTAAKTVIESMGVKLGKKQKAKKEPKWRERIEQKIKTLRSWLTKIRDWERGNMSTKLSNDIHYYFRKNNIQHSNYQEKETFKEKIKQQIAALGNRLRRYNKSYKRKNDNKLFKNNEKEFYKKLNNEPPIEQGPDKEQLQTFWKNVWASKQQYNQKASWLKTEKKKYDTLIDMEISPITETEVKNALNRSHNWKAPGVDHVHNYWWKNINITKLLTKQINELLTNNTYHPKFLTKGITSMIPKKGDTTNPKNYRPITCLPTLYKIITSILSQKIIKHIEDSGILTEEQKGCRHGTLGSKEQLVIDSIVTQDAKKRNKNMAVAWIDYQKAFDSVPHSWLIDVLKLYKISPNIINFLATAMKTWRTKLVVKTEKTNIVTDEIPIQSGIFQGDSLSPFWFVLCLNPLSNMLKDTRIGYTLRYEDSDYTINHLFYVDDLKLYASTEKQLDRLIETTQKFSLDIKMRLGFDKCAKLVAQKGKLQTYENLENSETFRYLNNDYYKYLGYNQKLVLDQKNIIENTEQKMVDRIRKILRSELTGKNKIKAINTYALPVLSYSFGIIRWSKTSIEAMNRKIRVLLTEYRCHHPHACTERLYLPRNVGGRGLLDLHRLCDRQINLLKTYFNRKSLLSPLHRQVKRLDYYSPLQLSNNTMRETLTNDHIREQWLEKSLHGKYPYALSQADAELSTMWLKHGLLFAETEGFLVSIQDGVTPTRNYQKYIQKIPIENDKCRMCFAKSETTEHILSACSSLAPTEYTKRHNLTAGIIHQEIAVQCKLIEKKEKYFLYNPFPFLQNDNYKLYWDFPIITDRPIASNRPDITLVDRKNKTAYFVDISHPADHNLLNKEKEKINKYQDLCTEFKNIYKLDKVLTVPIIISVTGLIGKNLPRFLKQIDIDQRNITLMQRSVILESCRIMRKTLNLPE

SEQ ID NO: 2773 - protein, 1176 aa, Apoderus coryli
MMSSNKNGPESPADLQWSQGAKNPREETINTRNTNQTQETIISKEQLESQEWNLSQNNKRMTRQNVEVPHEADRGARRTWSRNDNLDVFRAYFLGTQFETQKRGFRKNMLLEWRKIRPDLILNENQLANQLYAIKTHNLLTAVDIEELKQNMSETDQGIETDNTIIYEQTNESNTQTINIQNNLALNVDLDAGENVNDVVVRFQENIAVFKNSDPEKRLSLPKIKPTKKTKQLISIVNQEILKYMPTSNLEETQTLVYTAAKTVIESMGVKLGKKQKAKKEPKWRERIEQKIKTLRSWLTKIRDWERGNMSTKLSNDIHYYFRKNNIQHSNYQEKETFKEKIKQQIAALGNRLRRYNKSYKRKNDNKLFKNNEKEFYKKLNNEPPIEQGPDKEQLQTFWKNVWASKQQYNQKASWLKTEKKKYDTLIDMEISPITETEVKNALNRSHNWKAPGVDHVHNYWWKNINITKLLTKQINELLTNNTYHPKFLTKGITSMIPKKGDTTNPKNYRPITCLPTLYKIITSILSQKIIKHIEDSGILTEEQKGCRHGTLGSKEQLVIDSIVTQDAKKRNKNMAVAWIDYQKAFDSVPHSWLIDVLKLYKISPNIINFLATAMKTWRTKLVVKTEKTNIVTDEIPIQSGIFQGDSLSPFWFVLCLNPLSNMLKDTRIGYTLRYEDSDYTINHLFYVDDLKLYASTEKQLDRLIETTQKFSLDIKMRLGFDKCAKLVAQKGKLQTYENLENSETFRYLNNDYYKYLGYNQKLVLDQKNIIENTEQKMVDRIRKILRSELTGKNKIKAINTYALPVLSYSFGIIRWSKTSIEAMNRKIRVLLTEYRCHHPHACTERLYLPRNVGGRGLLDLHRLCDRQINLLKTYFNRKSLLSPLHRQVKRLDYYSPLQLSNNTMRETLTNDHIREQWLEKSLHGKYPYALSQADAELSTMWLKHGLLFAETEGFLVSIQDGVTPTRNYQKYIQKIPIENDKCRMCFAKSETTEHILSACSSLAPTEYTKRHNLTAGIIHQEIAVQCKLIEKKEKYFLYNPFPFLQNDNYKLYWDFPIITDRPIASNRPDITLVDRKNKTAYFVDISHPADHNLLNKEKEKINKYQDLCTEFKNIYKLDKVLTVPIIISVTGLIGKNLPRFLKQIDIDQRNITTLMQRSVILESCRIMRKTLNLPE

SEQ ID NO: 2774 - protein, 1176 aa, Apoderus coryli
MMSSNKNGPESPADLQWSQGAKNPREETINTRNTNQTQETIISKEQLESQEWNLSQHNKRMTRQNVEVPHEADRGARRTWSRNDNLDVFRAYFLGTQFETQKRGFRKNMLLEWRKIRPDLILNENQLANQLYAIKTHNLLTAVDIEELKQNMSETDQGIETDNTIIYEQTNESNTQTINIQNNLALNVDLDAGENVNDVVVRFQENIAVFKNSDPEKRLSLPKIKPTKKTKQLISIVNQEILKYMPTSNLEETQTLVYTAAKTVIESMGVKLGKKQKAKKEPKWRERIEQKIKTLRSWLTKIRDWERGNMSTKLSNDIHYYFRKNNIQHSNYQEKETFKEKIKQQIAALGNRLRRYNKSYKRKNDNKLFKNNEKEFYKKLNNEPPIEQGPDKEQLQTFWKNVWASKQQYNQKASWLKTEKKKYDTLIDMEISPITETEVKNALNRSHNWKAPGVDHVHNYWWKNINITKLLTKQINELLTNNTYHPKFLTKGITSMIPKKGDTTNPKNYRPITCLPTLYKIITSILSQKIIKHIEDSGILTEEQKGCRHGTLGSKEQLVIDSIVTQDAKKRNKNMAVAWIDYQKAFDSVPHSWLIDVLKLYKISPNIINFLTTAMKTWRTKLVVKTEKTNIVTDEIPIQSGIFQGDSLSPFWFVLCLNPLSNMLKDTRIGYTLRYEDSDYTINHLFYVDDLKLYASTEKQLDRLIETTQKFTLDIKMKLGFDKCAKLVAQKGKLQTYENLENSETFRYLNNDYYKYLGYNQKLVLDQKNIIENTEQKMVDRIRKILRSELTGKNKIKAINTYALPVLSYSFGIIRWSKTSIEAMNRKIRVLLTEYRCHHPHACTERLYLPRNVGGRGLLDLHRLCDRQINLLKTYFNRKSLLSPLHRQVKRLDYYSPLQLSNNTMRETLTNDHIREQWLEKSLHGKYPYALSQADAELSTMWLKHGLLFAETEGFLVSIQDGVTPTRNYQKYIQKIPIENDKCRMCFAKSETTEHILSACSSLAPTEYTKRHNLTAGIIHQEIAVQCKLIEKKEKYFLYNPFPFLQNDNYKLYWDFPIITDRPIASNRPDITLVDRKNKTAYFVDISHPADHNLLNKEKEKINKYQDLCTEFKNIYKLDKVLTVPIIISVTGLIGKNLPRFLKQIDIDQRNITTLMQRSVILESCRIMRKTLNLPE

SEQ ID NO: 2775 - protein, 1125 aa, Apoderus coryli
MESVSQNNKRMTRQNVEVPHEADRGARRTWSRNDNLDVFRAYFLGTQFETQKRGFRKNMLLEWRKIRPDLILNENQLANQLYAIKTHNLLTAVDIEELKQNMSETDQGIETDNTIIYEQTNESNTQTINIQNNLALNVDLDAGENVNDVVVRFQENIAVFKNSDPEKRLSLPKIKPTKKTKQLISIVNQEILKYMPTSNLEETQTLVYTAAKTVIESMGVKLGKKQKAKKEPKWRERIEQKIKTLRSWLTKIRDWERGNMSTKLSNDIHYYFRKNNIQHSNYQEKETFKEKIKQQIAALGNRLRRYNKSYKRKNDNKLFKNNEKEFYKKLNNEPPIEQGPDKEQLQTFWKNVWASKQQYNQKASWLKTEKKKYDTLIDMEISPITETEVKNALNRSHNWKAPGVDHVHNYWWKNINITKLLTKQINELLTNNTYHPKFLTKGITSMIPKKGDTTNPKNYRPITCLPTLYKIITSILSQKIIKHIEDSGILTEEQKGCRHGTLGSKEQLVIDSIVTQDAKKRNKNMAVAWIDYQKAFDSVPHSWLIDVLKLYKISPNIINFLATAMKTWRTKLVVKTEKTNIVTDEIPIQSGIFQGDSLSPFWFVLCLNPLSNMLKDTRIGYTLRYEDSDYTINHLFYVDDLKLYASTEKQLDRLIETTQKFSLDIKMGLGFDKCAKLVAQKGKLQTYENLENSETFRYLNNDYYKYLGYNQKLVLDQKNIIENTEQKMVDRIRKILRSELTGKNKIKAINTYALPVLSYSFGIIRWSKTSIEAMNRKIRVLLTEYRCHHPHACTERLYLPRNVGGRGLLDLHRLCDRQINLLKTYFNRKSLLSPLHRQVKRLDYYSPLQLSNNTMRETLTNDHIREQWLEKSLHGKYPYALSQADAELSTMWLKHGLLFAETEGFLVSIQDGVTPTRNYQKYIQKIPIENDKCRMCFAKSETTEHILSACSSLAPTEYTKRHNLTAGIIHQEIAVQCKLIEKKEKYFLYNPFPFLQNDNYKLYWDFPIITDRPIASNRPDITLVDRKNKTAYFVDISHPADHNLLNKEKEKINKYQDLCTEFKNIYKLDKVLTVPIIISVTGLIGKNLPRFLKQIDIDQRNITLMQRSVILESCRIMRKTLNLPE

SEQ ID NO: 2776 - protein, 1024 aa, Apoderus coryli
MSETDQGIETDNTIIYEQTNESNTQTINIQNNLALNVDLDAGENVNDVVVRFQENIAVFKNSDPEKRLSLPKIKPTKKTKQLISIVNQEILKYMPTSNLEETQTLVYTAAKTVIESMGVKLGKKQKAKKEPKWRERIEQKIKTLRSWLTKIRDWERGNMSTKLSNDIHYYFRKNNIQHSNYQEKETFKEKIKQQIAALGNRLRRYNKSYKRKNDNKLFKNNEKEFYKKLNNEPPIEQGPDKEQLQTFWKNVWASKQQYNQKASWLKTEKKKYDTLIDMEISPITETEVKNALNRSHNWKAPGVDHVHNYWWKNINITKLLTKQINELLTNNTYHPKFLTKGITSMIPKKGDTTNPKNYRPITCLPTLYKIITSILSQKIIKHIEDSGILTEEQKGRRHGTLGSKEQLVIDSIVTQDAKKRNKNMAVAWIDYQKAFDSVPHSWLIDVLKLYKISPNIINFLATAMKTWRTKLVVKTEKTNIVTDEIPIQSGIFQGDSLSPFWFVLCLNPLSNMLKDTRIGYTLRYEDSDYTINHLFYVDDLKLYASTEKQLDRLIETTQKFSLDIKMRLGFDKCAKLVAQKGKLQTYENLENSETFRYLNNDYYKYLGYNQKLVLDQKNIIENTEQKMVDRIRKILRSELTGKNKIKAINTYALPVLSYSFGIIRWSKTSIEAMNRKIRVLLTEYRCHHPHACTERLYLPRNVGGRGLLDLHRLCDRQINLLKTYFNRKSLLSPLHRQVKRLDYYSPLQLSNNTMRETLTNDHIREQWLEKSLHGKYPYALSQADAELSTMWLKHGLLFAETEGFLVSIQDGVTPTRNYQKYIQKIPIENDKCRMCFAKSETTEHILSACSSLAPTEYTKRHNLTAGIIHQEIAVQCKLIEKKEKYFLYNPFPFLQNDNYKLYWDFPIITDRPIASNRPDITLVDRKNKTAYFVDISHPADHNLLNKEKEKINKYQDLCTEFKNIYKLDKVLTVPIIISVTGLIGKNLPRFLKQIDIDQRNITLMQRSVILESCRIMRKTLNLPE

SEQ ID NO: 2777 - protein, 1175 aa, Apoderus coryli
MMSSNKNGPESPADLQWSQGAKNPREETINTRNTNQTQETIISKEQLESQEWNLSQNNKRMTRQNVEVPHEADRGARRTWSRNDNLDVFRAYFLGTQFETQKRGFRKNMLLEWRKIRPDLILNENQLANQLYAIKTHNLLTAVDIEELKQNMSETDQGIETDNTIIYEQTNESNTQTINIQNNLALNVDLDAGENVNDVVVRFQENIAVFKNSDPEKRLSLPKIKPTKKTKQLISIVNQEILKYMPTSNLEETQTLVYTAAKTVIESMGVKLGKKQKAKKEPKWRERIEQKIKTLRSWLTKIRDWERGNMSTKLSNDIHYYFRKNNIQHSNYQEKETFKEKIKQQIAALGNRLRRYNKSYKRKNDNKLFKNNEKEFYKKLNNEPPIEQGPDKEQLQTFWKNVWASKQQYNQKASWLKTEKKKYDTLIDMEISPITETEVKNALNRSHNWKAPGVDHVHNYWWKNINITKLLTKQINELLTNNTYHPKFLTKGITSMIPKKGDTTNPKNYRPITCLPTLYKIITSILSQKIIKHIEDSGILTEEQKGCRHGTLGSKEQLVIDSIVTQDAKKRNKNMAVAWIDYQKAFDSVPHSWLIDVLKLYKISPNIINFLATAMKTWRTKLVVKTEKTNIVTDEIPIQSGIFQGDSLSPFWFVLCLNPLSNMLKDTRIGYTLRYEDSDYTINHLFYVDDLKLYASTEKQLDRLIETTQKFSLDIKMRLGFDKCAKLVAQKGKLQTYEDLENSETFRYLNNDYYKYLGYNQKLVLDQKNIIENTEQKMVDRIRKILRSELTGKNKIKAINTYALPVLSYSFGIIRWSKTSIEAMNRKIRVLLTEYRCHHPHACTERLYLPRNVGGRGLLDLHRLCDRQINLLKTYFNRKSLLSPLHRQVKRLDYYSPLQLSNNTMRETLTNDHIREQWLEKSLHGKYPYALSQADAELSTMWLKHGLLFAETEGFLVSIQDGVTPTRNYQKYIQKIPIENDKCRMCFAKSETTEHILSACSSLAPTEYTKRHNLTAGIIHQEIAVQCKLIEKKEKYFLYNPFPFLQNDNYKLYWDFPIITDRPIASNRPDITLVDRKNKTAYFVDISHPADHNLLNKEKEKINKYQDLCTEFKNIYKLDKVLTVPIIISVTGLIGKNLPRFLKQIDIDQRNITLMQRSVILESCRIMRKTLNLPE

SEQ ID NO: 2778 - protein, 1175 aa, Apoderus coryli
MMSSNKNGPESPADLQWSQGAKNPREETINTRNTNQTQETIISKEQLESQEWNLSQNNKRMTRQNVEVPHEADRGARRTWSRNDNLDVFRAYFLGTQFETQKRGFRKNMLLEWRKIRPDLILNENQLANQLYAIKTHNLLTAVDIEELKQNMSETDQGIETDNTIIYEQTNESNTQTINIQNNLALNVDLDAGENVNDVVVRFQENIAVFKNSDPEKRLSLPKIKPTKKTKQLISIVNQEILKYMPTSNLEETQTLVYTAAKTVIESMGVKLGKKQKAKKEPKWRERIEQKIKTLRSWLTKIRDWERGNMSTKLSNDIHYYFRKNNIQHSNYQEKETFKEKIKQQIAALGNRLRRYNKSYKRKNDNKLFKNNEKEFYKKLNNEPPIEQGPDKEQLQTFWKNVWASKQQYNQKASWLKTEKKKYDTLIDMEISPITETEVKNALNRSHNWKAPGVDHVHNYWWKNINITKLLTKQINELLTNNTYHPKFLTKGITSMIPKKGDTTNPKNYRPITCLPTLYKIITSILSQKIIKHIEDSGILTEEQKGCRHGTLGSKEQLVIDSIVTQDAKKRNKNMAVAWIDYQKAFDSVPHSWLIDVLKLYKISPNIINFLATAMKTWRTKLVVKTEKTNIVTDEIPIQSGIFQGDSLSPFWFVLCLNPLSNMLKDTRIGYTLRYEDSDYTINHLFYVDDLKLYASTEKQLDRLIETTQKFSLDIKMRLGFDKCAKLVAQKGKLQTYENLENSETFRYLNNDYYKYLGYNQKLVLDQKNIIENTEQKMVDRIRKILRSELTGKNKIKAINTYALPVLSYSFGIIRWSKTSIEAMNRKIRVLLTEYRCHHPHACTERLYLPRNVGGRGLLDLHRLCDRQINLLKTYFNRKSLLSPLHRQVKRLDYYSPLQLSNNTMRETLTNDHIREQWLEKSLHGKYPYALSQADAELSTMWLKHGLLFAETEGFLVSIQDGVTPTRNYQKYIQKIPIENDKCRMCFTKSETTEHILSACSSLAPTEYTKRHNLTAGIIHQEIAVQCKLIEKKEKYFLYNPFPFLQNDNYKLYWDFPIITDRPIASNRPDITLVDRKNKTAYFVDISHPADHNLLNKEKEKINKYQDLCTEFKNIYKLDKVLTVPIIISVTGLIGKNLPRFLKQIDIDQRKITLMQRSVILESCRIMRKTLNLPE

SEQ ID NO: 2779 - protein, 1115 aa, Apoderus coryli
MTRQNVEVPHEADRGARRTWSRNDNLDVFRAYFLGTQFETQKRGFRKNMLLEWRKIRPDLILNENQLANQLYAIKTHNLLTAVDIEELKQNMSETDQGIETDNTIIYEQTNESNTQTINIQSNLALNVDLDAGENVNDVVVRFQENIAVFKNSDPEKRLSLPKIKPTKKTKQLISIVNQEILKYMPTSNLEETQTLVYTAAKTVIESMGVKLGKKQKAKKEPKWRERIEQKIKTLRSWLTKIRDWERGNMSTKLSNDIHYYFRKNNIQHSNYQEKETFKEKIKQQIAALGNRLRRYNKSYKRKNDNKLFKNNEKEFYKKLNNEPPIEQGPDKEQLQTFWKNVWASKQQYNQKASWLKTEKKKYDTLIDMEISPITETEVKNALNRSHNWKAPGVDHVHNYWWKNINITKLLTKQINELLTNNTYHPKFLTKGITSMIPKKGDTTNPKNYRPITCLPTLYKIITSILSQKIIKHIENSGILTEEQKGCRHGTLGSKEQLVIDSIVTQDAKKRNKNMAVAWIDYQKAFDSVPHSWLIDVLKLYKISPNIINFLATAMKTWRTKLVVKTEKTNIVTDEIPIQSGIFQGDSLSPFWFVLCLNPLSNMLKDTRIGYTLRYEDSDYTINHLFYVDDIKLYASTEKQLDRLIETTQKFTLDIKMKLGFDKCAKLVAQKGKLQTYENLENSETFRYLNNDYYKYLGYNQKLVLDQKNIIENTEQKMVDRIRKILRSELTGKNKIKAINTYALPVLSYSFGIIRWSKTSIEAMNRKIRVLLTEYRCHHPHACTERLYLPRNVGGRGLLDLHRLCDRQINLLKTYFNRKSLLSPLHRQVKRLDYYSPLQLSNNTMRETLTNDDIREQWLEKSLHGKYPYALSRADSELSTMWLKHGLLFAETEGFLVSIQDGVTPTRNYQKYIQKIPIENDKCRMCFAKSETTEHILSACSSLAPTEYTKRHNLTAGIIHQEIAVQCKLIEKREKYFLYNPFPFLQNDNYKLYWDFPIITDRPIASNRPDITLVDRKNKTAYFVDISHPADHNLLNKEKEKINKYQDLCTEFKNIYKLDKVLTVPIIISVTGLIGKNLSRFLKQIDIDQRNITLMQRSVILESCRIMRKTLNLPE

SEQ ID NO: 2780 - protein, 1175 aa, Apoderus coryli
MMSSNKNGPESPADLQWSQGAKNPREETINTRNTNQTQETIISKEQLESQEWNLSQNNKRMTRQNVEVPHEADRGARRTWSRNDNLDVFRAYFLGTQFETQKRGFRKNMLLEWRKIRPDLILNENQLANQLYAIKTHNLLTAVDIEELKQNMSETDQGIETDNTIIYEQTNESNTQTINIQNNLALNVDLDAGENVNDVVVRFQENIAVFKNSDPEKRLSLPKIKPTKKTKQLISIVNQEILKYMPTSNLEETQTLVYTAAKTVIESMGVKLGKKQKAKKEPKWRERIEQKIKTLRSWLTKIRDWERGNMSTKLSNDIHYYFRKNNIQHSNYQEKETFKEKIKQQIAALGNRLRRYNKSYKRKNDNKLFKNNEKEFYKKLNNEPPIEQGPDKEQLQTFWKNVWASKQQYNQKASWLKTEKKKYDTLIDMEISPITETEVKNALNRSHNWKAPGVDHVHNYWWKNINITKLLTKQINELLTNNTYHPKFLTKGITSMIPKKGDTTNPKNYRPITCLPTLYKIITSILSQKIIKHIEDSGILTEEQKGCRHGTLGSKEQLVIDSIVTQDAKKRNKNMAVAWIDYQKAFDSVPHSWLIDVLKLYKISPNIINFLATAMKTWRTKLVVKTEKTNIVTDEIPIQSGIFQGDSLSPFWFVLCLNPLSNMLKDTRIGYTLRYEDSDYTINHLFYVDDLKLYASTEKQLDRLIETTQKFSLDIKMRLGFDKCAKLVAQKGKLQTYENLENSETFRYLNNDYYKYLGYNQKLVLDQKNIIENTEQKMVDRIRKILRSELTGKNKIKAINTYALPVLSYSFGIIRWSKTSIEAMNRKIRVLLTEYRCHHPHACTERLYLPRNVGGRGLLDLHRLCDRQINLLKTYCNRKSLLSPLHRQVKRLDYYSPLQLSNNTMRETLTNDHIREQWLEKSLHGKYPYALSQADAELSTMWLKHGLLFAETEGFLVSIQDGVTPTRNYQKYIQKIPIENDKCRMCFAKSETTEHILSACSSLAPTEYTKRHNLTAGIIHQEIAVQCKLIEKKEKYFLYNPFPFLQNDNYKLYWDFPIITDRPIASNRPDITLVDRKNKTAYFVDISHPADHNLLNKEKEKINKYQDLCTEFKNIYKLDKVLTVPIIISVTGLIGKNLPRFLKQIDIDQRNITLMQRSVILESCRIMRKTLNLPE

SEQ ID NO: 2781 - protein, 1176 aa, Apoderus coryli
MMSSNKNGPESPADLQWSQGAKNPREETINTRNTNQTQETIISKEQLESQEWNLSQHNKRMTRQNVEVPHEADRGARRTWSRNDNLDVFRAYFLGTQFETQKRGFRKNMLLEWRKIRPDLILNENQLANQLYAIKTHNLLTAVDIEELKQNMSETDQGIETDNTIIYEQTNESNTQTINIQNNLALNVDLDAGENVNDVVVRFQENIAVFKNSDPEKRLSLPKIKPTKKTKQLISIVNQEILKYMPTSNLEETQTLVYTAAKTVIESMGVKLGKKQKAKKEPKWRERIEQKIKTLRSWLTKIRDWERGNMSTKLSNDIHYYFRKNNIQHSNYQEKETFKEKIKQQIAALGNRLRRYNKSYKRKNDNKLFKNNEKEFYKKLNNEPPIEQGPDKEQLQTFWKNVWASKQQYNQKASWLKTEKKKYDTLIDMEISPITETEVKNALNRSHNWKAPGVDHVHNYWWKNINITKLLTKQINELLTNNTYHPKFLTKGITSMIPKKGDTTNPKNYRPITCLPTLYKIITSILSQKIIKHIEDSGILTEEQKGCRHGTLGSKEQLVIDSIVTQDAKKRNKNMAVAWIDYQKAFDSVPHSWLIDVLKLYKISPNIINFLATAMKTWRTKLVVKTEKTNIVTDEIPIQSGIFQGDSLSPFWFVLCLNPLSNMLKDTRIGYTLRYEDSDYTINHLFYVDDIKLYASTEKQLDRLIETTQKFTLDIKMKLGFDKCAKLVAQKGKLQTYENLENSETFRYLNNDYYKYLGYNQKLVLDQKNIIENTEQKMVDRIRKILRSELTGKNKIKAINTYALPVLSYSFGIIRWSKTSIEAMNRKIRVLLTEYRCHHPHACTERLYLPRNVGGRGLLDLHRLCDRQINLLKTYFNRKSLLSPLHRQVKRLDYYSPLQLSNNTMRETLTNDHIREQWLEKSLHGKYPYALSQADAELSTMWLKHGLLFAEAEGFLVSIQDGVTPTRNYQKYIQKIPIENDKCRMCFAKSETTEHILSACSSLAPTEYTKRHNLTAGIIHQEIAVQCKLIEKKEKYFLYNPFPFLQNDNYKLYWDFPIITDRPIASNRPDITLVDRKNKTAYFVDISHPADHNLLNKEKEKINKYQDLCTEFKNIYKLDKVLTVPIIISVTGLIGKNLPRFLKQIDIDQRNITTLMQRSVILESCRIMRKTLNLPE

SEQ ID NO: 2782 - protein, 1175 aa, Apoderus coryli
MMSSNKNGPESPADLQWSQGAKNPREETINTRNTNQTQETIISKEQLESQEWNLSQNNKRMTRQNVEVPHEADRGARRTWSRNDNLDVFRAYFLGTQFETQKRGFRKNMLLEWRKIRPDLILNENQLANQLYAIKTHNLLTAVDIEELKQNMSETDQGIETDNTIIYEQTNESNTQTINIQNNLALNVDLDAGENVNDVVVRFQENIAVFKNSDPEKRLSLPKIKPTKKTKQLISIVNQEILKYMPTSNLEETQTLVYTAAKTVIESMGVKLGKKQKAKKEPKWRERIEQKIKTLRSWLTKIRDWERGNMSTKLSNDIHYYFRKNNIQHSNYQEKETFKEKIKQQIAALGNRLRRYNKSYKRKNDNKLFKNNEKEFYKKLNNEPPIEQGPDKEQLQTFWKNVWASKQQYNQKASWLKTEKKKYDTLIDMEISPITETEVKNALNRSHNWKAPGVDHVHNYWWKNINITKLLTKQINELLTNNTYHPKFLTKGITSMIPKKGDTTNPKNYRPITCLPTLYKIITSILSQKIIKHIEDSGILTEEQKGCRHGTLGSKEQLVIDSIVTQDAKKRNKNMAVAWIDYQKAFDSVPHSWLIDVLKLYKISPNIINFLATAMKTWRTKLVVKTEKTNIVTDEIPIQSGIFQGDSLSPFWFVLCLNPLSNMLKDTRIGYTLRYEDSDYTINHLFYVDDLKLYASTEKQLDRLIETTQKFTLDIKMRLGFDKCAKLVAQKGKLQTYENLENSETFRYLNNDYYKYLGYNQKLVLDQKNIIENTEQKMVDRIRKILRSELTGKNKIKAINTYALPVLSYSFGIIRWSKTSIEAMNRKIRVLLTEYRCHHPHACTERLYLPRNVGGRGLLDLHRLCDRQINLLKTYFNRKSLLSPLHRQVKRLDYYSPLQLSNNTMRETLTNDHIREQWLEKSLHGKYPYALSQADAELSTMWLKHGLLFAETEGFLVSIQDGVTPTRNYQKYIQKIPIENDKCRMCFAKSETTEHILSACSSLAPTEYTKRHNLTAGIIHQEIAVQCKLIEKKEKYFLYNPFPFLQNDNYKLYWDFPIITDRPIASNRPDITLVDRKNKTAYFVDISHPADHNLLNKEKEKINKYQDLCTEFKNIYKLDKVLTVPIIISVTGLIGKNLPRFLKQIDIDQRNITLMQRSVILESCRIMRKTLNLPE

SEQ ID NO: 2783 - protein, 1110 aa, Eupelmus urozonus
MAKHLKEKHLEAVAEWNCQCGRKFSKLHAWSCHYPHCKGPEIVEGMRCTQCDKSFATQTGLSQHERHAHPSLRNEKRAAQAERAPKRKGAPTSVWSEDEVRKLKELCRRFRGEQHINKLIEAHMPNKTNRQIGEKRRNLSVSSSSSESTSDEEDEQVVEQQEESQSESEGEAEMVPEPTASSAADLGRDQEETEAEVASDSSSEDEFADAVEAPEMPSGPAENVQPEGWKENLRRAILETEGIAPKWAGWITRVQQMSTSSIITKEDVELLYEELTDLVLKKEGENPPENEGGGRREPPRHRRGRGRNKRPPNRGEIKRYQYARCQELFNNDPKRLAGIIVNNDFSLIKQQKAPEKEATVGLYTELWGVSGPTEVRDLYPRVEQEQRVDTFFSPVLVSEVREKIKRIDATSAAGRDKITKSDLRQQGIEQALSCLFNLLLLSQSYPQAWRRNRTTLIPKVGKDVSDVKNWRPLTISSMLSRLYSAILDRRLRRQIKQTERQKGFTEENGCFVNIQAINMALKIAKERGGVFGIKDVQKAFDTVPHAAIKPALERRGVPPVVSRYIENMYEDSSTYIRTDGGDVPIEAKRGVKQGDPLSPLIFNLCLEPLIERLQDETVGLEIDGRNLSALAFADDLVTIGRDAESARMQAGMAAEFLKRLGMSLAVDKCMTFEIVKAHKSWYIRDPKVVIDGRSIPAARADESIRYLGAMISPWGGLLDGHEAEGIRDVIQRLKKIPLKPLQKVELLTTYILPKFTYGLIASQPAGGTLQGVDQVVREEVKSILHISSKTSTPFVYVPRRRGGLGLVNIEKMTQIAVLRNAMKAMQSSDPITRSAVCTDAAKRKFGEYARVLRLEWPSSIKEIDACKERVKGEYLKEWAKQPVQGQGAKEFGAPCSNQWLRIKGLLKHSRIADAIKLRTNTYPTRMCIKRSIQKENPQYDTKCRKCGKPGETLGHILGECLDTKPKRIKRHNEIRDVIAERLSRRGPVLLEQTFTTQTGVNLRPDLVAKANEKEAWIVDVSVRFERGNYLKEAAEEKKCKYKRLIPVVKRQLGVETVRVVPVIVGSRGALPSRTIRELERLEIRRNDWLTISMIALRSSIEMANAFMDYL

SEQ ID NO: 2784 - protein, 877 aa, Androctonus mauritanicus
MNRIKQKHQMHTIHEDRNTRLEEFEDTIKQKLQKYAARLKRYNKNYQRKSDNKLFRSNEKQFYKKRVANNAAVNDLRAPPDIERIEAFWRGIWGTRQEHNENAEWIGKIRDKAQNIQPMINNEISAEEFSDTIRKLHNWKQPGPDKIQNFWLKKFTSLHTILRTLINRCVTEPQNIPAFLSQGITYLQFKGGDPDDPSKYRPITCLNTMYKLLTSCLATLIGNHCSQNQILAEQQKGCRAGSRGCKEQLIIDSVILNQACKNKRNMYAAFIDYQKAFDSVPHDWLLKILEIYKVEQNIVTLLRTLMTNWETNLALSVEGETVKSKGIKIERGIYQGDSLSPLWFCLALNPLSSLLEDSEYGYSVKFDEQEYKLTHSLYMDDLKLYSDTKGNLNKLLELTETFSKDIRMNFGIEKCKTQNIFRGKFSFNNDYVTENNELIQPLRRDEVYKYLGIQQNVRIDHTVVKKAIRRQFEIRVERISSTGLNGRNLVKAINTHAIPLLMYSFGVIKWSNSDLESLDMKIRTTLTKYRHHHPKSAIERVNIARVKGGRGVINIKQAHNREINKLNQYFTQRANESELHRAIKATDEQLTPLNMRENPLKPTETDLERIEKWKAKALHGKYPNRIDGEDIDTATTFEWLKRGLLYAETEGYVLAIQDGVIATKNYRKFIIRDPTVVNDTCRLCKRTSETIEHILNGCPMLTQSKYKVRHDIFGKIIHCNVAHNLGLIETITPHYKYIPEKILENRSFKIYWDRAILTDQQDDIGIANRPDMLVINKAEKKATMIDFAVPLDRNIKDTADTKIAKYQTLTQYLKRIYDLERIEIIPMIISSTGTIPKITVEGTRKLDLKPKILTIAQENVLISSTSLVRDFLGQSAI

SEQ ID NO: 2785 - protein, 985 aa, Triatoma infestans
MASELSHVCEVCDRAVSSVTGLGLHRKRAHPVQFNQGIVVDRVKRRWSPEEMELLADWEARLTREGCRGDLIRRLVGLSGGRTMDSIKGVRKTGEYKRLVAARMARGDSPIRVQSEDHAVGSASSAEARWEEELRTILRQDMEVVSRLGPAPWAAGYLVEAGEAVLASRDPTGPLVQWWTEVFMRELGSTPIPSEGERRGQDELGTSRQRRRRLFGEIQRLWKTDRRAAVSRILGGGTDLGPQSLGDMEEYWAALFEVESSPWQGETEQVVERWAMGDIFSPLTADEITGSMPAAGTCAGPDGIEPGEWGRVPLAAKRILFHCFMMWGEVPSQLLEAETSLIPKTAGPASPGEYRPITVASVILRHYHKILARRLGQVYSHSPNQRGFISGMDGVGENVVRFNAILQKARKSRRSIVVLSLDVAKAFDTVSHEAILSVLRAKGAPLHLRKYIQSCLRRSSLRLKWRGQRSRLIRVARGVRQGDPLSPFLFNMVMDHVLSGLPERVGFWTGVSGVRFNALAYADDLLLFASSEIGMRSLISAVESGLAQCGLKVNPAKSWSLCLNPSGRQKLIKVDSEVRFQVAGSGVRALGIADGFKYLGVPFGPLGVQKAEPEIEAALYRVHRAPIKPQQRLEIVREFLLPATYHELVLGQVRREDLHRWDVRVRGCGRHWLRLQHDVPNSYIHAPFKYGGLAVPELSRMVPMWRRVRRERIMQRWEDMEAEEIGGEVVEVTGLGSIEEVRRGQWEDLYGRVDGRDLRESAKVKASYSWKGEGARSLSGREYVQFVRLHAGCLPSLMRAARGRGGQRGALWCRAGCPRAETVGHVVQVCPLTKGGRILRHHAVVGLLVKAFEIRRYGVYQEVSIALRETRVRPDLVVTKGNKAWILDVQVVSPGDELNVINARKKGKYHTREIHNAVRELTGKIEVDTVAITISWKGIWSSQSVRDLREFKLGKRILEWIVERVLRGSHMNWSRWNKLRIEGSN

SEQ ID NO: 2786 - protein, 985 aa, Triatoma infestans
MASELSHVCEVCDRAFSSVTGLGLHRKRAHPVQFNQGIVVDRVKRRWSPEEMELLADWEARLTREGCRGDLIRRLVGLSGGRTMDSIKGVRKTGEYKRLVAARMARGDSPIRVQSEDHAVGSASSAEARWEEELRTILRQDMEVVSRLGPAPWAAGYLVEAGEAVLASRDPTGPLVQWWTEVFMRELGSTPIPSEGERRGQDELGTSRQRRRRLFGEIQRLWKTDRRAAVSRILGGGTDLGPQSLGDMEEYWAALFEVESSPWQGETEQVVERWAMGDIFSPLTADEITGSMPAAGTCAGPDGIEPGEWVRVPLAAKRILFHCFMMWGEVPSQLLEAETSLIPKTAGPASPGEYRPITVASVILRHYHKILARRLGQVYSHSPNQRGFISGMDGVGENVVRFNAILQKARKSRRSIVVLSLDVAKAFDTVSHEAILSVLRAKGAPLHLRKYIQSCLRRSSLRLKWRGQRSRLIRVARGVRQGDPLSPFLFNMVMDHVLSGLPERVGFWTGVSGVRFNALAYADDLLLFASSEIGMRSLISAVESGLAQCGLKVNPAKSWSLCLNPSGRQKLIKVDSEVRFQVAGSGVRALGIADGFKYLGVPFGPLGVQKAEPEIEAALYRVHRAPIKPQQRLEIVREFLLPATYHELVLGQVRREDLHRWDVRVRGCVRHWLRLQHDVPNSYIHAPFKYGGLAVPELSRMVPMWRRVRRERIMQRWEDREAEEIGGEVVEVTGLGSIEEVRRGQWEDLYGRVDGRDLRESAKVKASYSWKGEGARSLSGREYVQFVRLHAGCLPSLMRAARGRGGQRGALWCRAGCPRAETVGHVVQVCPLTKGGRILRHHAVVGLLVKAFEIRRYGVYQEVSIALRETRVRPDLVVTKGNKAWILDVQVVSPGDELNVINARKKGKYHTREIHNAVRELTGKIEVDTVAITISWKGIWSSQSVRDLREFKLGKRILEWIVERVLRGSHMNWSRWNKLRIEGSN

SEQ ID NO: 2787 - protein, 985 aa, Triatoma infestans
MASELSHVCEVCDRAFSSVTGLGLHRKRAHPVQFNQGIVVDRVKRRWSPEEMELLADWEARLTREGCRGDLIRRLVGLSGGRTMDSIKGVRKTGEYKRLVAARMARGDSPIRVQSEDHAVGSASSAEARWEEELRTILRQDMEVVSRLGPAPWAAGYLVEAGEAVLASRDPTGPLVQWWTEVFMRELGSTPIPSEGERRGQDELGTSRQRRRRLFGEIQRLWKTDRRAAVSRILGGGTDLGPQSLGDMEEYWAALFEVESSPWQGETEQVVERWAMGDIFSPLTADEITGSMPAAGTCAGPDGIEPGEWVRVPLAAKRILFHCFMMWGEVPSQLLEAETSLIPKTAGPASPGEYRPITVASVILRHYHKILARRLGQVYSHSPNQRGFISGMDGGGENVVRFNAILQKARKSRRSIVVLSLDVAKAFDTVSHEAILSVLRAKGAPLHLRKYIQSCLRRSSLRLKWRGQRSRLIRVARGVRQGDPLSPFLFNMVMDHVLSGLPERGGFWTGVSGVRFNALAYADDLLLFASSEIGMRSLISAVESGLAQCGLKVNPAKSWSLCLNPSGRQKLIKVDSEVRFQVAGSGVRALGIADGFKYLGVPFGPLGVQKAEPEIEAALYRVHRAPIKPQQRLEIVREFLLPATYHELVLGQVRREDLHRWDVRVRGCVRHWLRLQHDVPNSYIHAPFKYGGLAVPELSRMVPMWRRGRRERIMQRWEDMEAEEIGGEVVEVTGLGSIEEVRRGQWEDLYGRVDGRDLRESAKVKASYSWKGEGARSLSGREYVQFVRLHAGCLPSLMRAARGRGGQRGALWCRAGCPRAETVGHVVQVCPLTKGGRILRHHAVVGLLVKAFEIRRYGVYQEVSIALRETRVRPDLVVTKGNKAWILDVQVVSPGDELNVINARKKGKYHTREIHNAVRELTGKIEVDTVAITISWKGIWSSQSVRDLREFKLGKRILEWIVERVLRGSHMNWSRWNKLRIEGSN

SEQ ID NO: 2788 - protein, 985 aa, Triatoma infestans
MASELSHVCEVCDRAFSSVTGLGLHRKRAHPVQFNQGIVVDRVKRRWSPEEMELLADWEARLTREGCRGDLIRRLVGLSGGRTMDSIKGVRKTGEYKRLVAARMARGDSPIRVQSEDHAVGSASSAEARWEEELRTILRQDMEGVSRLGPAPWAAGYLVEAGEAVLASRDPTGPLVQWWTEVFMRELGSTPIPSEGERWGQDELGTSRQRRRRLFGEIQRLWKTDRRAAVSRILGGGTDLGPQSLGDMEEYWAALFEVESSPWQGETEQVVERWAMGDIFSPLTADEITGSMPAAGTCAGPDGIEPGEWVRVPLAAKRILFHCFMMWGEVPSQLLEAETSLIPKTAGPASPGEYRPITVASVILRHYHKILARRLGQVYSHSPNQRGFISGMDGGGENVVRFNAILQKARKSRRSIVVLSLDVAKAFDTVSHEAILSVLRAKGAPLHLRKYIQSCLRRSSLRLKWRGQRSRLIRVARGVRQGDPLSPFLFNMVMDHVLSGLPERVGFWTGVSGVRFNALAYADDLLLFASSEIGMRSLISAVESGLAQCGLKVNPAKSWSLCLNPSGRQKLIKVDSEVRFQVAGSGVRALGIADGFKYLGVPFGPLGVQKAEPEIEAALYRVHRAPIKPQQRLEIVREFLLPATYHELVLGQVRREDLHRWDVRVRGCVRHWLRLQHDVPNSYIHAPFKYGGLAVPELSRMVPMWRRGRRERIMQRWEDMEAEEIGGEVVEVTGLGSIEEVRRGQWEDLYGRVDGRDLRESAKVKASYSWKGEGARSLSGREYVQFVRLHAGWLPSLMRAARGRGGQRGALWCRAGCPRAETVGHVVQVCPLTKGGRILRHHAVVGLLVKAFEIRRYGVYQEVSIALREARVRPDLVVTKGNKAWILDVQVVSPGDELNVINARKKGKYHTREIHNAVRELTGKIEVDTVAITISWKGIWSSQSVRDLREFKLGKRILEWIVERVLRGSHMNWSRWNKLRIEGSN

SEQ ID NO: 2789 - protein, 985 aa, Triatoma infestans
MASELSHVCEVCDRAFSSVTGLGLHRKRAHPVQFNQGIVVDRVKRRWSPEEMELLADWEAGLTREGCRGDLIRRLVGLSGGRTMDSIKGVRKTGEYKRLVAARMARGDSPIRVQSEDHAVGSASSAEARWEEELRTILRQDMEGVSRLGPAPWAAGYLVEAGEAVLASRDPTGPLVQWWTEVFMRELGSTPIPSEGERRGQDELGTSRQRRRRLFGEIQRLWKTDRRAAVSRILGGGTDLGPQRLGDMEEYWAALFEVESSPWQGETEQVVERWAMGDIFSPLTADEITGSMPAAGTCAGPDGIEPGEWVRVPLAAKRILFHCFMMWGEVPSQLLEAETSLIPKTAGPASPGEYRPITVASVILRHYHKILARRLGQVYSHAPNQRGFISGMDGVGENVVRFNAILQKARKSRRSIVVLSLDVAKAFDTVSHEAILSVLRAKGAPLHLRRYIQSCLRRSSLRLKWRGQRSRLIRVARGVRQGDPLSPFLFNMVMDHVLRGLPERVGFWTGVSGVRFNALAYADDLLLFASSEIGMRSLISAVESGLAQCGLKVNPAKSWSLCLNPSGRQKLIKVDSEVRFQVAGSGVRALGIADGFKYLGVPFGPLGVQKAEPEIEAALYRVHRAPIKPQQRLEIVREFLLPATYHELVLGQVRREDLHRWDVRVRGCGRHWLRLQHDVPNSYIHAPFKYGGLAVPELSRMVPMWRRVRRERIMQRWEDMEAEEIGGEVVEVTGLGSIEEVRRGQWEDLYGRVDGRDLRESAKVKASYSWKGEGARSLSGREYVQFVRLHAGCLPSLMRAARGRGGQRGALWCRAGCPRAETVGHVVQVCPLTKGGRILRHHAVVGLLVKAFEIRRYGVYQEVSIALREARVRPDLVVTKGNKAWILDVQVVSPGDELNVINARKKGKYHTREIHNAVRELTGKIEVDTVAITISWKGIWSSQSVRDLREFKLGKRILEWIVERVLRGSHMNWSRWNKLRIEGSN

SEQ ID NO: 2790 - protein, 985 aa, Triatoma infestans
MASELSHVCEVCDRAVSSVTGLGLHRKRAHPVQFNQGIVVDRVKRRWSPEEMELLADWEARLTREGCRGDLIRRLVGLSGGRTMDSIKGVRKTGEYKRLVAARMARGDSPIRVQSEDHAVGSASSAEARWEEELRTILRQDMEVVSRLGPAPWAAGYLVEAGEAVLASRDPTGPLVQWWTEVFMRELGSTPIPSEGERRGQDELGTSRQRRRRLFGEIQRLWKTDRRAAVSRILGGGTDLGPQSLGDMEEYWAALFEVESSPWQGETEQVVERWAMGDIFSPLTADEITGSMPAAGTCAGPDGIEPGEWVRVPLAAKRILFHCFMMWGEVPSQLLEAETSLIPKTAGPASPGEYRPITVASVILRHYHKILARRLGQVYSHSPNQRGFISGMDGGGENVVRFNAILQKARKSRRSIVVLSLDVAKAFDTVSHEAILSVLRAKGAPLHLRKYIQSCLRRSSLRLKWRGQRSRLIRVARGGRQGDPLSPFLFNMVMDHVLSGLPERVGFWTGVSGVRFNALAYADDLLLFASSEIGMRSLISAVESGLAQCGLKVNPAKSWSLCLNPSGRQKLIKVDSEVRFQVAGSGVRALGIADGFKYLGVPFGPLGVQKAEPEIEAALYRVHRAPIKPQQRLEIVREFLLPATYHELVLGQVRREDLHRWDVRVRGCVRHWLRLQHDVPNSYIHAPFKYGGLAVPELSRMVPMWRRVRRERIMQRWEDMEAEEIGGEVVEVTGLGSIEEVRRGQWEDLYGRVDGRDLRESAKVKASYSWKGEGARSLSGREYVQFVRLHAGWLPSLMRAARGRGGQRGALWCRAGCPRAETVGHVVQVCPLTKGGRILRHHAGVGLLVKAFEIRRYGVYQEVSIALRETRVRPDLVVTKGNKAWILDVQVVSPGDELNVINARKKGKYHTREIHNAVRELTGKIEVDTVAITISWKGIWSSQSVRDLREFKLGKRILEWIVERVLRGSHMNWSRWNKLRIEGSN

SEQ ID NO: 2791 - protein, 985 aa, Triatoma infestans
MASELSHVCEVCDRAVSSVTGLGLHRKRAHPVQFNQGIVVDRVKRRWSPEEMELLADWEARLTREGCRGDLIRRLVGLSGGRTMDSIKGVRKTGEYKRLVAARMARGDSPIRVQSEDHAVGSASSAEARWEEELRTILRQDMEGVSRLGPAPWAAGYLVEAGEAVLASRDPTGPLVQWWTEVFMRELGSTPIPSEGERRGQDELGTSRQRRRRLFGEIQRLWKTDRRAAVSRILGGGTDVGPQSLGDMEEYWAALFEVESSPWQGETEQVVERWAMGDIFSPLTADEITGSMPAAGTCAGPDGIEPGEWVRVPLAAKRILFHCFMMWGEVPSQLLEAETSLIPKTAGPASPGEYRPITVASVILRHYHKILARRLGQVYSHSPNQRGFISGMDGGGENVVRFNAILQKARKSRRSIVVLSLDVAKAFDTVSHEAILSVLRAKGAPLHLRRYIQSCLRRSSLRLKWRGQRSRLIRVARGVRQGDPLSPFLFNMVMDHVLSGLPERVGFWTGVSGVRFNALAYADDLLLFASSEIGMRSLISAVESGLAQCGLKVNPAKSWSLCLNPSGRQKLIKVDSEVRFQVAGSGVRALGIADGFKYLGVPFGPLGVQKAEPEIEAALYRVHRAPIKSQQRLEIVREFLLPATYHELVLGQVRREDLHRWDVRVRGCVRHWLRLQHDVPNSYIHAPFKYGGLAVPELSRMVPMWRRVRRERIMQRWEDMEAEEIGGEVVEVTGLGSIEEVRRGQWEDLYGRVDGRDLRESAKVKASYSWKGEGARSLSGREYVQFVRLHAGCLPSLMRAARGRGGQRGALWCRAGCPRAETVGHVVQVCPLTKGGRILRHHAVVGLLVKAFEIRRYGVYQEVSIALRETRVRPDLVVTKGNKAWILDVQVVSPGDELNVINARKKGKYHTREIHNAVRELTGKIEVDTVAITISWKGIWSSQSVRDLREFKLGKRILEWIVERVLRGSHMNWSRWNKLRIEGSN

SEQ ID NO: 2792 - protein, 985 aa, Triatoma infestans
MASELSHVCEVCDRAFSSVTGLGLHRKRAHPVQFNQGIVVDRVKRRWSPEEMELLADWEARLTREGCRGDLIRRLVGLSGGRTMDSIKGVRKTGEYKRLVAARMARGDSPIRVQSEDHAVGSASSAEARWEEELRTILRQDMEVVSRLGPAPWAAGYLVEAGEAVLASRDPTGPLVQWWTEVFMRELGSTPIPSEGERRGQDELGTSRQRRRRLFGEIQRLWKTDRRAAVSRILGGGTDLGPQRLGDMEEYWAALFEVESSPWQGETEQVVERWAMGDIFSPLTADEITGSMPAAGTCAGPDGIEPGEWVRVPLAAKRILFHCFMMWGEVPSQLLEAETSLIPKTAGPASPGEYRPITVASVILRHYHKILARRLGQVYSHSPNQRGFISGMDGVGENVVRFNAILQKARKSRRSIVVLSLDVAKAFDTVSHEAILSVLRAKGAPLHLRKYIQSCLRRSSLRLKWWGQRSRLIRVARGVRQGDPLSPFLFNMVMDHVLSGLPERVGFWTGVSGVRFNALAYADDLLLFASSEIGMRSLISAVESGLAQCGLKVNPAKSWSLCLNPSGRQKLIKVDSEVRFQVAGSGVRALGIADGFKYLGVPFGPLGVQKAEPEIEAALYRVHRAPIKPQQRLEIVREFLLPATYHELVLGQVRREDLHRWDVRVRGCVRHWLRLQHDVPNSYIHAPFKYGGLAVPELSRMVPMWRRGRRERIMQRWEDMEAEEIGGEVVEVTGLGSIEEVRRGQWEDLYGRVDGRDLRESAKVKASYSWKGEGARSLSGREYVQFVRLHAGCLPSLMRAARGRGGQRGALWCRAGCPRAETVGHVVQVCPLTMGGRILRHHAVVGLLVKAFEIRRYGVYQEVSIALRETRVRPDLVVTKGNKAWILDVQVVSPGDELNVINARKKGKYHTREIHNAVRELTGKIEVDTVAITISWKGIWSSQSVRDLREFKLGKRILEWIVERVLRGSHMNWSRWNKLRIEGSN

SEQ ID NO: 2793 - protein, 985 aa, Triatoma infestans
MASELSHVCEVCDRAVSSVTGLGLHRKRAHPVQFNQGIVVDRVKRRWSPEEMELLADWEARLTREGCRGDLIRRLVGLSGGRTMDSIKGVRKTGEYKRLVAARMARGDSPIRVQSEDHAVGSASSAEARWEEELRTILRQDMEGVSRLGPAPWAAGYLVEAGEAVLASRDPTGPLVQWWTEVFMRELGSTPIPSEGERWGQDELGTSRQRRRRLFGEIQRLWKTDRRAAVSRILGGGTDLGPQSLGDMEEYWAALFEVESSPWQGETEQVVERWAMGDIFSPLTADEITGSMPAAGTCAGPDGIEPGEWVRVPLAAKRILFHCFMMWGEVPSQLLEAETSLIPKTAGPASPGEYRPITVAAVILRHYHKILARRLGQVYSHAPNQRGFISGMDGVGENVVRFNAILQKARKSRRSIVVLSLDVAKAFDTVSHEAILSVLRAKGAPLHLRKYIQSCLRRSSLRLKWRGQRSRLIRVARGVRQGDPLSPFLFNMVMDHVLRGLPERVGFWTGVSGVRFNALAYADDLLLFASSEIGMRSLISAVESGLAQCGLKVNPAKSWSLCLNPSGRQKLIKVDSEVRFQVAGSGVRALGIADGFKYRGVPFGPLGVQKAEPEIEAALYRVHRAPIKPQQRLEIVREFLLPATYHELVLGQVRREDLHRWDVRVRGCVRHWLRLQHDVPNSYIHAPFKYGGLAVPELSRMVPMWRRGRRERIMQRWEDMEAEEIGGEVVEVTGLGSIEEVRRGQWEDLYGRVDGRDLRESAKVKASYSWKGEGARSLSGREYVQFVRLHAGCLPSLMRAARGRGGQRGALWCRAGCPRAETVGHVVQVCPLTKGGRILRHHAGVGLLVKAFEIRRYGVYQEVSIALRETRVRPDLVVTKGNKAWILDVQVVSPGDEVNVINARKKGKYHTREIHNAVRELTGKIEVDTVAITISWKGIWSSQSVRDLREFKLGKRILEWIVERVLRGSHMNWSRWNKLRIEGSN

SEQ ID NO: 2794 - protein, 985 aa, Triatoma infestans
MASELSHVCEVCDRAVSSVTGLGLHRKRAHPVQFNQGIVVDRVKRRWSPEEMELLADWEARLTREGCRGDLIRRLVGLSGGRTMDSIKGVRKTGEYKRLVAARMARGDSPIRVQSEDHAVGSASSAEARWEEELRTILRQDMEVVSRLGPAPWAAGYLVEAGEAVLASRDPTGPLVQWWTEVFMRELGSTPIPSEGERWGQDELGTSRQRRRRLFGEIQRLWKTDRRAAVSRILGGGTDLGPQSLGDMEEYWAALFEVESSPWQGETEQVVERWAMGDIFSPLTADEITGSMPAAGTCAGPDGIEPGEWVRVPLAAKRILFHCFMMWGEVPSQLLEAETSLIPKTAGPASPGEYRPITVASVILRHYHKILARRLGQVYSHSPNQRGFISGMDGVGENVVRFNAILQKARKSRRSIVVLSLDVAKAFDTVSHEAILSVLRAKGAPLHLRRYIQSCLRRSSLRLKWRGQRSRLIRVARGVRQGDPLSPFLFNMVMDHVLSGLPERVGFWTGVSGVRFNALAYADDLLLFASSEIGMRSLISAVESGLAQCGLKVNPAKSWSLCLNPSGRQKLIKVDSEVRFQVAGSGVRALGIADGFKYLGVPFGPLGVQKAEPEIEAALYRVHRAPIKPQQRLEIVREFLLPATYHELVLGQVRREDLHRWDVRVRGCVRHWLRLQHDVPNSYIHAPFKYGGLAVPELSRMVPMWRRVRRERIMQRWEDMEAEEIGGEVVEVTGLGSIEEVRRGQWEDLYGRVDGRDLRESAKVKASYSWKGEGARSLSGREYVQFVRLHAGCLPSLMRAARGRGGQRGALWCRAGCPRAETVGHVVQVCPLTKGGRILRHHAVVGLLVKAFEIRRYGVYQEVSIALRETRVRPDLVVTKGNKAWILDVQVVSPGDELNVINARKKGKYHTREIHNAVRELTGKIEVDTVAITISWKGIWSSQSVRDLREFKLGKRILEWIVERVLRGSHMNWSRWNKLRIEGSN

SEQ ID NO: 2795 - protein, 985 aa, Triatoma infestans
MASELSHVCEVCDRAFSSVTGLGLHRKRAHPVQFNQGIVVDRVKRRWSPEEMELLADWEARLTREGCRGDLIRRLVGLSGGRTMDSIKGVRKTGEYKRLVAARMARGDSPIRVQSEDHAVGSASSAEARWEEELRTILRQDMEVVSRLGPAPWAAGYLVEAGEAVLASRDPTGPLVQWWTEVFMRELGSTPIPSEGERRGQDELGTSRQRRRRLFGEIQRLWKTDRRAAVSRILGGGTDLGPQSLGDMEEYWAALFEVESSPWQGETEQVVERWAMGDIFSPLTADEITGSMPAAGTCAGPDGIEPGEWVRVPLAAKRILFHCFMMWGEVPSQLLEAETSLIPKTAGPASPGEDRPITVASVILRHYHKILARRLGQVYSHSPNQRGFISGMDGVGANVVRFNAILQKARKSRRSIVVLSLDVAKAFDTVSHEAILSVLRAKGAPLHLRKYIQSCLRRSSLRLKWRGQRSRLIRVARGVRQGDPLSPFLFNMVMDHVLSGLPERVGFWTGVSGVRFNALAYADDLLLFASSEIGMRSLISAVESGLAQCGLKVNPAKSWSLCLNPSGRQKLIKVDSEVRFQVAGSGVRALGIADGFKYLGVPFGPLGVQKAEPEIEAALYRVHRAPIKPQQRLEIVREFLLPATYHELVLGQVRREDLHRWDVRVRGCGRHWLRLQHDVPNSYIHAPFKYGGLAVPELSRMVPMWRRVRRERIMQRWEDMEAEEIGGEVVEVTGLGSIEEVRRGQWEDLYGRVDGRDLRESAKVKASYSWKGEGARSLSGREYVQFVRLHAGCLPSLMRAARGRGGQRGALWCRAGCPRAETVGHVVQVCPLTKGGRILRHHAVVGLLVKAFEIRRYGVYQEVSIALRETRVRPDLVVTKGNKAWILDVQVVSPGDELNVINARKKGKYHTREIHNAVRELTGKIEVDTVAITISWKGIWSSQSVRDLREFKLGKRILEWIVERVLRGAHMNWSRWNKLRIEGSN

SEQ ID NO: 2796 - protein, 985 aa, Triatoma infestans
MASELSHVCEVCDRAFSSVTGLGLHRKRAHPVQFNQGIVVDRVKRRWSPEEMELLADWEARLTREGCRGDLIRRLVGLSGGRTMDSIKGVRKTGEYKRLVAARMARGDSPIRVQSEDHAVGSASSAEARWEEELRTILRQDMEGVSRLGPAPWAAGYLVEAGEAVLASRDPTGPLVQWWTEVFMRELGSTPIPSEGERRGQDELGTSRQRRRRLFGEIQRLWKTDRRAAVSRILGGGTDLGPQSLGDMEEYWAALFEVESSPWQGETEQVVERWAMGDIFSPLTADEITGSMPAAGTCAGPDGIEPGEWVRVPLAAKRILFHCFMMWGEVPSQLLEAETSLIPKTAGPASPGEYRPITVASVILRHYHKILARRLGQVYSHSPNQRGFISGMEGVGENVVRFNAILQKARKSRRSIVVLSLDVAKAFDTVSHEAILSVLRAKGAPLHLRKYIQSCLRRSSLRLKWRGQRSRLIRVARGVRQGDPLSPFLFNMVMDHVLSGLPERVGFWTGVSGVRFNALAYADDLLLFASSEIGMRSLISAVESGLAQCGLKVNPAKSWSLCLNPSGRQKLIKVDSEVRFQVAGSGVRALGIADGFKYLGVPFGPLGVQKAEPEIEAALYRVHRAPIKPQQRLEIVREVLLPATYHELVLGQVRREDLHRWDVRVRGCVRHWLRLQHDVPNSYIHAPFKYGGLAVPELSRMVPMWRRVRRERIMQRWEDREAEEIGGEVVEVTGLGSIEEVRRGQWEDLYGRVDGRDLRESAKVKASYSWKGEGARSLSGREYVQFVRLHAGCLPSLMRAARGRGGQRGALWCRAGCPRAETVGHVVQVCPLTKGGRILRHHAVVGLLVKAFEIRRYGVYQEVSIALRETRGRPDLVVTKGNKAWILDVQVVSPGDELNVINARKKGKYHTREIHNAGRELTGKIEVDTVAITISWKGIWSSQSVRDLREFKLGKRILEWIVERVLRGSHMNWSRWNKLRIEGSN

SEQ ID NO: 2797 - protein, 985 aa, Triatoma infestans
MASELSHVCEVCDRAFSSVTGLGLHRKRAHPVQFNQGIVVDRVKRRWSPEEMELLADWEARLTREGCRGDLIRRLVGLSGGRTMDSIKGVRKTGEDKRLVAARMARGDSPIRVQSEDHAVGSASSAEARWEEELRTILRQDMEVVSRLGPAPWAAGYLVEAGEAVLASRDPTGPLVQWWTEVFMRELGSTPIPSEGERRGQDELGTSRQRRRRLFGEIQRLWKTDRRAAVSRILGGGTDLGPQSLGDMEEYWAALFEVESSPWQGETEQVVERWAMGDIFAPLTADEITGSMPAAGTCAGPDGIEPGEWVRVPLAAKRILFHCFMMWGEVPSQLLEAETSLIPKTAGPASPGEYRPITVASVILRHYHKILARRLGQVYSHSPNQRGFISGMDGVGENVVRFNAILQKARKSRRSIVVLSLDVAKAFDTVSHEAILSVLRAKGAPLHLRRYIQSCLRRSSLRLKWRGQRSRLIRVARGVRQGDPLSPFLFNMVMDHVLRGLPERVGFWTGVSGVRFNALAYADDLLLFASSEIGMRSLISAVESGLAQCGLKVNPAKSWSLCLNPSGRQKLIKVDSEVRFQVAGSGVRALGIADGFKYLGVPFGPLGVQKAEPEIEAALYRVHRAPIKPQQRLEIVREFLLPATYHELVLGQVRREDLHRWDVRVRGCVRHWLRLQHDVPNSYIHAPFKYGGLAVPELSRMVPMWRRVRRERIMQRWEDMEAEEIGGEVVEVTGLGSIEEVRRGQWEDLYGRVDGRDLRESAKVKASYSWKGEGARSLSGREYVQFVRLHAGCLPSLMRAARGRGGQRGALWCRAGCPRAETVGHVVQVCPLTKGGRILRHHAVVGLLVKAFEIRRYGVYQEVSIALREARVRPDLVVTKGNKAWILDVQVVSPGDELNVINARKKGKYHTREIHNAVRELTGKIEVDTVAITISWKGIWSSQSVRDLREFKLGKRILEWIVERVLRGSHMNWSRWNKLRIEGSN

SEQ ID NO: 2798 - protein, 939 aa, Triatoma infestans
MASELSHVCEVCDRAFSSVTGLGLHRKRAHPVQFNQGIVVDRVKRRWSPEEMELLADWEAGLTREGCRGDLIRRLVGLSGGRTMDSIKGVRKTGEYKRLVAARMARGDSPIRVQSEDHAVGSASSAEARWEEELRTILRQDMEVVSRLGPAPWAAGYLVEAGEAVLASRGPTGPLVQWWTEVFMRELGSTPIPSAGERRGQDELGTSRQRRRRLFGEIQRLWKTDRRAAVSRILGGGTDLGPQSLGDMEEYWAALFEVESSPWQGETEQVVERWAMGDIFSPLTADEITGSMPAAGTCAGPDGIEPGEWGRVPLAAKRILFHCFMMWGEVPSQLLEAETSLIPKTAGPASPGEYRPITVASVILRHYHKILARRLGQVYSHSPNQRGFISGMDGVGENVVRFNAILQKARKSRRSIVVLSLDVAKAFDTVSHEAILSVLRAKGAPLHLRKYIQSCLRRSSLRLKWRGQRSRLIRVARGVRQGDPLSPFLFNMVMDHVLSGLPERVGFWTGVSGVRFNALAYADDLLLFASSEIGMRSLISAVESGLAQCGLKVNPAKSWSLCLNPSGRQKLIKVDSEVRFQVAGSGVRALGIADGFKYLGAPFGPLGVQKAEPEIEAALYRVHRAPIKPQQRLEIVREFLLPATYHELVLGQVRREDLHRWDVRVRGCVRHWLRLQHDVPNSYIHAPFKYGGLAVPELSRMVPMWRRVRRERIMQRWEGMEAEEIGGEVVEVTGLGSIEEVRRGQWEDLYGRVDGRDLRESAKVKASYSWKGEGARSLSGREYVQFVRLHAGCLPSLMRAARGRGGQRGALWCRAGCPRAETVGHVVQVCPLTKGGRILRHHAVVGLLVKACEIRRYGVYQEVSIALRETRVRPDLVVTKGNKAWILDVQVVSPGDELNVINARKKGKYHTREIHNAVRELTGKTEVDTVAITISWKGI

SEQ ID NO: 2799 - protein, 985 aa, Triatoma infestans
MASELSHVCEVCDRAFSSVTGLGLHRKRAHPVQFNQGIVVDRVKRRWSPEEMELLADWEARLTREGCRGDLIRRLVGLSGGRTMDSIKGVRKTGEDKRLVAARMARGDSPIRVQSEDHAVGSASSAEARWEEELRTILRQDMEVVSRLGPAPWAAGYLVEAGEAVLASRDPTGPLVQWWTEVFMRELGSTPIPSEGERRGQDELGTSRQRRRRLFGEIQRLWKTDRRAAVSRILGGGTDLGPQSLGDMEEYWAALFEVESSPWQGETEQVVERWAMGDIFAPLTADEITGSMPAAGTCAGPDGIEPGEWVRVPLAAKRILFHCFMMWGEVPSQLLEAETSLIPKTAGPASPGEYRPITVASVILRHYHKILARRLGQVYSHSPNQRGFISGMDGVGENVVRFNAILQKARKSRRSIVVLSLDVAKAFDTVSHEAILSVLRAKGAPLHVRKYIQSCLRRSSLRLKWRGQRSRLIRVARGVRQGDPLSPFLFNMVMDHVLSGLPERGGFWTGVSGVRFNALAYADDLLLFASSEIGMRSLISAVESGLAQCGLKVNPAKSWSLCLNPSGRQKLIKVDSEVRFQVAGSGVRALGIADGFKYLGVPFGPLGVQKAEPEIEAALYRVHRAPIKPQQRLEIVREFLLPATYHELVLGQVRREDLHRWDVRVRGGVRHWLRLQHDVPNSYIHAPFKYGGLAVPELSRMVPMWRRVRRERIMQRWEDMEAEEIGGEVVEVTGLGSIEEVRRGQWEDLYGRVDGRDLRESAKVKASYSWKGEGARSLSGREYVQFVRLHAGCLPSLMRAARGRGGQRGALWCRAGCPRAETVGHVVQVCPLTKGGRILRHHAVVGLLVKAFEIRRYGVYQEVSIALRETRVRPDLVVTKGNKAWILDVQVVSPGDELNVINARKKGKYHTREIHNAVRELTGKIEVDTVAITISWKGIWSSQSVRDLREFKLGKRILEWIVERVLRGSHMNWSRWNKLRIEGSN

SEQ ID NO: 2800 - protein, 1799 aa, Teleogryllus occipitalis
MRITRRNNYPSPLISSRPTVASPRRRSTSLPPSSRADRTEPVVESSSLPPSPSRADAQVDDLLSVIDRSLAGVRDAITSIDASLGKRSSTSISLTSPPHTPSSQPPSPHSIRFSSPQAPSSPSPSNHSVRDSSSQTDSSSLRSSDPPISPISGSSSSEGGSPPSPSSENSARNPSQMQSSTPATSAVRVPTDSLRLSPIAPSPARSASAAPSLFSPSTRQHRPRTVGAHLSNTTPSMVPVSRDLWPKLDPTVGTDGLLTVFNPTPSPCHCPFCGFTCNPKSAPHARSLLIAHLQDNHDWSGTSRILCWACRKPAAKADHYRTCAARNGPLKICNTLPSSPLMPGVPPTSRPLIASPPPPSQSPLLAPTSRPLIASPPPPSQSPLISTTPLLSTPPVNTTNSLDRQPKLSGDKILFAFPSAPTIICPLCPPGSKPVSSATTHSARIQSLRRHAQANHPERNLTVEKACFACNTVFRRWASHKKLCLLARQNSSFLGPNPSKFLCQHPGCNFRFASAAQRGQHERIHNAIYRIPPAIRLPRPPTIRATRDTVRSINALKDPNPHVPPNSSFQRTRVFLNSSLPRSSRSLPGSPSSSSSTTCANPSSSPSTQPSSSQPQPTLSTVQPPPTNSPALSSPSSSSSSPSPAIPQTKLSSSIFSPPSTSPPQVNSSPRSHPSGYLIEFPPLSPPPHGGPSNSVSSSSSSPCNTAQPVEDSPREPSRHSTSPGPSSGLLIEHPPLSSSLTPHNSIQSASVSISPPRRAASSHSRSTQDVPPHFNLSMPTPNHEGYLIDAPQTSEASEVLSSTSHPPCPTSEPPRTPVITDVQDIVSAPPSQSLTTGHTPEMTGKLCPELESLRALIIESSQIISADSWQCFISSVDLVTQAIQNKFLKTPRSPYDPSSARKPTQRAVNSAKLSLIYKSNPRRALRIITEQAGPQCKLPPQTMAEAFFSPSSAPDIPYNFYTPVDRPPIQSHPFTEREVAERLQACTNSSPGDDRIGYDLWKRIDPNCRLLTSIFNACLKFQKIPPSWKVSKTILIHKGGDTETPSSWRPISLSNTAPKLYASLWANRFSSWLEQHNILCPAQKGFRPHDGVFEHNFMVETLISNAKLQKGNASILFLDFSNAFGSIPHSAILAALYASGAGMPFQNIVSDLYSGCSTTVVTDAGLSDSISPSLGVRQGCPLSPSLFNLAVDPVLRAALSLSDLDVRGGAYADDFWLAASSPAVVQVMLNSVRSLSSQIGISINPSKCDALFILGGAIDPSPTIFVGDHPIRTLSSEDHTIFLGKPIGFSIINADTKFSEVISLMEKIRDSTLAPWQKVDAISSFIVPQLSFPLRMRSFSFRAASDFDSWFRCLSKDLLGLPENASTHFLHAPRSGGGAGLPVFRIEALLASIEGAFKLLTSKDPVIRQLASADLKFTVHSRYPSRPVTSSLVEEYLNSSSAPNNFGRKSLWSGARHASKALGICWALRDVDGCLQPTLIPDLCVPPTHQPILPHQRHLVLRKLRLIQQDQHLTLWKAQPDQGRAAHELARAGTRSGHFLRTGLHLRHSDFYWVHRARLNLTRGLRAGRAFMSNDDKNCRFGCTVSNTDPTVYHETLAHVLNHCHQNLRQITSRHNHVVSLIKSAATANKWLVLAEDEAFLNQDLRPDLVIRNGSARSVRIIDVTIPFEGGRGALATARTEKLKKYAALRQKILQCHGVSDVKIFPLVIGARGAWDPQNDRILRDIAHPSYVDPLRKLCISAVIRHSHDIFKNHISHSRLPSERSPPPEMPRSPTPCIGSGSNTQADHSSSSPGVVNQ

SEQ ID NO: 2801 - protein, 1170 aa, Beroe forskalii
MKMLQTSPWTLRLALPVLRSRILIKNHAFDTELESSPICYSKNHDKASDLAKTPIVSSTSSISDAGDSRKRSKRQSASVIPEKTTSLVDMAIQQARSNLEIAAGVEPTDIAVPKVTDIHKGIGGSAERVIGWEESQVNFESVKDSPSYDFEIRSGIKNARDKETWDEVDQRFKELWKEGIEDCETENCSQFLSLFKNCVYTAAKEIAGTNDDSLKTHKNLKYIDEQKKKIRREKNVAKKKFKALQRDINTPDSALEEHDRYWRKLIRLHSKLKKQEIAINERLERKENTKSFFRNPFEFIKEKVTCKTTGKIMSPDCSVDEANDFFQERYSDKDRSKSIPFPHNLPAPKDPTYPFALQEVSDEEIYEYIRSRRNKSAPGPDGIPFKIFKSCPNIRCILYSIVRGMFIEKAIPKEEKVALKILIPKGSSRDVGEFRDLTLFNTTLKVVMGVWSRRVRKFMMRNKYFNMDVQKGFLPKISGCVEHNQTVTELLKSKIKEGDDAFIVWMDLCNAFGSIKHNLMFAALKFYGIPDETIELIASLYTECYVKVKTKEWITRSIRIEKGSLQGGPEAGLCFNITWNLGLDFLVHVALAIGGTGVEKPVAGFADDVTLAATNRISLRALVKAAENFCEWAGLQFKDAKCKAMGVVGGSLVNPLIAVNGKVIPAMHKAPFKFLGRLVYPKFETKEEQSVVDKFINLMKRTDEIHIDNRKKAWMYANGVLPAMSWDFMIYKFTESGIATMEACATRLLKKWLGLCKSADPTILYRSEKGLGIRSVREACMKAQVNKEIILCCSRDRTVRTVASTRRESEQIMDKRWKPSAVLDEVVQRVTYRHKYKGQMDKRGLGHNVYLNKPVERKELTQEVTSMKEEEMIPHILSLAQQSRWTQWDTVVNLDLKWKEILYGMSPSMLSFILNSVQDTLPHPVNLRRWKLDTQASCALCGWKHAGFAHILCGCKVALEQGRISYRHDSILTVIQDAILNKVKKVDNTVPLTTGREPVLFVGSGQRVRKKKKVHHGIIDVSKDWITQTDLRRKQVQFPPHIITTAERPDLVLYSDSKKVLVILELTSPAEDNIEKWREVKKTKYEKLAENIREGGVWKVFVFTIEVGARGFVAKQTASVWRQLGMSETDGRKLTEAISRTAIRCSHFIWICRNTLEWTAPSHGATNTSG

SEQ ID NO: 2802 - protein, 1126 aa, Beroe forskalii
MAKTSTIASTSSISDAGDSTEKSNGQECSEPSSVNSGKTTSTIDLAIQQARRNVERAAGVESTDIAVPKVTDIYKGIRRSAERVIGWEESQVNFDSLKDSPPYDFEIKSGIKNARDKETWDKVDLRFKELWIEGFEDCETENCSQFLSFFKSCVYTAAEETVGTNDDSVKTHKNLKYIDEQKKKIRREKNAAKKRFKALQRDINTPDSVLEDHDRHWRKLIRLHSKLKKQEIAINERLERKENTKSFCRNPYDFIKEKVTCKTTDKNMSPDCSVDEANDFFQGRYSDENRSKSIPFPHNLPAPKDPTYPFALEEVSDEEIYEYIRSRRNKSAPGPDGIPFRIFKSCPNIRTILYSIVRGMFIEKAIPKEEKVALKILIPKGSSRDVGEFRDLTLFNTTLKVVMGVWSRRVRKFMMRNKYFNMDVQKGFLPKISGCVEHNQTVTELLKTKIKAGEDAFIVWMDLCNAFGSIKHNLMFAALKFYGIPDETIELIASLYTECYVKVKTKDWTTRSIRIEKGSLQGGPEAGLCFNVTWNLGLDFLVHVAHAIGGTGVEKPVAGFADDVTLAATTRVSLRALVRAAENFCEWAGLQFKDAKCKAMGVVGGSLVNPLIAVNGKVIPAMHKAPFKFLGRLVYPKFENKEEQSVVDKFTNLMKKTDEIHIDNRKKAWMYVNGVLPAMSWDFMIYKFTESGIATMEACATRMLKKWLGLCKSADPTILYRSEKGLGIRSVREACMKAQVNKEIILCCSRDRTVRTVASARRESEQITDKKWKPAAVLDKVVQRVSYRHKFKGQLDRRGLGHNIYLNKPMERKELGKEVTSMKEEEMIPHILSLAQQSKWTQWDSVINLDLKWKEILYGMSPSMLSFILNSVQDTLPHPVNLRRWKLDTQASCALCGWKHAGFAHILCGCKVALDQGRISYRHDSILTVIQDAIIDKVKKVDNTVPLNTGREPVVFVGSGQRVRKKKKKVHHGIIDVSKDWIIQTDLRSKQVQFPPHIITTAERPDLVLYSDSKKVLVILELTSPAEDNIEKWREVKKTKYEKLAENIREGGVWKVFVFTIEVGARGFVAKRTAAVWRQLGMSETDGRKLTETISRTAIRCSHFIWICRNTLEWTAPSHGVTNTSG

SEQ ID NO: 2803 - protein, 1229 aa, Ctenoptilum multiguttatum
MNKFIWRTYLIGTDLGTQTRGYLDYLHREFSQQYPEMDISRQRLGDQCRAIIRNKLLHHTVLDDIRTEAIKHIQQTSQNNIQLPQLYTKTQPTTHSGRMRWTDEMNETIMRLYFESSNLEQDLTGWGKKIHNKFKVHYPHLSHITEQRLADQKRVIVKNRMLTEERIREIRIQVELDMKHTQSTNNNKDTQHNSLQGNPEHYSSFLLQTCEINSDEENTNKDANLDKNYNVNRKYIETQFSTIWNQFKDSDPVSRPYIPKQKTSRKLAIIVHNINKHILPEYLSPDTDFHTFHSLIYVAAYTAATCNNTKIGQYNAQCTKREPAWQRRLKIKIEELRTHIARLTQFINGNRSRKLIKNVDLVKKKYKIHALHEKDNNELNLYLDTLKQKLSATANRLRRYTNCTKRKTQNAEFNRNEKSFYRKLAGSNDQNKPTTRLPTTETLQRYWTSIWENPVQYNKEASWLKNLTEMSSTSEMEFENITENVLMQVIRRTHNWKAPGTDHIHNYWYKKLTCTHPYIHKFINQFIQIPSTMPTFITNGKTYMLPKDADTENPAKYRPITCLQTIYKIITACISESMYTHLNKYNILAEQQKGCRKYSQGCKEQLTIDATVMSQAFRRKKSIHSVYIDYKKAFDSVPHSWLLQILHHYKIHPQIIGFLETSMENWKTILNINVNNTSITTEPISIKRGIFQGDALSPLWFCMALNPLSELLNNSKVGYKLTYNGSHHTLSHLMYMDDIKLYACNEEELFKLIDLTETFSNDISMHFGIDKCKIHSVNRGRTHDTNYTLQTGELIQSMDICVGYKYLGFYQSNQIHHKQTKSNLTQHFKHRLNQILKTELNSRNLIKAINTFAIPVLTYSFGVVKWSKTDLIKLQRIINTSLTKYRKHHPKACLQRLTLPRCEGGRGLIDLTNLYNSQVATLRKYFHNKAETSQLHKYTCDIDNKFTPLNLHDRTTNKKATDSQEKLDRWASKTLHGRHYAELNKPHVDKRESNAWLRQGQLFPETEAFMLAIQDQVINTANYQKHITKTLSQGNDLCRQCKSAPETIQHITGACKTLVQTDYKHRHDQIASIIHQHLAHLCKFIENKMPYYKYTPETILESKTHKLYWDRTILTDRTVHFNRPDITLHDKINKTVYLVDIAVPNSHNLQSTISEKMSKYRDLGIEIRKQWQVHTVHIVPIVISSTGVIPKILHNSIKTLNIQPHILHTLQKASILNTCRIVRKFLNIQ

SEQ ID NO: 2804 - protein, 1403 aa, Piruna aea
MRLRSSNRVPQAGTSNGESRPEPQRSGSPAYSGEGTVPQQKVHNNTQDTEITTNSSLTTYSSQHCHKNVRYNLRSFSGAHRGPNLVETLNSQGHNTNEPSTRSTSPQSLFSSLASSPKSYEYSVEQRSRSTTLSPMPIDVVQEAIAVHPAPTLGSTKRLRRKWTQDMNEFIWRSYLIATELETRKRGYLDYLHPEFTQKYQEMDTSRQRLGDQCRAIVRNKLLPQTVLEDIRNQVSTHFQTRNLQTPISQSQNLLQTQGSLRTTRMTWTDEINEFIIRTYFEITNIEKDLTAYRKKLHDQFTERFPQLNNISEQRIADQRRAIIYNRLLTVEKIEEIRREVGLKLQEMQTIDNINTQQRLGELHNNNDELYDIVEPNEPQLRTHSPHEQDINLNETNNVEYKNKDYIAEQFQKNLHRFGNTSPVQRPYIPKQKTSRRLALIVDCINRHILPKYLEPNIEFHLLQTLIYVGAYTAVTCNGGKMYTHFEKYNRRKPAWHKRLENKIEQLRSEIGKLTQFIKGNRSRRVVEVVNLIKEKHKKHAQYEDQNYELFDFLDTLKQKLNSSSSRLRRYVKCTNRKIQNNQFLNNEKKFYKNIVSDRMQSERTPMTGTPTVDSLRDYWANIWEHPTQYNKDANWLKNLTNTSQIPNMHFENITENTLIEVIKNTHNWKSPGTDHIHNYWYKQFTCTYLIIHKYINLFIQSPHIMPKYLTHGKSYLIPKDADGKNPANYRPITCLQTLYKIITSCLSKAIYNHLENNKILAEQQKGCRKHSQGCKEQLTIDAVVMKHALIKKKNINSMYIDYRKAFDSVPHSWLLFVLDHYKIHPQLIKFLETSMKNWQTVLNLTINNNSITTEPIRILRGIFQGDALSPLWFCLAINPLSELLNTSQAGLSLTYNNTHYILSHLMYMDDIKLYANTKKELFRLADVTQHFSNDIHMRFGIDKCKIYSINRGRVLDTSYQLESGEVVEAMDANSSYKYLGFHQSKNIHHKAAKTNLTKMFKYRLERILKSHLNSRNIVKAINTFAIPVLTYSFGIIRWSQSNLKNIQRIINTSLTKHRKHHPKSCTQRLTIPRKDGGRGLIDIVNLHNKQIHTLRQFFHIKAQSSDLHKFIVDIDSKFTPLNLHDTNTQPNEQLVNTQEKAAIWAQKALHGRHFADLSQPYVDKSESNAWLKYGELFPETEAFMLAIQDQVISTANYRKYITKVTNESDLCRHCKKAPETIQHITGACTSLVQNDYKHRHDQVASIIHQHLAYSYKFIQNKQPYYKYKPQTVFENQTHKLYWDRTILTDKTIHYNRPDITVHDKQNKIAYIVDIAVPNTHNLQSTISEKLTKYRDLAIELKTQWQVQTVHIVPIVLSSTGVIPKHLNKSLKILNIHPHQSQTLQKAAILNTCRIVRKFLNMD

SEQ ID NO: 2805 - protein, 918 aa, Dalla eburones
MPLNKYHRGKPAWQKRLEGKVKQLRAEIGKLTQFMKGNRSRKVVQAVDLIKENHKNHAQFEDHNYELSEYLDTLKQKLNTSASRLRRYLKCTNRKTQNNQFLNNEKRFYKNLLNDRTNQITTGAPTSDTLKHYWANIWETPAEHNKNAGWLEKLVNVSQIPNMQFEHITDNTVTEVIKHTHSWKSPGTDHIHNYWYKKFTCMHTHIHKHINSFIQIPNTMPKYLTQGTTYMLSKDKDTENPANYRPITCLQTLYKIITACISKSIYNHLEQHKILAEQQKGCRKHSQGCKEQLTIDAVAMKQAFHRKNNIHTLFIDYRKAFDSVPHSWLLYILDFYKIHPQLITFLKTSMSNWQTILNLTINNTTIRTEPIRIQRGIFQGDALSPLWFCLAINPLSELLINAQTGFKLTHNSSYHILSHLMYMDDIKLYANNKKDLFTLANITETFSNDIKMQFGIDKCKINSISQGRVLDTNYQLQSGEVIEAMDANSSYKYLGFHQSKNIHQKTAKLNLTKNFKYRLERILKSHLNSRNTIKAINTFAIPVLTYSFGIISWSQSNLKKIQRIINSTLTKQRKHHPKSCIQRLTIPRKEGGRGLIDIVNLHNSQIHILRQFFYSKTHTSDLHKYIVDIDFKFTPLNLHDTTTQPNEHIVNIQEKNATWAQKSLHGRHFADLSQPHVDRNESNAWLKRGELFPETEAFMLAIQDQVICTANYRKHITKEIAHQSDLCRQCKKASETIQHVTGACTSLVQNDYKHRHDQIASIIHQHLAHTYKFIPNKQAYYKYKPQTVHENRTHKLYWDRTILTDKTIHYNRPDITVHDKQNKTAYIIDIAVPNTHNLQSTISEKLTKYRDLAIELKTQWQVQNVHIVPIVLSSTGVIPKLLSKSLQTLNIHPNVSHTLQKAAILNTCRIVRKFLNLN

SEQ ID NO: 2806 - protein, 1380 aa, Dalla costala
MHLRSSNKVPQAGTSNGESRPEPSGSGCPTYSGEGTVPLQTVHNNNQDTNITINSNNRYNLRSRSGAHQAIRSMRPSKTDVLKTINSNEPSPRSPSPESLFPSLASSPRSYECSIEQRSRSTTLSPMPVDVVQEAVAVHPAPTIGKTKRLRRKWTQDMNEFIWRQYLIATELETRIRGYLDYLHPQFTQNYPEMDISRQRLGDQCRAIIRNKLLPQMVSEDIRNQVSIQLQSRNLQTSVNYSQHSHQTQNSVKSTRMTWSDDINEFIIRTYFEITHIEKDLTAYRKKLHDRFKEKFAHLNNISEQRVADQRRVIVHNKLLTVERIEEIKREVELKLNNDNINEQYEIHESVHNESQTNANEEENNQEINLNTGINIEYEKRAYVEEQFKFFLQRFELTNPVSRPYIPKQKTSRRLALIVNCINQHILPKYVDPNIEFDLLQTLIYVGAYTVAICNGCKISTEVSKYNKRKPAWQKRLENKIEQLRAEIGKLTQFIKGNRSRRVIKAVNLIKEKHEKHAQFEDQNYEPYHFLDTLKQKLNSSSCRLRRYLKCTNRKTQNSQYINNEKKFYKNLINDDNTQSRVVTGTPTSDALKLYWANIWEKPVVHNKDASWFEKLTNASQIPTMQFEHITENTVVEAMKHTHNWKSPGTDHIHNYWYKKFTCTHSLIHKHINSFIQSPNTMPQYLTHGKTYMLPKDNDTENPANYRPITCLQTLYKIITTCVSKSIYSHLEKYNILAEQQKGCRKYSQGCKEQLTIDAVVMKQAFHRKRDIHTMYIDYRKAFDSVPHSWLLHILEHYKIHPQLITFLEISMANWQTVLNLSNSQISITTEPIRIERGIFQGDALSPLWFCLAINPLSELLKNTQAGFKLTYNNSNHVFSHLMYMDDIKLYASNKKELFTLADVTQTFSKDIHMQFGIDKCKIHSVSKGRVINTNYQLENGEQIEAMDASSSYKYLGFHQSRNIHQKTAKLDLTRSFKYRLERILKSHLNSRNIVKAINTFAIPILTYSFGIISWSQSNLKKIQRIINTSLTKQRKHHPKSCIQRLTIPRKEGGRGLIDIVNLHNKQIHTLRQFFHSKAQTSDLHRHIAGIDTKFTPLNLHDSTTQPNEQLVNIQEKTNTWAQKSLHGRHFSDLSQPHVDKSESNAWLKRGELFPETEAFMLAIQDQVICTANYRKHITKELAQQSDLCRQCKQAPETIQHITGACTSLVQNDYKHRHDQIAAIIHQHLAHTYKFISIKQPYYKYKPQTVFENQTHKLYWDRTILTDKTIHFNRPDITVHDKINKTAYIIDIAIPNTHNLQATISEKLTKYRDLAIELRTQWHVQTVHIIPIVLSSTGVIPKLLSKSLKSLNIHPNQSQTLQKAAILNTCRIVRKFLNIN

SEQ ID NO: 2807 - protein, 1381 aa, Calpodes ethlius
MESWLEIESLGPLPGGNRRGTPGADAGCSSMRTVSGEELNRRAPSGSPEHVTANRINSKRKLSCRYNLRPRSHTQLNEQLNQIEQENQTATLSTSPQSLFSSIASSPRSYEEDRFENQIQSTTSTPVLVDVVQEADAAIFAPTTGTIVRTRRRWTEQMNKFLWRTYLIATELEKNPRGYLDYLHPQFIQKYPEMDVSRQRLGDQCRAIVRNKLLRQEILDNIRHEVSLLLQTNDPQVGTHQSNNDLLGSTRMRWTNDINEFIIRSYFEVTEAEKELTAYRKKLHEKFIEKYPQLHNLSEQRVADQRRSIIHNKLLSADRIQEIKNDVQLQIHQNRLTQHITQDLINNDNYNHTQQTQPDNTNIEEIQQETVTDRANRMERKNKDYIKNKFKEFLQRFENTNPVNRPFIPKQKISRKLIAAVQFINQYILPEYLEPDIKFDYLQTLIYVTAFTVATYNGTKIDNYVLKNEKSKPAWQNRLENKIKLLRSDIGRLTQFISGNRSRKVSKTVERIKDKHKVHAQFEDKNDDLNQFLDTLKQKLNVTASRLRRYLKCMERKSQNNQFSNNESKFYKNLLNDNDQAVTTRLIPTSHELKYFWSNIWENPVQHNTNAKWFKDLDNNHQIPEMHFEHITESTISEVIKRTHNWKSPGTDHIHNFWYKKLTSTHKHILKHINLFIQSPSTMPKYFTHGKTYMLPKDLDTNNPANYRPITCLQTIYKIITACISESIKTHVMKHNILAEQQKGCRKYSYGCKEQLTIDAVAMKQAFHNKRNIHSMYIDYKKAFDSVPHSWLLYILDYYKIHPQLISFLEVSMSNWQTVLNVNIRNTIITTEPIRIQRGIFQGDALSPLWFCLAFNPLSEILNKTKAGFKLTYEGTHHVLSHLMYMDDIKLYASNKKELFTLADITQTFSNDINMQFGIDKCKIHSVNRGKILNTNYSLESGEIIEAMDEHSSYKYLGFHQSKQIHQKAAKSELIKKFKYRINKILKTHLNSRNIIKAINTFAIPILTYSFGIISWSSTDLKKLQRTINTSLTKYRKHHPKSCIQRLTMPRRDGGRGLIDILNLHNSQVHILRQFFHNKSLTSDLHKYVVNIDDKITPLNLHDRTIQSNEQLVSIQEKIMSWAQKSLHGRHYADLNQAHVDKDESNAWLKHGELFPETEAFMLAIQDQVIRTANYRKHITKELISQSDLCRRCNGAPETIQHITGACKSLVQNDYKHRHDQIASIIHQHLAHTYKFIPKKQPYYKYKPQSVLQNTTHKLYWDRTILTDKTVHFNRPDITVHDKQNMTAYIIDIAIPNTHNLQTTISEKLTKYRELAIELQTQWQVQTVHIIPIVLSSTGVVPKLLNNSLNLLKIPSHVSQTLQKATILNTCRIVRKFLNIN

SEQ ID NO: 2808 - protein, 1411 aa, Piruna pirus
MRLRSSNRVPQAGTSNGESRPEPSGSGCPTYSGEGTVPQQPCCNKGDINIETPNLNKKTTRYNLRSLSGAHQDARSTRSNHTEDLDKQNNRTLNESITRSSSPDSLFPSLPSSPQSYEYTIEQRPRSTTTSSSSSSSPMPVDVVQEAIAVQSAPTTGSTKRLRRKWTQDMNEFIWRTYLIATELETRTRGYLDHLHPQFTQKYPEIDISRQRLGDQCRAIIRNKLLPQTILDNIRNQVLIQLQSRISQDSSSHSQNQHQTQNLQKSMRMRWPDDVNEFIIRTYFEITDIEKDLTAYRKKLHDRFKEQFSHLHNVSEQRVADQRRAIVYNKLLTIERIEEIKSEVQLKLQETHAFNNTSLQNREDELNNANYSTQCEINESPYPQSLNNVANEHEIDQENNLNIAIDKEYEYKTNIEQQFQLFLERFENSNPVNRPYIPKQKTSRRLAAIVDCINRHILPKHLKPNIEFDFLQTLIYVGAFTAAICNGTKIDTVVKKYSRRKPAWQNRLETKIKQLRAEIGKLSQFIKGNRSRRVIRAVNLIKEKHKEHAQFEDHNYEPFQFLDTLKQKLSTSSSRLRRYLKCTNRKIQNNQFFNNENKFYKNLTHDNKQSRISTGIPTSDALRNYWASIWETPVLHNKDASWLTELTNATQTPNMQFQHIPENTVVEVIKHTHNWKSPGTDHIQNYWYKKFTSTHTLIHKYINSFLHSPNTMPKYLTHGKTYMLPKDDNTENPANYRPITCLQTLYKIITACLSKSIYTHLENYHILAEQQKGCKKNSQGCKEQLTIDAVVMKQAFHKKRNIHTMYIDYRKAFDSVPHSWLLNVLEHYKIHPQLIKFLEISMANWQTVLNLSNSHTSITTEPIRIQRGIFQGDALSPLWFCLAINPLSELLNNSQAGFKLSYSDSHYILSHLMYMDDIKLYSNNKKQLFTLADITQVFSKDIHMQFGIDKCKIHSTSKGRVVNTHYQLESGEKIEAMDVNSSYKYLGFHQSKNIHQKTAKIDLTKTFKYRLDKILKTHLNSRNIIKAINTFAIPILTYSFGIISWSQSNLKKIQSTINKSLTKQRKHHPKSCVQRLTIPRKEGGRGLIDIVNLHNKQIHTLRKFFHTKLQSSELHRHIVGIDIKFTPLNLHDTTLQPNEQLVSIHEKTTTWAQKSLHGRHFSDLSQPHVDKSESNAWLRRGELFPETEAFMLAIQDQVVCTANYRKHITKELAQQSDLCRQCKKAPETIQHITGACSSLVQNDYKHRHDQIASIIHQHLAHTYKFIASKQPYYKYKPQIVFENRAYKLYWDRTILTDKTIHFNRPDITVHDKINKTAYIIDIAIPNTHNLQSTISEKLTKYRDLAIELKTQWQVPTVHIVPIVVSSTGVIPKILCKSLKTLNIQPYQSRTLQKAAILNTCRIVRKFLNINY

SEQ ID NO: 2809 - protein, 1350 aa, Pyrrhopyge creona
MQNTNPKNVKYNLRSLSQAKSVKRSIRTSVTDDVQSSTLTRTSSPESLFESVASSPRSYEQPSPTCSLSITSSPSSVDVVQEAIATYPAPITETTRKRRQWTKDMNECIWRAYLIGTELGKRTRGYLDYLYTEFNEKYPEMCASKQRLGDQCRAILRKKLLNENTLADIRQQVIKQLQTINFEHTQIQHQTQNKSGTTRMKWTDDINETILRFYFEITNMEKDMVAYRKKLHDKFTTHYPHLSHITEQRLADQRRVIVNNKMITVDKIQEIRKEVELQIKQRKSTHETHNILINSVIRETEECDEAERGEMHDGEENDFQENDSQENDTDNQSKRETLNHKYIGKQFADIFNRFKNTEPTSRLYIPKQKSSRKLALIVNTIDQHILPKYLGPEIDFRTLHTLIYVAAYTAAKCNGAKLCQNQIKQHIIEKPEWQKRLENKVNELRSYIGRLKEFINGNKSSKILAAVETIKTKYKIHAQYENQNIEPSHFLDTLKQKLNTTANRLRRYLNCTKRKTQNNQFYNNEKLFYKKLYLQPRESTLQTRIPTSEKLRQYWANIWENPIQHNSDINWTESCIKTGIPEMQFEQITKDTLIQVIKRTHNWKAPGTDHIHNYWYKKLTCTHSHLHKYINQFIEAPHLMPTFITQGKTYMVPKEGYTDDPEKYRPITCLQTIYKIITACISVNIYSHLNKHNILAEQQKGCRKLSQGCKEQLTIDAIAITQAFKGKKNIHSMYIDYKKAFDSVPHSWLLEILNQYKIHPHIRHFLQTSMANWQTVLNLNYNSTSLTTEPIRIQRGIFQGDALSPLWFCIALNPLSELLNRSNIGYKLTYNKTHYTLSHLMYMDDIKLYASSKENLFRLADLIERFSSDIRMQFGIDKCKILSVNRGRTIINNYTLRSGEIIDSLNEELGYKYLGFLQCRQINHKQIKSDIIKKFKHRLHQILKTELNSRNTFKAINTYAIPVITYSFGIVKWSQTDITRLQRIINTNLTKHRKHHPKSCTQRLTIPRREGGRGLIDLANLYHKQIDTLRRYFHSKADTSDLHKYVSDIDFKLTPLNLHDKNTQHNERIISTQEKVRVWAGKSLHGRHCADLMQSHVDKNASNAWLRYGQLFPETEAFMLAIQDQVINTSNYQKHIRKQNLHQSDLCRQCKSASETIQHITGACKILVQTDYKHRHDQISSIIHQHIAHTCKFITAKEPYYKYKPETVLENRTHKLYWDRTILTDKTIHYNRPDITLHDKIKNTVYLIDITVPNTHNLQSSISEKMAKYRDLAIEIKKQWQVQTVHIVPLVISSTGVIPKTLFNSLKILNINSNISYLLQKASILNTCRIVRKFLSITLRYRCHRLPSVS

SEQ ID NO: 2810 - protein, 830 aa, Ardaris eximia
MNCTKRKTQNNQFYSNEKLFYKKLCLLPKESELQTSVPTSEELRLYWANIWENPMQHNSDTNWTESCINIGIPEMQFEQITKDTLLQVINRTHNWKAPGTDHIHNYWYKKFTCTHSHLHKYINQFIETPHLMPTFITEGKTYMVPKEGYTNDPAKYRPITCLQTIYKIITACISVNIYSHLNKHNILAEQQKGCRQLSQGCKEQLTIDAIAMTQASKGKKNIHSMYIDYKKAFDSVPHSWLLEILKHYKIHPHIRHFLKTSMTKWQTVLNLNFNSTSLTTEPIRIQRGIFQGDALSPLWFCLALNPLSELLNRSNIGYKLTYNKTHYTLSHLMYMDDIKLYASSKENLFRLADLTEKFSSDIKMQFGIDKCKILSVNRGHLVKNNYTLQSGEIIDSVNEKFGYRYLGFSQCRQINHKRIKADIMEKFKFRLNQILKTELNSRNSFKAINTFAIPVLTYSFGIIKWSQTDLAKLQRIINTNLTKHRKHHPKSCTQRLTIPRREGGRGLIDLTNLYHKQIDTLRRYFHSKADTSELHKYVSDIDLNFTPLNLHDRNTQHNERITSSQEKIKAWAGKSLHGRHYADLMQAHVDKNASNAWLRYGQLFPETEAFMLAIQDQVINTSNYQKHITKQILHQNDLCRLCKSVSETIQHITGACKILVQTDYKHRHDQIASIIHQHIAHTSKFITTKEPYYKYKPETVLENRTYKLYWDRTILTDKTIHYNRPDITLHDKLKNTVYLIDIAVPNTHNLQSSISEKITKYRDLAIEIKKQWQVQTVHIVPIVISSTGIIPKTLFTSLKILNINPNTSYLLQKASILNTCRIVRKFLSIT

SEQ ID NO: 2811 - protein, 1094 aa, Passova gellias
MRNLKLTTHISEQRLADQRRAIIHNKMLTLDIIQNTRKEVELRLGEKEEHNTLNQTNSSQNENIEIEEIEDVAVHDRQEIEYQEEYTDCRTNKNCTRKDIEEKFTTFLNDFRNTEPISRPYIPKQKTSRKLAFIVHNINQHILPKYINPNIDFLTLHMLIYVAAYTTAICNGTKLVINRNTRKIRRKPAWEKRLESKVEELRSYIARMNEYISGNRSSKVLAAVQAVKQKYRKHAQFEDDNSNPSHYLDTLKQKLNTTANRLRRYRNCTNRKIQNTQFYNNEKNFYRNLSTHQKETETPIKVPTTNDLRQYWANIWETPVQHNLDTNTINSNDTTIPDMQFEEIPIDTLIQVIKRTHNWKAPGTDHIHNFWYKKLTCTHSHIHNHINQFIKTPNLMPKYVTQGKTYMIPKESYSQDPEKYRPITCLQTIYKIITACISEHIYTHLNKHNILTEQQKGCRKYSQGCKEQLTIDAITMTQACKRKKNIHTMFIDYKKAFDSVPHSWLLQVLNQYKIHPHIIHFLKITMNNWQTTLNLNYNSTSLTTEPIRIQRGIFQGDALSPLWFCLALNPLSELLNKTNLGYKLTFDRSHYKLSHLLYMDDIKLYASSKKELFHLVDLTEKFSNSIQMQFGIDKCKVFSINRGRVIDSKYTLQTGEMIDKMNEEVGYKYLGFYQSKQIHHKQIKTDITKRFKHRLNQILKTQLNSRNIFKAINTYAIPIITYSFGIIKWSQTDLTKLQRIINTSLTKYRKHHPKSCMQRLTIPRREGGRGLIDLSNLYRKQINTLRRYFHCKADTSQLHKYASEIDTKLTPLNLHNKNAEYNKQIVSSQEKENIWASKSLHGRHYTDLTQPHVDKNASNAWLRYGQLFPETEAFMLAIQDQVIGTANYQKHIIKNMLQQNDLCRQCRSAPETIQHITGACKTLVQTDYKHRHDQIASIIHQQLAHRYKFIANKEPYYKYKPESVLENKSYKLYWDRTILTDRTIHHNRPDITLHDKLNNTVYFIDIAVPNTHNLQNTISEKMIKYRNLAAEINKQWQVQKVHIVPIVISSTGVIPKGLFNSLKTLNISSYVSQILQKAAILNTCRVVRKFLNIP

SEQ ID NO: 2812 - protein, 1367 aa, Cephise aelius
MKKLRTQNTIKHFYNLRSISGAHKRQCNNEELSRQNLITRNVGSTMITHVETSARSSSSESLFPSLESSPRSYEDSIQNQPRSTTVSPMSVDVVQEANATRPVPTADNSKRKRRRWTEDMNKFIWRTYLVTTELGKHTRGYLDYLHSQFIQKYPEMDVSRQRLGDQCRAILRNKLLSQNVLDDIKNQVRTDIQSTASQTPTHHSQQHITQNLTGLTRMKWTDDINESIMSIYFEVTDIERDMTVYRKKLHERFIERFPHLQHISQQRLADQRRAIVYNKLLSTVKIQEIRRVIELKLRHSHNLNINNTQLKNNTQLSLPELTYSIDNELNAQQHSVNTFHTQIDLHVTSKEREEQEINPAGCMDHESSMCQYIEEEFLKGMKRFEKSNPTTRPYIPKQKSSRKFALIVHCINRHILPKHLTPEIPFDIMQTLIYTAAFTAAICNGTKIDKSTTKDPMRKPTWQRRLESKIARLRSDIGKLTQFIKGNKSRRVIDAFEVIKEKFKAHAQYEDLNYEPNQFLDTLKQKLNTSASRLRRYLNCTKRKNQNSQFSNNESKFYRNLVIDRDRTEVTNVPTLAALKKYWANIWEKPVKHNKDANWLQNLGNASEIPDMHFEEVTENVFKQVIKRTHNWKSPGTDHIHNYWYKKFTCLHPVIHKYINQFIQLPNTMPTYITEGRTYMLNKDAETGNPAKYRPITCLQTIYKIITACISESIYSHLKKYNILAEQQKGCRKDSHGCKEQLTIDAVVMKQAFQKKRNIHSMYIDYKKAFDSVPHSWLLHTLSYYKIHPQIIKFLETSMSSWQTVLNLTNKQQTITTEPIRIQRGIFQGDALSPLWFCLALNPLSELLNKSQAGFNLSYNNSKHILSHLMYMDDIKLYASSKKDLYKLADITQTFSKDIHMEFGIEKCKIHSVNKGRIQNTNYHLKTGEQIEAMDEQSTYKYLGFHQSNYIHQNIAKENLTKKFKFRLNRILKTQLNSRNLIKAINTFAIPILTYSFGIITWTQSDLKKLQRIINTTLSKHRKHHPKSCVQRLTVPRREGGRGLIDILNLHNNQVRVLRHFFHTKASTSDLHKYIVNIDSKFTPLNLHDRNIQPNEYLENFQNKLGIWAGKSLHGRHHADLSQIHVDRNESNAWLRRGELFPETEAFMIAIQDQVINTANYKKFITKELAHQSDLCRQCKGASETIQHITGACKALVQNDYKHRHDQIAAIIHQHLAHTYNFIQKKQPYYKYKPQTVLENKTQKLYWDRTILTDKTIHYNRPDITLHDKQKSIAYIIDIAIPNTHNLQSTISDKMIKYRDLAIELKTQWQVQTVHIIPIVLSSTGVIPKLLSKSLKLLNVHPQVSRTLQKAAILNTCRIVRKFLNIV

SEQ ID NO: 2813 - protein, 1368 aa, Pyrgus malvae
MRLRSRVIPQAGTREGESRPGPSGSGSPAYSGVGTASHLTAQTSVAVSKKPLSPTTGDFQTGSPTRTTSMESLFESLASTPRSYEGLSPTHSRSTTSSPRSVDVVQEAIATRLAPTTGAIKRKRRQWTAEMNKFIWHTYLVGTQLEKYTRGYLDYLYQEFSRKYPEMDASRQRLGDQCRAIVRNKFLDQTVLDDIRNQVRKQLQIIGSQTTENDLQIPNQTQSQSATTRMKWTDEINESIMKFYFESSKLEKDMTVYRKRMHEKFISHYPHLSHISEQRLADQRRVIVHNKMLNTDRIQEIRAEVQQMLEQIETKNDAPNITLHNTPQTEHTEITEAENEPTDDESQEWEGIDYCPGNRVHNKNKNEKYLKELDLNFVNNLESFRNTDPSSRPYIPKQKTSKKLASIVCSINQHILPKYLLPEIDFKTLHTLIYVAAYTAAKCNGAKLNLQKHNTRVRGKPAWHKRLENKVEELRAHIARLKEYINGNRGPKVLSSVEIVKKKYKLHAQHEDENVKPIHYLDTLKQKLNTTANRLRRYLNCTKRKRQNSQFYNNEKYFYRDLNTSQKQAEGTVATIPSVDRLRGYWADIWENPVQHNAEAEWISYNTTTISDMHFDEITLETLLQVISNTHNWKSPGTDHIHNYWYKKFTSTHTHLHKHINNFIKNPTSMPTFITHGKTYMVPKDGYTDDPTKYRPITCLQTIYKIITACISQHIYTHLDSNNILAEQQKGCKKFSQGCKEQLTIDAIAMTQAIRRRKSIHSMYIDYKKAFDSVPHSWLLHILDRYKIHPQITNFLNITMTNWKTVLNLNYSNTTITTDPICIRRGIFQGDALSPLWFCLALNPLSEMLNKTKMGYKLNYNRSHHTLSHLMYMDDIKLYASSKEQLFQLADVTQKFSNDIAMQFGIDKCKIHSVTRGHVQNTNYTLDSGELIESLNEEVGYKYLGFHQSKQIHHKQIKTDITKKFKHRLSQILKTELNSRNTFKAINTYAIPVLTYSFGIIKWSQTDLIKLQRIINTTLTKYRKHHPKSCIQRLTLPRRDGGRGLIDLTNLYHSQIDNLRKYFHSKADTSTLHKYATDIDTKFTPLNLHDKNLQHTKQTASIQEKNDAWARKALHGRHHADLRQPHVDKNASNAWLRYGQLFPETEAFMLAIQDQVINTANYKKHIIKKNVLQSDLCRQCKSSSETIQHITGACKTLVQTDYKHRHDQIASIIHQHLAHAYKFIRNKEPYYKYKPEVVLENKTHKLYWDRTILTDRTIHYNRPDITLHDKPNSTVYFIDIAVPNTHNLLSTITEKTSKYRELAIEIKKQWEVKTVHIVPIVISSTGVIPNALFNSLKTLHMNSNLSVILQKASILNTCRIVRKFLNAT

SEQ ID NO: 2814 - protein, 797 aa, Quadrus cerialis
MRDTPTSNDLRNYWASIWEEPMEHNKEAAWLNNSYGNFDIEMPFEEISETVLIQIINRTHNWKSPGTDQIHNYWYKKLTSIHPYIHKHINQFIHSPHTMPLFITHGKTYMLPKDSDTKNPANYRPITCLQTIYKIITACLSQLIYSHLNKYNILAEQQKGCRKQSQGCKEQLTIDSVAMSQAFKQKRNIYTMYIDYKKAFDSIPHSWLIETLNIYKIHPIIITFLKASMQNWQTVLNLNHDNTVLTTEPINIKRGIFQGDALSPLWFCLALNPLSELLNKSKNGYKVTYNRSHCTLSHLMYMDDIKLYGSNKKELFELADITEQFSNDIQMKFGIDKCKIHSVQRGKIQNTTYTLRSGESIECMNSQIAYKYLGFNQSNKIHHKQAKCNLIHQFKYRLNKILKTKLNSRNTIKAINTYAIPVLSYSFGVIKWSQSDLLKLQRIIHTNLTKHRKHHPKSCIQRLTLPRKEGGRGLIDVTNLHNRQIQTLRRYFHSKADSSELHKYISNSDNKFTPLNLHDVIRQRNEHVINSEEKLDTWAIKSLHGRHYADLNQPHVDKDESNAWLRNGQLFPETEAFMMAIQDQVINTANYRKHITKEIASGSDLCRHCKSSSETIQHITGACKMLVQTDYKHRHDQVASIIHQHLAHSYNFVNRKQPYYKYKPQTVLENKTHKLYWDRTILTDRTIHYNRPDITVHDKRNETVYLIDVAVPNTHNLQSTITEKMTKYRDLAIEIKKQWQVQTVHIVPIVISSTGVVPISLKRNLNTLHIRTHISHTLQKASILNTCRIVRKFLNIE

SEQ ID NO: 2815 - protein, 1326 aa, Azonax typhaon
MTAQCHTAAVNKTVNRSSPTTSSHGLYLSSSSVESLFNSPESSPRSYEEPSSRYSPSTSVTSVDVVQEAVATHPAPTTGTLERKRRRWTQEMNEFIWRTYLIATTLEKSTRGYLNQLHREFTYKYPDMDASRQRLGDQCRAIIRNKLLNQTTLDSIRSQVTKQLQATSQQIHLQHSQILQHTHTSSNVTRMQWTDEINETVLRFYFEATNIEKDMTAYRKKMHEKFKAHYPHLSHITEQRLADQRRVIIHNKMIPLGRVQEIRRETELRVRETEKSYETHNISDSNTLQEQNLEIKEVENDVIQDSQGIGCQEENADSRRRNEDFTIRDIQEQFRKILDEFKNTKPISRPYIPKQKTSRKLATIVNNINQHILPKYLLPDIDFCTLHTLIYVAAYTSAKCNDTKLGLNKNVHQIRKTPAWQKRLESKVEELRVHIGRLKEYIKGNRNTKVLATVQAIKKKYRIHAQFEHENSDPSHYLDTLKQKLNATANRLRRYRNCTKRKIQNNQFYNNEKTFYRNLSTHQKATDETTRIPTTNELRQYWANIWEKPVNHNPDTNSTELNCNQVTIPDMEFEEISIHSLTQIIKRTHNWKAPGTDHIHNYWYKKFTCTHSLLHKYINQFIKTPGLMPKYITHGKTYMVPKESYTPDPTKYRPITCLQTIYKIITACISEHIYTHLNKYNILAEQQKGCRKLSQGCKEQLTIDAIAMTQAYRRRKNIHTMYIDYKKAFDSVPHSWLLQVLSQYKIHPHIIHFLQMSMQNWQTTLNLNYNSTSLTTEPIRIQRGIFQGDALSPLWFCLALNPLSELLNKTNVGYKLTLNKSHHTLSHLLYMDDIKLYASSKEELFHLADLTERFSNDIRMQFGIDKCKVQSINRGRAINTNYTLQTGEIIDVMNEEIGYKYLGFHQSKQIHHKQIKSDITKKFRHRLNQILKTELNSRNIFKAINTFAVPVLTYSFGVIKWSQTDLAKLQRIVNTTLTKHRKHHPKSCIQRLTLPRHEGGRGLIDLTNLYHKQINTLRSYFHCKAETSQLHKYASDIDIKLTPLNLHDRTTEHNEQHVTLQEKREIWASKSLHGRHYSDLTQPHVDKNASNAWLRYGQLFPETEAFMLAIQDQVISTANYRKHITKEISQQSDLCRQCKSAPETIQHITGACKTLVQTDYKHRHDQIASIIHQHLAHSCKFITRKEPYYKYKPETVLENRAYKLYWDRTILTDRTIHHNRPDITIHNKLTNTVYFIDIAVPNTHNLNSTISEKKMKYRDLATEIKKQWQAQTVHIVPIVISSTGVIPKELFNSLKTINISSHTSVMLQKASILNTCRIVRKFLNIP

SEQ ID NO: 2816 - protein, 1217 aa, Ardaris sela
MQNMNPKNIKYNLRSLSQAKSVTKNVQTSVTDDTQSNPFTRTSSPDSLFESLVSSPRSYEQPSPTCSLSISSSPSSVDVVQQATASYPAPTTETRKKRRQWTKDMNECIWRAYLIGTELGKRTRGYLDYLYKDFNQKYPEMGASKQRLGDQCRAILSKKLLNETTLTDIRKQVAKQFQTTDFDLTQTQHQTQNKSGTTRMKWTDEINETILRIYFETTNMEKDMIAYRKKLHDKFKAQYPHLSHITEQRLADQRRVIINNKMITDEKFQEIREEVELHLKQTEMSHETQNTVINSERRENKGIDEVKRAEVHNDEEYYFHGNDINNLRKDETLIRKHVEKQFADIFHNLKNTEPTSRPYIPKQKSSRKLALIVNTIDQHILSKYLDPEVDFHTLHTLIYAAAYTAAKCNGAKLSQNHYKQTISKKPQWQKRLENKVKELRAYIGRLKEFTNGNRSSKILAAVETIRTKYKIHAQYENQNIEPSHFLDTLKQKLNTTANRLRRYMNCTKRKTQNNQFYSNEKLFYKKLCLLPKESELQTSVPTSEELRLYWANIWENPMQHNSDTNWTESCINIGIPEMQFEQITKDTLLQVINRTHNWKAPGTDHIHNYWYKKFTCTHSHLHKYINQFIETPRLMPTFITEGKTYMVPKEGYTNDPAKYRPITCLQTIYKIITACISVNIYSHLNKHNILAEQQKGCRQLSQGCKEQLTIDAIAMTQASKGKKNIHSMYIDYKKAFDSVPHSWLLEILNHYKIHPHIRHFLKTSMTNWQTVLNLNYNSTSLTTEPIRIQRGIFQGDALSPLWFCLALNPLSELLNRSNIGYKLTYNKTHYTLSHLMYMDDIKLYASSKENLFRLADLTEKFSSDIKMQFGIDKCKILSVNRGHLVKNNYALQSGEIIDSVNEKFGYRYLGFSQCKQINHKQIKADIMKKFKFRLNQILKTELNSRNSFKAINTFAIPVLTYSFGIIKWSQTDLAKLQRIINTNLTKHRKHHPKSCTQRLTIPRREGGRGLIDLTNLYHKQIDTLRRYFHSKADTSELHKYVSDIDVNFTPLNLHDRNTQHNERITSSQEKIKAWAGKSLHGRHYADLMQAHVDKNASNAWLRYGQLFPETEAFMLAIQDQVINTSNYQKHITKQILHQNDMCRQCKSASETIQHITGACKILVQTDYKHRHDQIASIIHQHIAHTSKFITTKEPYYKYKPETVLENRTTNFIGIEQF

SEQ ID NO: 2817 - protein, 1357 aa, Muschampia baetica
MEKTKTKTFNYNLRSLSRTRSGMRSMQTDNDRSKIDAIADRQNSSSTRTSCSETTLDSLASSPRSYEELSITSSRSTTLSPIVSVDVVQEATATQLVPTTGTSKNKRRKWSEDMNKFIWRTYLFTTKLGTNTHGYLDSLHYDFTRKYPEMNATRQRLGDQCRAIVRNKLLHESILNDIRNQVTKQLELENCQTPNKYTHVHQQENLSATIRMKWTKEINETIVRCYYESSNLEKDMTGYRKKMHDKFIAQYPHLSHISEQRLADQRRAIVNNKMLTMDRIKEIRKEVESLTTLTQTEESNNLIDLTEELLEREDAVAEEEIWEISDIVHEPTLQICSLDNENKDHTESRKKGKNSENTSRKYVEEQFIEVLGEFKNTDPVCRPFIPKQKQTRKLALIVHDINQHVLPKYLSPDTDFSTLHTLIYVAAYTAAKCNSTRFDTGLYEQKVKKKPKWQARLEEKINKLRSYIARLTEFIKGNRNKKILVAVQEIKKNYKKHAKHEDENNEPNQYLDTLKQQLNATANRLRRFLNCTRRKKQNAQFYNNEKNFYRSLNREQKLGKSIEKLPTSEELRQYWANIWENPVQHNTSANWIKNSLDTTSAMVFEKVNIDVLIHVIKRTHNWKSPGTDHIHNYWYKKLTCTHPHIHNHINQFIRSPHLLPTFVTHGKTHMIPKQGYTDNPANYRPITCLQTIYKIITACISEYIYTHLNKHNILAEQQKGCRKYSQGCKEQLTIDAIAMTQAFRRKKNIHTMYVDYRKAFDSVPHSWLLYILKQYQIHPSFINFLEISMTNWQTVLNLNHNNISLTTESIRIQRGIFQGDALSPLWFCLALNPLSEILNNSEAGYKLTHNNTHYTLTHLMYMDDIKLYASGEQDLFRLVDLTERFSTDIQMQFGIDKCKIQSVNRGHIQNTEYTLQNGELIESLQEEVGYKYLGFYQSRQIHHKQIKLDITQKFKNRLNKLLKTELNSRNLMKAINTYAIPVITYSFGIIKWSQTDLSKLQRIINTSLTRYRKHHPKSCLQRLTIPRREGGRGLIDLTNLYHKQLHALRQYFHSKSDMSQLHKYVTYIDNKYTPLNLHNKNIEHNHKIVTSQEKMKTWASKSLHGRHYADLEQSHVDKCASNAWLKQGYLFPETEAFIMAIQDQVINTANYKKYITKELSQQSDLCRQCKCSPETIQHITGACKILVQSDYKHRHDQIASIVHQHLAHLTNFIPNKQPYYKYKPETVLENKGHRLYWDRTILTDRTIHYNRPDITLHDKLNQVAYLIDIAVPNTHNLQSAFNEKMVKYRDLAVEIKKQWQVQTVHIVPIVISSTGVVPKTLFNSFKILNINSNISNLLQKASILNTCRIVRKFLNTY

SEQ ID NO: 2818 - protein, 1355 aa, Muschampia leuzeae
MEKTNTFSYNLRSLSRTRSGMRSMQTDNDRSKIDAIAGRRNSSSTRTSSSETTLDSLASSPRSYEELSITRSRSTTLSPIVSVDVVQEATATQLVPTAGTSKNKRRKWSENMNKFIWRTYLVTTKLGTNTHGYLDSLHYDFTRKYPEMNATRQRLGDQCRAIVRNKLLHESILNDIRNQVIKQLELEDCQTPNEYTHVHQHENLSATIRMKWTKEVNETIIRYYYESSNLEKDMTGYRKKMHDKFIAQYPHLSHISEQRLADQRRAIVNNKMLTMDRIEEIRREVESLKSLTQTEVSKNLLNITEELLEREDAVTEEEILNIVNGSTSQICSLDNENKNKNKGDIESRNKSKNSENTSRKYVEERFIEVLGEFKNTDPVCRPFIPKQKQTRKLALIVHDINQYVLPKYLFPDTDFSTLHTLIYVAAYTAAKCNNTSFDTGTYEQKLKKKPKWQARLEEKINKLRSYIARLTEFIKGNRNKKILVAVQEIKKNYKKHAQHEDENNEPNQYLDTLKQQLNATANRLRRFLNCTRRKKQNAQFYNSEKNFYRSLNREQKLESKEKLPTSEELRQYWANIWETPVQHNTPANWIKNSLDTTSAMDFEKVNIDVLSHVIKRTHNWKSPGTDHIHNYWYKKLTCTHPHIHNHINQFIQSPHLLPTFVTHGKTYMIPKQSYTDKPANYRPITCLQTIYKIITACISEYIYTHLNKHNILAEEQKGCRKYSQGCKEQLTIDAIAMTQAFRRKKNIHSMYVDYRKAFDSVPHSWLLHILKQYQIHPSLINFLEISMTNWQTVLNLSHNNTILTTKSIRIQRGIFQGDALSPLWFCLALNPLSEILNKSEAGYKLTHSNTHYTLTHLMYMDDIKLYASSEQDLFRLADLTERFSTDIQMQFGIDKCKIQSVNKGHIQNTEYTLQNGEIIESLQEEVGYKYLGFYQSRQIHHKEIKLDITQKFKNRLNKLLKTELNSRNLMKAINTYAIPVISYSFGIIKWSQTDLAKLQRIINTSLTRYRKHHPKSCLQRLTISRREGGRGLIDLTNLYHKQLHALRQYFHSKSDMTQLHKHVTNIDNKYTPLNLHNKNIEHNDNIVTSQEKMKTWASKSLHGRHYADLEQPHVDKCASNAWLKQGYLFPETEAFIMAIQDQVINTANYKKYITKELSQQSDLCRQCKCSPETIQHITGACKILVQSDYKHRHDQIASIVHQHLAHLTNFIPNKQPYYKYKPETVLENKRHRLYWDRTILTDRTIHYNRPDITLHDKFNQVAYLIDIAVPNTHNLQSAFNDKIVKYRDLAVEIKKQWQVQSVHIVPIVISSTGVVPKTLFNSFKILKIHPNISNLLQKASILNTCRIVRKFLNTY

SEQ ID NO: 2819 - protein, 756 aa, Pyrrhopyge sergius
MQFEQITKDTLIQVIKRTHNWKAPGTDHIHNYWYKKLTCTHSHLHKHINQFIEAPHLMPTFITQGKTYMVPKEGYTDDPEKYRPITCLQTIYKIITACISVNIYSHLNKHNILAEQQKGCRQLSQGCKEQLTIDAIAITQAFKGKKNIHSMYIDYKKAFDSVPHSWLLEILNQYKIHPHIRHFLQTSMANWQTVLNLNYNSTSLTTEPIRIQRGIFQGDALSPLWFCIALNPLSELLNRSNIGYKLTYNKTHYTLSHLMYMDDIKLYASSKENLFRLADLIERFSSDIRMQFGIDKCKILSVNRGRTIKNNYTLRSGEIIDSLNEELGYKYLGFLQCRQINHKQIKSDIIKKFKHRLHQILKTELNSRNTFKAINTYAIPVITYSFGIVKWSQTDITRLQRIINTNLTKHRKHHPKSCTQRLTIPRREGGRGLIDLANLYHKQIDTLRRYFHSKADTSDLHKYVSDIDFKLTPLNLHDKNTQHNERIISTQEKVRVWAGKSLHGRHCADLMQSHVDKNASNAWLRYGQLFPETEAFMLAIQDQVINTSNYQKHIRKQNLHQSDLCRQCKSASETIQHITGACKILVQTDYKHRHDQISSIIHQHIAHTCKFITAKEPYYKYKPETVLENRTHKLYWDRTILTDKTIHYNRPDITLHDKIKNTVYLIDIAVPNTHNLQSSISEKMAKYRDLAIEIKKQWQVQTVHIVPLVISSTGVIPKTLFNSLKILNINSNISYLLQKASILNTCRIVRKFLSIT

SEQ ID NO: 2820 - protein, 1379 aa, Myscelus epimachia
MRLRNRVLPQAGTREGESRPGPSGSGSPAYSGGGNVSHMTAQSHTVAVDKTPADIISHPSSPTISSHSSHQSLDSAESLFESFDSSPCSYEDPSPESSRSTPARAVDVVQEATAIHPAPTTGTIKTRRRKWTQDMNEFLWRTYLTKTALGTRIRGYLDHLYQEFTQKYPDMNASRQRLGDQCRAIIRNKLLNQTTLDNIKSQVMKQIQETDEQIPHHHHSQNTQNSFGMTRIQWSDDINQTILRFYFESTDVERDMTAYRKKMHDKFKAHYPHLSHISEQRLADQRRAIIHNKMLTLDIIQNIRKEVELRLGQKETSHETHNTLNQPYHTLHETHNTLNQLYHTLQNENIEIEEIEDVAVHDREEIECEEKYTDCRTNKNFTRKDIEEKFTITLDKFKNTEPVSRPYIPKQKTSRKLAFIVHNINQHILPKYLHTDIDFLTLHMLIYVAAYTTAICNGTKLENNRNIQKNRRKPAWEKRLESKVEELRSYIARLTEYINGNRNSKILAAVQAVKQKYRIHAQFEDENSDPSHYLDTLKQKLNATANRLRRYRNCTKRKIQNTQFYNNEKNFYRNLSTHQKETETTIKIPTSNDLRQYWANIWENPVQHNPDTNTTNSNNTTTPDMQFEQITMDTLIHVIKRTHNWKAPGTDHIHNFWYKKLTCTHSHIHKHINQFIKTPNLMPKYVTHGKTYMVPKESYSQDPEKYRPITCLQTIYKIITACINEHIYTYLNEHNILTEQQKGCRKYSQGCKEQLTIDAITMTQAYKRKKNIHTMYIDYKKAFDSVPHSWLLQVLNQYKIHPHIIHFLKTTMNNWQTTLNLNYNNTSLTTEPIRIRRGIFQGDALSPLWFCLALNPLSELLNKTSLGYNLTFDRSHYKLSHLLYMDDIKLYASSKKELFHLVDLTEKFSNSIQMHFGIDKCKVFSINRGRVIDSKYTLHTGEIIDKINEEVGYKYLGFYQSKQIHHKQIKTDITKRFKHRINQILKTQLNSRNIFKAINTFAIPVLTYSFGVIKWSQTDLTKLQRIINTSLRKHRKHHPKSCIQRLTIPRREGGRGLIDLTNLYRKQINTLRRYFHCKADTSQLHKYASDIDTKFTPLNLHNRNAEHNQQIISSQEKENIWASKSLHGRHYSDLTQPHVDKNASNAWLRYGQLFPETEAFMLAIQDQVMGTANYQKHIIKKMFQQNDVCRHCRSAPETIQHITGACKTLVQTDYKHRHDQIASIIHQQLAHAYKFIANKEPYYKYKPESVLENKSYKLYWDRTILTDRTIHHNRPDITLYDKLNNTVYFIDIAVPNTHNLQNTISEKMIKYRDLATEINKQWQVQKVHIVPIVISSTGVIPKGLFNSLKMLNISSYISRILQKAAILNTCRIVRKFLNI

SEQ ID NO: 2821 - protein, 1338 aa, Pyrrhopyge pelota
MQNTNTKNVKYNLRSLSQAKSVKRSIRTSVTDDVQSSSLTRTSSPESLFESVASSPLSYEQPSPTCSLSITSSPSSVDVVQEAIATYPAPITETTRKRRQWTKDMNECIWRAYLIGTELGKRTRGYLDYLYKEFNEKYPEMCASKQRLGDQCRAILRKKLLNENTLADIRQQVIKQLQTINFEQTQIQHQTQNKSGTTRMKWTDDINETILRLYFEITNIEKDMVAYRKKLHDKFTTHYPHLSHITEQRLADQRRVIVNNKMITVDKIQEIRKEVELQIKQTKSTHETHNILINSVIRETEEYDEAERGEMHDGEENDFQENYFQENDTDNQSKHETLNHKHIGKQFADIFNRFKNTEPTSRLYIPKQKSSRKLALIVNTIDQYILPKYLGPEIDFRTLHTLIYVAAYTAAKCNGAKLCQNQIKQHINKKPEWQKRLENKVNELRSYIGRLKEFINGNKSSKILAAVETIKTKYKIHAQYENQNIEPNHFLDTLKQKLNTTANRLRRYLNCTKRKTQNNQFYNNEKLFYKKLYLQPRESKLQTRIPTSEKLRQYWANIWENPIQHNSDVNWTESCIKTSIPDMQFEQITKDTLIQVIKRTHNWKAPGTDHIHNYWYKKLTCTHSHLHKHINQFIEAPHLMPTFITQGKTYMVPKEGYTDDPEKYRPITCLQTIYKIITACISVNIYSHLNKHNILAEQQKGCRQLSQGCKEQLTIDAIAITQAFKGKKNIHSMYIDYKKAFDSVPHSWLLEILNQYKIHPHIRHFLQTSMANWQTVLNLNYNSTSLTTEPIRIQRGIFQGDALSPLWFCIALNPLSELLNRSNIGYKLTYNKTHYTLSHLMYMDDIKLYASSKENLFRLADLVERFSSDIRMQFGIDKCKILSVNRGRTIINNYTLRSGEIIDSLNEELGYKYLGFLQYRQINHKQIKSDIIKKFKHRLHQILKTELNSRNTFKAINTYAIPVITYSFGIVKWSQTDITRLQRIINTNLTKHRKHHPKSCTQRLTIPRREGGRGLIDLANLYHKQIDTLRRYFHSKADTSDLHKYVSDIDFKLTPLNLHDKNTQHNERIISSQEKVRVWAGKSLHGRHCTDLMQSHVDKNASNAWLRYGQLFPETEAFMLAIQDQVINTSNYQKHIRKQNLHQSDLCRQCKSASETIQHITGACKILVQTDYKHRHDQISSIIHQHIAHTCKFITAKEPYYKYKPETVLENRTHKLYWDRTILTDKTIHYNRPDITLHDKIKNTVYLIDIAVPNTHNLQSSISEKMAKYRDLAIEIKKQWQVQTVHIVPLVISSTGVIPRTLFNSLKILNINSNISYLLQKASILNTCRIVRKFLSIT

SEQ ID NO: 2822 - protein, 1357 aa, Muschampia tessellum
MEKTKTKTFSYNLRSLSRTRSGMQSMQTDNDRSKIDAIADRQNSSSTRTSCSETTLDSLASSPRSYEQLSITSSRSTTLSPIVSVDVVQEATATQLVPTTGTSKNKRRKWSEDMNKFIWRTYLYTTKLGTNTHGYLDSLHYDFTRKYPEMNATRQRLGDQCRAIVRNKLLHESILNDIRNQVTKQLEVENCQTPNKYTHLHQQENLSATIRMKWTKEINETIVRCYYESSNLEKDMTGYRKKMHDKFIAQYPHLSHISEQRLADQRRAIVNNKMLTMDRIKEIRKEVESLKTLTQTEISNNLLDITEELLEREDAEAEEEIWEISDIVHEPTLQNCSLDNENKDHTESTKKSKNSENTSRKYVEEQFIEVLGEFKNTDPVCRPFIPKQKQTRKLALIVHDINQHVLPKYLSPDTDFSTLHTLIYVAAYTAAKCNGTRFDTGLYEKKVKKKPKWQARLEQKINKLRSYIARLMEFIKGNRNKKILVAVQEIKKNYKKHAKHEDENNEPNQYLDTLKQQLNATANRLRRFLNCTRRKKQNAQFYNNEKNFYRSLNREQKLGESIEKLPTSEELRQYWANIWENPVQHNTSANWIKNSLDTTSAMVFEKVNIDVLIHVIKRTHNWKSPGTDHIHNYWYKKLTCTHPHIHNHINQFIRSPHLLPTFVTHGKTHMIPKQGYTDNPANYRPITCLQTIYKIITACISHYIYTHLNKHNILAEQQKGCRKYSQGCKEQLTIDAIAMTQAFRRKKNIHTMYVDYRKAFDSVPHSWLLYILKQYQIHPSLIIFLEISMTNWQTVLNLNHNNISLITESIRIQRGIFQGDALSPLWFCLALNPLSEILNKSEAGYKLTHSNTHYTLTHLMYMDDIKLYASSEQDLFRLADLTERFSTDIQMQFGIDKCKIQSVNRGHIQNTKYTLQNGELIESLQEEVGYKYLGFYQSRQIHHKQIKLDITQKFKNRLNKLLKTELNSRNLMKAINTYAIPVVTYSFGIIKWSQTDLSKLQRIINTSLTRYRKHHPKSCLQRLTIPRHEGGRGLIDLTNLYHKQLHALRQYFHSKSDMSQLHKYVTNIDNKYTPLNLHNKNIEHNDKIVTSQEKMKTWASKSLHGRHYADLEQSHVDKCASNAWLKQGYLFPETEAFIMAIQDQVINTANYKKYITKELSQQSDLCRQCKCSPETIQHITGACKILVQSDYKHRHDQIASIVHQHLAHLTNFIPNKQPYYKYKPETVLENKGHRLYWDRTILTDRTIHYNRPDITLHDKLNQVAYLIDIAVPNTHNLQSAFNEKMVKYRDLAVEIKKQWQVQTVHIVPIVISSTGVVPKTLFNSFKILNINSNISNLLQKASILNTCRIVRKFLNTY

SEQ ID NO: 2823 - protein, 1199 aa, Myscelus amystis
MNEFLWRTYLTKTVLETRIRGYLDHLHQEFTQKYPDMNASRQRLGDQCRAIIRNKLLSQNTLDNIRNQVMKQLQETDQQTPHNQHSHNPNQTQNSSRTTRIKWTDDINQNILRFYFESTDVERDMTAYRKKMHEKFKAHYPQLSHISEQRLADQRRVIVHNKMLTFDIIQNIRKEVELRLGEKETSHETRNTLNHPFHTNTLQNENIQSEETEDTAVYDREQIECQEEYTDCRTNKKCTRKDIEETFTTILDEFKNTEPISRPYIPKQKTSRKLAFIIHNINQHILPQHLHPDIDFFTLHMLIYVAAYTTAICNGTKLEMNRDMQKHRKKPAWEKRLESKVEALRSYIARMNEYLSGNRNSKILAAVQSVKQKYRIHAQFEDENSDPSHYLDTLKQKLNSTANRLRRYRNCTKRKIQNTQFYNNEKNFYRNLSTHQKETNTTIEIPTTNDLRQYWGNIWENPVQHKVDSNITNSNNTSIPDMQFEEITIDTLIQVIKSTHNWKSPGTDHIHNFWYKKLTCTHSHMHKHINQFIKTPDLMPKYITHGKTYMVPKDNYSQNPEKYRPITCLQTIYKIITACISEHIYTHLNKHNILTEQQKGCRKYSQGCKEQLTIDAITMTQAYKRKKNIHTMYIDYKKAFDSVPHSWLLQVLNQYKIHPHIIHFLKISMNNWQTTLNLNYNNTSLTTEPIRIQRGIFQGDALSPLWFCLALNPLSELLNKTNLGYKLTFDRSHYKLSHLLYMDDIKLYASSKKELFHLADLTEKFSNNIQMQFGIDKCKVFSINRGRVINSKYTMQTGEIIDNMNEKAGYKYLGFNQSKQIHHKQIKTDIVKRFKHRLNQIFKTQLNSRNMFKAINTFAIPIITYSFGVIKWSQTDLTKLQRIINTSLTKHRKHHPKSCIQRLTIPRREGGRGLIDLTNLYRKQINTLRTYFHSKADTSQLHKYASNVDIKFTPLNLHNRNAEHNKQIISSQEKENIWASKSLHGRHYTDLTQPHVDKTASNAWLRYGQLFPETEAFMLAIQDQVIGTANYQKYIMKKALQQNDLCRQCKSAPETIQHITGACKTIVQTDYKHRHDQIASIIHQQLAHTYKFIANKEPYYKYKPASVLENKSCKLYWDRTILTDRTIHHNRPDITLHDKRNNTVYFVDIAIPNTHNLQSTTSEKLIKYRDLATEINKQWQVKKVHIVPIIISSTGVIPK

SEQ ID NO: 2824 - protein, 1369 aa, Udranomia kikkawai
MRAKPRAQLVRGWTLYFPSCIRGSWWAVYEMSTINPKKNRYNLRSLSRAASARSLQISVGPNQVIATNADPQTCTPVHSSNESLFESLPSSPRSYEEPIRSSSSSSSLSPRSVDVVQVATASHPVPTTGTTRSKRRKWTEEMNKYIWRTYLIATDLEKNTKGYLSYIHEEFTKVYPEMEISRQRLGDQCRAIVRNKLLKESILNDIRHQVATEHLPLKTHNSTPNLTQHTSRMKWSNEINETIMRLYYESTDLEQDITAYRRKMHIKFIAQYPHLSFITEQRLADQRRVIVRNRMISVERIQEIRKEVELELKHAETMCTTHNALHPIEVNEESNIEKVNESSQLNESNESSNFGNPNESVVNNTIVHDKNVNLNDVENKFNILLDQFKDTDPTSRPYIPKQKVSRKLASLIYTINHHILPKYLISGIDFNTLHTLIYVAAYTIASCNNTVSEYLQFRRHKTKPAWQIRLESRVKELRSHIARLIQYIKGNRSPKVIRAVDLIRQKYKLHAQFECENNEPNLFLDTLKQKLNTTANRLRRYLNCTKRKAQNAQFNNNEKYFYRKLTESEQNKHTRLPAQDILREYWANLWENSVTHNSNASWLKNLNDTHISAMSFEQITENELVQIINRTHNWKAPGTDQIHNYWYKKLTCTHPYIHIHINKFIQAPETMPSFITHGKTYMLPKDTDTENPAKYRPITCLQTIYKIITACISASISSHLNSYNLLAEQQKGCRKYSQGCKEQLTIDAIVMTQAHRKKKNIHSMYIDYRKAFDSVPHSWLLETLHYYKIHPLLINFLGTAMQNWQTVLNLNIKNTSLTTEPIRIRRGIFQGDALSPLWFCMALNPLSELLNKSGNGYKLSLNGSSCNLSHLMYMDDIKLYGSTKEELSRLANLTEIFSCDIKMQFGIDKCKIHSINRGRTCDTNYTLQTGETIETINKQVGYKYLGFHQSNQIHHKETKANLIKHFRHRLNQILKTQLNSRNTVKAINTYAIPVLTYSFGVIKWSQSELTKLQRIINTTLTKHRKHHPKSCIQRLTLPRREGGRGLIDLTNLHNTQIHTLRRYFHSKSETSELHRYITKTDTKFSPLNLCDRTTQSNETITHSKEKLNAWANKTLHGRHLADLNQPHVDRKESNSWLRYGQLFPETEAFMMAIQDQVITTANYRKHITKETLHQSDLCRHCKSASETIQHITGACKALVQTDYKHRHDQIASIIHQHLAHYYKFISTKEPYYKYKPQVVLENKVQKLYWDRTILTDRTVYYNRPDITVHNKENNTVYLIDIAVPNTHNIQSTISEKLSKYRDLAVEIRKQWNVQTVHIVPIVISSTGVIPKTLIGSLKTLNIPPRILHTLQKASILNTCRIVRKFLNMD

SEQ ID NO: 2825 - protein, 1158 aa, Pyrrhopyge papius
MPQMNHFKQTQIQHQTQNKSGTTRMKWTDDINETILRLYFEITSMEKDMVAYRKKLHDKFTTHYPHLSHITEQRLADQRRVIVNNKMITVDKIQEIRKEVELQIKQTKSTHETHNILINSVIRETEEYDEAERGEMHDGEENDFQENDFQENDTDNQSKRETLNHKHIGKQFADIFNRFKNTEPTSRLYIPKQKSSRKLALIVNTIDQHILPKYLGPEIDFRTLHTLIYVAAYTAAKCNGAKLCQNQIKQHINKKPEWQKRLENKVNELRSYIGRLKEFINGNKSSKVLAAVETIKTKYKIHAQYENQNIEPSHFLDTLKQKLNTTANRLRRYLNCTKRKTQNNQFYNNEKLFYKKLYIQPRESKLHTRIPTSEKLRQYWANIWENPIQHNSDLNWTESCIKTGILDMQFEQITKDTLIQVIKRTHNWKAPGTDHIHNYWYKKLTCTHSHLHKHINQFIEAPHLMPTFITQGKTYMVPKEGYTDDPEKYRPITCLQTIYKIITACISVNIYSHLNKHNILAEQQKGCRQLSQGCKEQLTIDAIAITQAFKGKKNIHSMFIDYKKAFDSVPHSWLLEILNQYKIHPHIRHFLQTSMANWQTVLSLNYNSTSLTTEPIRIQRGIFQGDALSPLWFCIALNPLSELLNRSNIGYKLTYNKTHYTLSHLMYMDDIKLYAFSKENLFRLADLIERFSSDIRMQFGIDKCKILSVNRGRTIINNYTLRSGEIIDSLNEELGYKYLGFLQCRQINHKQIKSDIIKKFKHRLHQILKTELNSRNTFKAINTYAIPVITYSFGIVKWSQTDITRLQRIINTNLTKHRKHHPKSCTQRLTIPRREGGRGLIDLANLYHKQIDTLRRYFHSKADTSDLHKYVSDIDLKLTPLNLHDKNTQHNERIISSQEKVRVWAGKSLHGRHCADLMQSHVDKNASNAWLRYGQLFPETEAFMLAIQDQVINTSNYQKHIRKQNLHQSDLCRQCKSASETIQHITGACKILVQTDYKHRHDQISSIIHQHIAHTCKFITAKEPYYKYKPETVLENRTHKLYWDRTILTDKTIHYNRPDITLHDKIKNTVYLIDIAVPNTHNLQSSISEKMAKYRDLAIAIKKQWQVQTVHIVPLVISSTGVIPKTLFNSLKILNINSNISYLLQKASILNTCRINST

SEQ ID NO: 2826 - protein, 1351 aa, Agara michaeli
MRLRNRVLPQAGTREGESRPGPSGSGSPAYSGGGNVSHMTAQSHTVAVDKTPADIISHPSSPTISSHSLYQSLDSTESLFESFDSSPCSYEDPSSESSRLTPVRAVDVVQEATAIHPAPTTGTIKTRRRKWTQDMNEFLWRTYLTKTALGTRIRGYLDHLYQEFTQKYPDMDASRQRLGDQCRAIIRNKLLNQTTLDNIKSQVMKQIQETDEQIPHHHHSQNTQNSFGMTRIQWSDDINQTILRFYFESTDVERDMTAYRKKMHDKFKAYYPHLSHISEQRLADQRRAIIHNKMLTLDIIQNIRKEVELRLGQKETSHETHNTLNQPTLQNENIEIEEVEDVAVHDREEIECEEKYIDCRTNKNFTRKDIEEKFTITLGKFKNTEPVSRPYIPKQKTSRKLAFIVHNINQHILPKYLHTDIDFLTLHMLIYVAAYTTAICNGTKLENNRNIQKIRRKPAWEKRLESKVEELRSYIARWNEYINGNRNSKILAAVQAVKQKYRIHAQFEDENSDPSHYLDTLKQKLNATANRLRRYRNCTKRKIQNTQFYNNEKNFYRNLSTHQKETETTIKIPTANDLRQYWANIWENPVQHNPDTNNTNSNNTTTPDMQFEQITMDTLIQVIKRTHNWKAPGTDHIHNFWYKKFTCTHSHIHKHINQFIKTPNLMPKYVTHGKTYMVPKESYSQDPEKYRPITCLQTIYKIITACINEHIYTYLNEHNILTEQQKGCRKYSQGCKEQLTIDAITMTQAYKRKKNIHTMYIDYKKAFDSVPHSWLLQVLNQYKIHPHIIHFLKTTMNNWQTTLNLNYNSTSLTTEPIRIRRGIFQGDALSPLWFCLALNPLSELLNKTSLGYNLTFDRSHYKLSHLLYMDDIKLYASSKKELFHLVDLTEKFSNSIQMHFGIDKCKVFSINRGRVIDSTYTLHTGEIIDKMNEEVGYKYLGFYQSKQIHHKQIKTDITKRFKHRINQILKTQLNSRNIFKAINTFAIPVLTYSFGVIKWSQTDLTKLQRIINTSLTKHRKHHPKSCIQRLTIPRREGGRGLIDLTNLYRKQINTLRRYFHCKADTSQLHKYASDIDTKFTPLNLHNRNEEHNQQIISSQEKEHIWASKSLHGRHYTDLTQPHVDKNASNAWLRYGQLFPETEAFMLAIQDQVMGTANYQKHIIKKMVQQNDVCRHCRSAPETIQHITGACKTLVQTDYKHRHDQIASIIHQQLAHAYKFIANKEPYYKYKPESVLENKSYKLYWDRTILTDRTIHHNRPDITLYDKLNNTVYFIDIAVPNTHNLQNTISEKMIKYRDLATEINKQWQVQKVHIIPIVISSTGVIPKGLFNSLKMLNISSYISRVLQKAANT

SEQ ID NO: 2827 - protein, 1366 aa, Heliopetes ericetorum
MRLRNRDIPQAGTCEGESRSGPTGSGCPTYSGGGNASHTTAQLSVAVGKEILSSNTVDSQTSCLTPTTSVESLFESLASTPRSYEELSPTNMRSTTSSPRSVDVVQEATATLPAPTTGTVKRKRRQWTEEMNKFIWHTYLVGTEGEKYTRGYLDYLHQEFSRKYPEMDASRQRVGDQCRAIVRNKFLTQTVLDDIRNQVSKQLQISGSKTPNQNSQIQNQTQTQSAITRMRWTDEINESIMKFYFESSKLERDMTVYRKRMHEKFIAQYPHLTHISEQRLADQRRAIVHNKMLTSDRIQELREEVKLTLNQCEMMDDSHNITLHNNTIQYADTTHEETELIFTTVLQERERDSNYNHDNNIHKISEKDCKNLEEDFVKNLNTFRNIDPTSRPYIPKQKTSRKLASTLCNINKHVLPKYLLPDIDFNTLHTLIYVAAYTVAKYNGAKLNLQKNNSIARKKPAWQRRLENKVQELRAHIARLKEYINGNRGAKILAAIEIVKKKYKLHALHEGENVKPIHYLDTLKQKLNTTANRLKRYSNCTKRKRQNAQFYNNEKYFYRNLNTPQKQEEVTAAIPTADSLRGYWAGIWENPVQHNTDADWITCNTTMISDMNFDEITLDTLLQVINRTHNWKCPGTDHIHNYWYKKLTSTHILLHKCINQFIKNPTSMPTYITHGKTYMVPKDGYTEDPTKYRPITCLQTIYKIITACISQHIYTHLDRNNILAEQQKGCRKLSQGCKEQLTIDAIAMTQAIRRKKSIHSMYIDYKKAFDSVPHSWLLYILKQYKIHPNITNFLNITMTNWKTVLNLNYNNISIITEPICIRRGIFQGDALSPLWFCLALNPLSEMLNKTRVGYKLSYNRSHHTLSHLMYMDDIKLYASSKKQLFHLADLTQKFSNDIEMQFGIDKCKIHSITRGHTQNINYTLDNGEVIESMNAEVGYKYLGFHQSKQIHHKQIKNDITNKFKHRLNQILKTELNSRNTFKAINTYAIPVITYSFGIIKWSQTDLIKLQRIINTTLTKYRKHHPKSCIQRLTLPRREGGRGLIDLTNMYHNQIDKLRKYFHCKADKSVLHEYISNIDIKLTPLNLHSKNVHHLEQTISIQGKNDAWAKKALHGRHHADLRQPHVDKNASNAWLRYGQLFPETEAFMLAIQDQVINTANYKKHIIKEDTLQNDLCRRCKNSPETIQHITGACKTLVQTDYKHRHDQIASIIHQHLAHSCKFIKNKEPYYKYQPEVVFENKTHKLYWDRTILTDRTIHYNRPDITLHDKPNSTVYFIDIAVPNTHNLLSTINEKNSKYRELAIEIKKQWEVKTVHIVPIVISSTGVIPNVLFNSLKTLHMNTNISVTLQKASILNTCRIVRKFLNAT

SEQ ID NO: 2828 - protein, 1338 aa, Pyrrhopyge hadassa
MQNTNPKNVKYNLRSLSQAKSVKRSIRTSVTDDVQSSSLTRTLSPESLFESVASSPRSYEQPSPTCSLSITSSPSSVDVVQEAIATYPAPITETTRKRRQWTKDMNECIWRAYLIGTELGKRTRGYLDYLYKEFNEKYPEMCASKQRLGDQCRAILRKKLLNENTLADIRQQVIKQLQTINFEQTQIQHQTQNKSGTTRMKWTDDINETILRFYFEITNMEKDMVAYRKKLHDKFTTHYPHLSHITEQRLADQRRVIVNNKMITVDKIQEIRKEVELQIKQTKSTNETHNILIKSVIRETEECDEAERGEMHDGEKNDFQENDFQENDTDNQSKRETLNHKYIGKQFADIFNRFKNTEPTSRLFIPKQKSSRKLALIVNTIDQHILPKYLGPEIDFRTLHTLIYVAAYTAAECNGAKLCQNQIKQHINKKPEWQKRLENKVNELRSYIGRLKEFINGNKSSKILAAVETIKTKYKIHAQYENQNIEPSHFLDTLKQKLNTTANRLRRYLNCTKRKTQNNQFYNNEKLFYKKLYLQPRESTLQTRIPTSEKLRQYWANIWENPIQHNSDTNWTESCIKTGIPEMQFEQITKDTLIQVIKRTHNWKAPGTDHIHNYWYKKLTCTHSHLHKHINQFIEAPHLMPTFITQGKTYMVPKEGYTDDPEKYRPITCLQTIYKIITACISVNIYSHLNKHNILAEQQKGCRQLSQGCKEQLTIDAIAITQAFKGKKNIHSMYIDYKKAFDSVPHSWLLEILNQYKIHPHIRHFLQTSMANWQTVLNLNYNSTSLTTEPIRIQRGIFQGDALSPLWFCIALNPLSELLNRSNIGYKLTYNKTHYTLSHLMYMDDIKLYASSKENLFRLADLIERFSSDIRMQFGIDKCKILSVNRGRTIINNYTLRSGEIIDSLNEELGYKYLGFLQCRQINHKQIKSDIIKKFKHRLHQILKTELNSRNTFKAINTYAIPVITYSFGIVKWSQTDITRLQRIINTNLTKHRKHHPKSCTQRLTIPRREGGRGLIDLANLYHKQIDTLRRYFHSKADTSDLHKYVSDIDFKLTPLNLHDKNTQHNERIISTQEKVRVWAGKSLHGRHCADLMQSHVDKNASNAWLRYGQLFPETEAFMLAIQDQVINTSNYQKHIRKQNLHQSDLCRQCKSASETIQHITGACKILVQTDYKHRHDQISSIIHQHIAHTCKFITAKEPYYKYKPETVLENRTHKLYWDRTILTDKTIHYNRPDITLHDKIKNTVYLIDIAVPNTHNLQSSISEKMAKYRDLAIEIKKQWQVQTVHIVPLVISSTGVIPKTLFNSLKILNINSNISYLLQKASILNTCRIVRKFLSIT

SEQ ID NO: 2829 - protein, 1328 aa, Quadrus cerialis
MQNTNQKTLKYNLRSLSRANNGARCKPIHNTQSSSTECSSSSESLFESQSTISTTSEQSNLSTLGSRSVDVVQEATANNPAPTTGTIRKRRQWTRDMNESIWRAYLIGTELGKRTRGYLDYLYQDFTQKYPEMDASRQRLGDQCRAILRNKLLSETTLTNIKNQVIKQFQTSNTQHPDTVHQSQNELGTTRMKWTDEINETILRYYFKITNMEKDMTAYRKKLHDKFKAHFPQLSHITEQRLADQRRAIVHNKMFTIERIEEIRKEVEQQIKDTVILPEAQDIPINFDLGENLEIHGEEEEVEVPENEEPVFQEQQADNHRSDGNSILKRIDKEFTDIFNEFKNTEPTSRPYIPKQKTSRKLALIVHTLNQRVLPQYLGPEVDFLTLHTLIYAAAYTAAKCNGAKIDTTRNNNNQNITKKPKWQQRLENKVEELRAHIARLNEFIKGNRSSKILAAVETVKKKYKIHAQYENENVEPNHYLDTLKQKLNVTANRLRRYMNCTKRKKQNNQFYNNEKLFYKNLYSQHKDTDPRTKIPNSDELRQYWANIWENPIQHNSDINWIESCKDDDIPEMQFDQITQDTLLQVIKRTHNWKAPGTDHIHNYWYKKLTCTHSHLLKNINEFIKTPHLMPTFITHGKTFMVPKDSYTEDPANYRPITCLQTIYKIITACISTYIYSHLNNNNILTEQQKGCRKLSQGCKEQLTIDAIAMTQAFKRKKNIHSMFIDYKKAFDSVPHSWLLQILNQYKIHPRIKYFLETSMTNWQTVLNLNINSSSLTTEPICIRRGIFQGDSLSPLWFCLALNPLSERLNETNFGYRLSYNKTHHTLSHLMYVDDIKLYASSKEKLYQLADLTEKFSNDIRMQFGVDKCKILSVNQGRTVNNNYVLQSGQIIDSLNEETGYKYLGFHQFRQINHKQIKHDIIKKFRHRLNQILKTELNSRNIFKAINTSAIPVITYSFGVIKWSQTDLTKLQRIINTTLTKHRKHHPTSCIQRLTISRREGGRGLIDLANLYHKQIDTLRRYFHSKEDTSKLHKYVSDIDHRLTPLNLYDRNTQHSEQIVSSRDKIKTWASKSLHGRHYADLMQPHVDKNASNAWLRYGQLFPETEAFMLAIQDQVISTSNYRKYITKQTPQQNDMCRQCKSAPETIQHITGACKILVQTDYKHRHDQIASIIHQHIAHASKFIATKEPYYKYKPEPILENRTYKLYWDRTILTDRTVHYNRPDITLHDKLKNVVYLIDIAVPNTHNLQSSVNDKMSKYRDLAIEVKKQWQAQTVHTVPIVISSTGVIPKTLFDSLKILNIKPNTSDLLQKASILNTCRIVRKFLSIN

SEQ ID NO: 2830 - protein, 1262 aa, Tiana niger
MKNTKPKNISYNLRSLSRAPSGTRSLQTENGRSEVYPTADRRSSLSKRTSSSESIFESPTSSPRSYEGLTMTRSRSTTLSPPVSVDVVQEALATQLAPTTGTSKNKRRQWSEEMNKFIWRTYLVTTKLGKHTRGYLNYLYEEFSQKYPEMDASRQRLGDQCRAIVRNKLLSEAILDDIRKQVVEQLEPADFQTHHEYTQNQQTEHLSGTIRMKWTNEINETIIRYYYEASKLEKDMTGYRKIMHDKFKAQYPHLSHITNQRLADQRRAIVNNKMLTTDRIEEIRKEVESYITITEKGISNNIPNISHDLPEEGNAEIAYENTSQIHCLENDNQRNESHIKSRNEKNEQATRKYIEEQFIEVLCKFKNTNPVSRPYIPKQKATRKLAVIVHNINQHVLPKYLCSDTDFNSLHTLIYVAAYTAAKCNNTKFESGKTKQQVKKKPEWQRRLENKVNKLRSYIARLKEFVNGNRNLKILTAVEEIKKNYKIHAQHEVENNEPNEYLDTLKQQLNATANRLRRYLNCTKRKKQNAQFYNNEKNFYRNLNIQQKHSALTEKTPILDELRQYWANIWENPVQHNTSANWIKNSIEATIPTMDFENVTINILTDVIKSSHNWKAPGTDHIHNYWYKKFTCTHSLIHYHINQFIQSPHLLPTFITHGKTYMIPKQHDTKDPANYRPITCLQTIYKIITACISEHIYIHLSKHNILAEQQKGCRKHSQGCKEQLTIDAIAMTQAFRRKKNIHSMYIDYRKAFDSVPHSWLLDILKHYQIHPSLIHFLKISMTNWQTVLNVNCNNSTFNTESIHIQRGIFQGDALSPLWFCLALNPLSDLLNKANVGYKLTYNGSHHTLSHLMYMDDIKLYASSTQDLFQLADLTEKFSNDIKMQFGIDKCKIQSVNRGRTQNTEYTLETGELIESLCEEVGYRYLGFNQSKQIHHKQAKLDITKKFKYRLNQILKTQLNSRNIMKAVNTFAIPVITYSFGIIKWSPTDLAKLQRIINTSLTRHRKHHPKSCLQRLTISRREGGRGLIDLTNLYQKQIHTLRQYFHCKAETSQLHKYVTNIDIKYTPLNLHDKNIKPTDQIVTLQEKINTWACKSLHGRHYADLVQPHVDKRASNAWLKQGHLFPETEAFMLAIQDQVICTANYRKYIMKDRSQQSDLCRQCKGAPETIQHITGACKMLAQSDYKHRHDQIASIIHQHLAHSSNFISSKQPYYKYKPETILENKSYKLYWDRTILTDRTIYYNRPDITLSPDKLNEVALGTRH

SEQ ID NO: 2831 - protein, 1326 aa, Ouleus salvina
MSNTNQKTIKYNLRSQSQANNGDRCQQIYNTQNSSIERTSSSDNLLESQSTSSYSSEQCNLSVLSSRSIDVVHEATANYLAPTIGTIKKRRQWTRDMNESLWRAYLIGTELGKRTRGYLNYVYQDFTQKYPEMDASRQRLGDQCRAILRNKLLSETTLTNIKNQVIKQLQTANMEYPDITHQTQNKLGMTRMKWTDEINETIMRFYYEITNIEKDMTAYRKKLHDKFIAHFTDLSHISEQRLADQRRAIIHNKMLTIERIQEIRKEVEQQLKDTVRSHETQNVIVNSDTRENLETRIENNEWQVGGNQELDVQQQYNDDQKKDENPILERVDEQFANNFNNLKNTEPTFRPYIPKQKTSRKFALIVNTLNQRVLPRYLGPEVDFLTLHTLIYVAAFTAAECNGANLDCMDNKQKIRKIPKWQQRLENKVEELRAYIGRLTEYINGNRSSKILAAVETVKKKYRTHAQYENENVESNHYLDTLKQKLNVTANRLRRYKNCTKRKTQNSQFYNNEKVFYKQLCSQHKDTNSQTKIPNSNELRQYWVNIWENPIQHNSDINWIESCRKDDILEMQFEQITQDTLVQVIRRTHNWKAPGTDHIHNYWYKKFTCIHSHLHKHINEFIKTPNLMPTFITHGKTFMVPKESYTEDPANYRPITCLQTIYKIITGCISTYIYTHLNNNNILTEQQKGCRKLSQGCKEQLTIDAIAMTQAFKRKKNIHSMFIDYKKAFDSVPHSWLLQVLKQYKIHPQIKHFLEKSMTNWQTVLNLNTNSASLTTEPICIRRGIFQGDALSPLWFCLALNPLSELLNKTNTGYQLTYNKTHYTLSHLMYVDDIKLYASSKEKLYQLADLTERFSNDIRMQFGVDKCKILSVNQGRTISNTYTLQSGQIIDSLNEETGYKYLGFYQFRQINHKQIKRNVIKKIKHRLNQILKTELNSRNIFKAINTYAIPVITYSFGVIKWSQTDLTKLQRIVNTTLTKHRKHHPTSCIQRLTLSRREGGRGLIDLANLYHKQIDTLRRYFHSKADTSRLHKYVSNVDRKFTPLNLYDRNTQQNKQITSSGEKIKTWASKSLHGRHYADITQPHVDKNASNAWLKYGQLFPETEAFMLAIQDQVISTSNYRKYIMKQTPQQNDLCRQCKSAPETIQHITGACKILVQTDYKHRHDQIASIIHQSIAHTCRFITTKNPYYKYKPELVLESRSYKLYWDRTILTDRTIHYNRPDITLHDKLKNIVYLIDIAIPNTHNLQSSINDKMSKYRDLAIEIKKQWQVQKVHIVPIVISSTGVVPKTLFDSLKILNIKPNTSDLLQKASILNTCRIVRKFLSIS

SEQ ID NO: 2832 - protein, 1342 aa, Eantis tosta
MNLEQPKNFRYNLRSLSRASSTWSMRTPNGRSIGNATTDHRTGSSKSTSSLESLFESPTSSLYEEPLSTYSRSTTLSPRSIDVVQEAIATYPAPTTGTTKPKRRKWTKEMNMFIWRTYLIATDLEKNTNGYLDYLHPEFVKMYPEMDASRQRLGDQCRAITRNKLLNQSVLNDIKRQVTSEYPVSSSHNLTLTPAQHTTRMRWSNEVNEVILRLYFESSNLEQDLTGYRTKMHNKFITMYPHLSFITEQRLADQKRVIVNNRMVTTERIEEIKRDVELQIRQRNTNLETLNTTHDTLYCTGQIDEETDVDAIDELGHFISNENCNLEKVNEEATNDRTKHNNGNLSHIEEQFKIILDKFKNSDPTSRPYIPKQKTSRKLATIVFNINEIILPKYLSSEIDFNSLHTLIYVAAYTAVTCNNTRFPSTQNINSKRKPFWQTRLENKIKELRSHIGRLMQYIRGNRNRKILQTIDIIKKKFKVHAQHENENNEPQLFLDTLKQMLSTTASRLRRYLNCTKRKAQNAQFHNNEKSFYRKLSSDTQKTEEMVLLPTQDELRDYWANIWENPVTHNRKANWLNNMNDTSISEMQFEQITENVVTQVINRTHNWKAPGSDHIHNYWYKKLTRTHPYIHKFINEFIKAPDTIPTFVTHGKTYMLPKDTDTKNPEKYRPITCLQTIYKVITGCISESIVSHLNKNNILAEQQKGCRKYSQGCKEQLSIDAIVMRQAHRRKRNLHCMYIDYKKAFDSVPHSWLLEILISYKIHPQLVKFLETTMNNWQTILNLSFKNTTITTEPIRIKRGIFQGDTLSPLWFCLALNPLSTLLNKSETGYRLTYNGSHCKLSHLMYMDDIKLYGSNKDELFKLADLTEMFSNDIQMQFGIDKCKIHSVNRGRTIESSYTLQTGEIIESLNHHIGYKYLGFHQSNQIHHKQTKSILTKHFKCRLNQILKSELNSRNITKAINTFAIPVLTYSFGIINWSQSDLIRLQRIINTSLTKHRKHHPKSCSQRLTLPRREGGRGLIDLTNLHNTQIHTLRRYFYFKSDVSELHKFISNADTKFTPLNLHDRTTQHNERIISSKEKLNIWAGKTLHGRHYSDLNKPHVDKIASNAWLKNGELFPETEAFMLAIQDQVICTANYRKYITKEISLKSDLCRHCKSSPETIQHITGACKVLVQTDYKHRHDQIASIIHQHLAHSCNFIPIKEPYYKYKPQVVLENKTHKLYWDRTLLTDKTVHFNRPDITLQDKKHDTAYLIDIAVPNTHNLQSTISDKISKYRDLAIEIRKQWKIKTVHVVPIVISTTGVIPKTLTDSLKTLNIHPLTTNTLQKASILNTCRIVRKFLNLQ

SEQ ID NO: 2833 - protein, 757 aa, Aguna metophis
MHFEEVTLETLLQVIKKTHNWKSPGTDHIQNYWYKKFTSTHLHLHKHINQFIKLPPTSMPSFITHGKTYMLPKEGYTEDPTKYRPITCLQTIYKIITACISENIYTHINKNNILAEQQKGCRKFSQGCKEQLTIDAIAITQALRRKKNIFSMYIDYKKAFDSVPHSWLLHILNQYKVHPSIINFLNTSMTNWQTILNLKYNNTSITTEPIRILRGIFQGDALSPLWFCLALNPLSELLNKTGMGYKLSHSLSHYTLSHLMYMDDIKLYASNKKQLFHLADLTEKFSNDIGMQFGIDKCKIHAVIRGHTQKTNYTLHSGEVIDSMNEEVGYKYLGFHQSKQIHHKQIKTDITKKFKHRLNQILKSELNSRNIFKAINTYAIPVITFSFGVIRWSQTDLLKLQRIVNTTLTKFRKHHPKSCIQRLTLPRSEGGRGLIDLTNLYYKQINKLREYFHSKADTSSLHKYSSNIDIKFTPLNLHEKNIHENKHTVSIQEKKDAWSRKALHGRHYADLRQPHVDKNASNAWLRYGQLFPETEAFMLAIQDQIINTANYKKHITKETREQSDLCRQCKSASETIQHITGACKALVQNDYKHRHDQVASIVHQHLAHSCKFLKNKEPYYKYKPEVVLENKTYKLYWDRTILTDRTIHFNRPDITLHDKPNRTVYFIDIAVPNTHNLMSTINEKISKYRELAIEIKKQWQVQTIHIVPIVISSTGVIPSVLFHSLKTLQINYNISNILQKASILNTCRIVRKFLNIT

SEQ ID NO: 2834 - protein, 1372 aa, Pyrgus malvae
MRLRNRQIPQAGTREGESRPGPSGLGCPSYSGVGTASHMTSADAFAVDKQLLSPITGDLHSGSSSRISSLESLFDSPASTPRSYEESSSTHTRSTTSSPRSVDVVQEAIAAELAPTTGSIKNKRRQWTEQMNRFIWRTYLIGTELEKHTRGYLDYLHKEFTQKFPEMDASRQRLGDQCRAIVRNKFLNQATLDDIRNQVKIQFQQTDSQINTTKSQTINQVQSFSGQSRMKWTDDINESIMRFYFECSNLEKDLTAYRKKLHEKFITHYPHLTHISEQRLADQRRAIVHNKMLPAEKIQEIRTEIELRLIQTEISAETSNNVTETQETQAKNVNQIITHSFQTQHFNSENEELLEISTDRAQINENIMRKNIDEEFAINLNRFENSNPISRPYIPKQKTSRKLALIVHNINHYTFPKYLHHDIEFDTLHMLIYVAAYTAAKCNGASFNINNDKQDVRRKPAWQKRLERKIEELRSYIARLTEFTNGNRSAKIIATVRIVKKKYRIHAQHENENIETSHYLDTLKQKLNATASRLRRYLNCTKRKIQNSQFYNNEKNFYRNLGIHNQESSQNTNKSGLTIPSSAELRNYWANIWENPVQHNADTQWSQNSSTTTIPDMKFENIASDTLLRVIKRTHNWKAPGTDHIHNYWLKKFTCTHSQIQKHINNFINAPDTMPEYITQGKTFMVPKDGYTKDPAKYRPITCLQTIYKIITACVSEHIYDHLNKHNLLAEQQKGCRKFSQGCKEQLTIDAIAMTQAFRRKKNIHSMYIDYKKAFDSVPHSWLLYILDHYKIHPHIKNFLSTSMTQWKTVLYLNHDKTSVTTEPIRIQRGIFQGDALSPLWFCLALNPLSEILNKTEAGYKLTYNRSHHTLSHLMYMDDIKLYASNKNELFRLADVTEKFSNDIQMQFGIDKCKVHSVSRGRSLNTSYTLQTGEVIDSMKNEVGYRYLGFVQSKQIHHKQIKQEITKKFKVRLNQILKSELNSRNTFKAINTYAIPVITYSFGVIKWSRTDLIKLQQIINTTLTKHRKHHPKSCIQRLTIPRREGGRGLIDITNLYHKQISTLRQYFHSKADTSELHKFATDIDNKYTPLNLYDRHTEHNEHIISSKEKNDTWARKSLHGRHYADLAQPHVDKTASNAWLRYGQLFPETEAFMLAIQDQVVNTANYRKHITKEISLQSDSCRQCKSASETIQHITGACKLLVQTDYKHRHDQIASIIHQHLAHTSKFIRNKEPYYKYKPETVLEDKTYKLYWDRTILTDRTIHYNRPDITLHDKQKKIVYFIDIAVPNTHNIQSTINEKMIKYRDLSIEIKKQWQAQTVHIVPIVISSTGVIPKSLFNSLKILNIKSNIAVTLQKASILNTCRIVRKFLNIT

SEQ ID NO: 2835 - protein, 1334 aa, Pyrgus malvae
MTSADAFAVDKQLLSPITGDLHSGSSSRISSLESLFDSPASTPRSYEESSSTHTRSTTSSPRSVDVVQEAIAAELAPTTGSIRNKRRQWTEQMNRFIWRTYLIGTELEKHTRGYLDYLHKEFTQKFPEMDASRQRLGDQCRAIVRNKFLNQATLDDIRNQVKIQFQQTDSQINTTKSQTINQVQSFSGQSRMKWTDDINESIMRFYFECSNLEKDLTAYRKKLHEKFITHYPHLTHISEQRLADQRRAIVHNKMLPAEKIQEIRTEIELRLIQTEISAETSNNVTETQETQAKNVNQIITHSFQTQHFNSKNEELLEISTDRAQINENIMRKNIDEEFAINLNRFENSNPISRPYIPKQKTSRKLALIVHNINHYTFPKYLHHDIEFDTLHMLIYVAAYTAAKCNGASFNINNDKQDVRRKPAWQKRLERKIEELRSYIARLTEFTNGNRSAKIIATVRIVKKKYRIHAQHENENIETSHYLDTLKQKLNATASRLRRYLNCTKRKIQNSQFYNNEKNFYRNLGIHNQESSQNTNKSGLTIPSSAELRNYWANIWENPVQHNADTQWSQNSSTTTIPDMKFENIASDTLLRVTKRTHNWKAPGTDHIHNYWLKKFTCTHSQIQKHNNNFINAPDTMPEYITQGKTFMVPKDGYTKDPAKYRPITCLQTIYKIITACVSEHIYDHLNKHNLLAEQQKGCRKFSQGCKEQLTIDAIAMTQAFRRKKNIYSMYIDYKKAFDSVPHSWLLYILDHYKIHPHIKNFLSTSMTQWKTVLYLNHDKTSVTTEPIRIQRGIFQGDALSPLWFCLALNPLSEILNKTEAGYKLTYNRSHHTLSHLMYMDDIKLYASNKNELFRLADVTEKFSNDIQMQFGIDKCKVHSVSRGRSLNTSYTLQTGEVIDSMKNEVGYRYLGFVQSKQIHHKQIKQEITKKFKVRRNQILKSELNSRNTFKAINTYAIPVITYSFGVIKWSRTDLIKLQQIINTTLTKHRKHHPKSCIQRLTIPRPEGGRGLIDITNLYHKQISTLRQYFHSKADTSELHKFATDIDNKYTPLNLYDRHTEHNEHIISSKEKNDTWARKSLHGRHYADLAQPHVDKTASNAWLRYGQLFPETEAFMLAIQDQVVNTANYRKHITKEISLQSDSCRQCKSASETIQHISGACKLLVQTDYKHRHDQIASIIHQHLAHTSKFIRNKEPYYKYKPETVLEDKTYKLYWDRTILTDRTIHYNRPDITLHDKQKKIVYFIDIAVPNTHNIQSTINEKMIKYRDLSIEIKKQWQAQTVHIVPIVISSTGVIPKSLFNSLKILNIKSNIAVTLQKASILNTCRIVRKFLNIT

SEQ ID NO: 2836 - protein, 1333 aa, Ardaris minthe
MQNMNPKNIKYNLRSLSQAKSVTKNVQTSVTDDTQSNPFTRTSSPDSLFQSLVSSPRSYEQPSPTCSLSISSSPSSVDVVQQATASYPAPTTETRKKRRQWTKDMNECIWRAYLIGTELGKRTRGYLDYLYKDFNQKYPEMGASKQRLGDQCRAILSKKLLNETTLTDIRKQVAKQFQTTDFDLTQTQHQKQNKSGTTRMKWTDEINETILRIYFETTNMEKDMIAYRKKLHDKFKAQYPHLSHITEQRLADQRRVIINNKMITDEKFQEIREEVELHLKQTEMSHETQNTVINSVRRENKGIDEVERAEVHNDEEYYFHGNDINDLNKDETLIRKHVEKQFADIFHNLKNTEPTSRPYFPKQKSSRKLALIVNTIDQHILSKYLDPEVDFHTLHTLIYAAAYTAAKCNGAKLSQNHYKQTISKKPQWQKRLENKVKELRAYIGRLKEFTNGNRSSKILAAVETIRTKYKIHAQYENQNIEPSHFLDTLKQKLNTTANRLRRYMNCTKRKTQNNQFYSNEKLFYKKLCLLPKESELQTSVPTSEELRLYWANIWENPMQHNSDTNWIESCINIGIPEMQFEQITKDTLLQVINRTHNWKAPGTDHIHNYWYKKFTCTHSHLHKYINQFIETPRLMPTFITEGKTYMVPKEGYTNDPAKYRPITCLQTIYKIITACISVNIYSHLNKHNILAEQQKGCRQLSQGCKEQLTIDAIAMTQASKGKRNIHSMYIDYKKAFDSVPHSWLLEILNHYKIHPHIRHFLKTSMTNWQTVLNLNYNSTSLTTEPIRIQRGIFQGDALSPLWFCLALNPLSELLNRSNIGYKLTYNKTHYTLSHLMYMDDIKLYASSKENLFRLADLTEKFSSDIKMQFGIDKCKILSVNRGHLVKNNYALQSGEIIDSVNEKFGYRYLGFSQCKQINHKQIKADIMKKFKFRLNQILKTELNSRNSFKAINTFAIPVLTYSFGIIKWSQTDLAKLQRIINTNLTKHHKHHPKSCTQRLTIPRREGGRGLIDLTNLYHKQIDTLRRYFLSKADTSELHKYVSDIDVNFTPLNLHDRNTQHNERITSSQEKIKAWAGKSLHGRHYADLMQAHVDKNASNAWLRYGQLFPETEAFMLAIQDQVINTSNYQKHITKQILHQNDMCRQCKSASETIQHITGACKILVQTDYKHRHDQIASIIHQHIAHTSKFITTKEPYYKYKPETVLENRTYKLYWDRTILTDKTIHYNRPDITLHDKLKNTVYLIDIAVPNTHNLQSSISEKITKYRDLAIEIKKQWQVQTVHIVPIVISSTGIIPKTLFTSLKILNINPNTSYLLQKASILNTCRIVRKFLSIT

SEQ ID NO: 2837 - protein, 1322 aa, Pholisora mejicanus
MINTKSKSFSYNLRSLSKARSGSRGMQTENDRSEIYATADRRNSSSARTSTSGSLFESFPSSPRSYEELSTTPSRSITLSPTVTVDVVQEAQASKLAPTTGTSKNKRQKWSEEMNKFIWRTYLVVTKLGKQTRGYLDHLHYDFTRKYPEMNASRQRLGDQCRAIVRNKLLDGKIINDIRKQVEEQLELVNCQTSHEYKQDQQQQPNLSSTIRMKWTNDINENIIRYYYEATNLEKDMTGYRKKMYEKFITQYPQLAHITEQRLADQRRAIVNNKMITIDRIEEIRREVEIYVTLTQTEVFNDLQNTAYDLVEKEDTIAEDENHELTSQYGNLECENQDHIEIRNIKQSENIFCKQVEEQFVKILNEFRNTDPVCRPYIPKQKQTRKLALIVSNINQHILPNYLCPDIDFSTLHTLIYVAAYTAAKCNNTRFHLSIKKQKLRKKKKWQIRLENKINLLRSYIARLKEFINGNKNSKILAAVQEIKKNYKKHAQYEDENNEPIQYLDTLKQHLNTTASRLRRYLNCTKRKRQNAQFYNNEKNFYRTLNLKQNEGGKVAEKLPTSEELRQYWANIWENPVQHNTTANWIKNSVDTIPTMEFEEVNIDILTHVIRRTHNWKSPGTDHIHNYWYKKLTCTHTYLHNHINQFIQSPHLLPKFVTHGKTHMIPKQSHTENPANYRPITCLQTIYKIITACISDYIYTHLNKHDILVEQQKGCRKYSQGCKEQLTIDAIAMTQAFRRKKNIHSMYIDYRKAFDSVPHSWLLHTLQQYKIHPNLIKFLEISMTNWETVLNLTFNNSSITTDSIRIQRGIFQGDSLSPLWFCLALNPLSELLNKTEVGYKLTYNSTHHTLSHLMYMDDIKLYASSKQELFQLADVTERFSVDIQMQFGIDKCKIHSINRGRTQNTEYTLQTGEVIEPLQEEVGYKYLGFNQSKQIHHKQIKLDIKKKFKYRLNQILKTELNSRNIIKAVNTFAIPVITYSFGIIKWSPTDLAKLQRIINTSLTKHRKHHPKSCLQRLTLSRREGGRGLIDLTNLYHKQIHTLRQYFHSKADTSQLHNYITNIDNKYTPLNLHDKNIEHSDKIVTSQEKMNTWASKSLHGRHYADLEQPHVDKCASNAWLKQGYLFAETEAFMLAIQDQVINTANYRKHITKELSQQSDLCRQCKCTPETIQHITGACKNLVQSDYKHRHDQIASIVHQHLAHSTKFIAKKQPYYSYKPETILENKRYKLYWDRTILTDRTIHYNRPDITLHDKLNQVAYLVDIAVPNTHNLHSTINDKIMKYSDLTIEIKKQWQVLIVISSTGVVPKILFYHLKKLNTHSNI

SEQ ID NO: 2838 - protein, 1104 aa, Achlyodes mithridates
MYPHLSFITEQRLADQRRVIINNKMVTTKRIEEIKREVELQIRHRYTDVETLNTTQNTLHYTPQIGEDTYIGVIDESGHYITQENGSVEKVNEDATNDRAKYKNINLNHIEEQFKVILDQFQNSNPTSRPYIPKQKTSRKLAAIVNNINEVILPKYLSSDIDFNSFHTLIYVSAYTAVTCNNTRTPFIQNRNLKSKPFWQIRLENKIKELRSHIARLMQYMRGNRSRKILQTIDIIRKKFKVHAQHENENDEPQLYLDTLKQMLSTTANRLRRYISCTKRKTQNAQFQNNEKSFYRKLTTDLQKKEEMVLLPTQEELREYWANIWEKPVIHNKKANWLNNMNDSSILEMQFEQITDTIVTQVINRTHNWKAPGSDHIHNYWYKKLTCIHPYIHKFINQFIKTPSTMPTFVTYGRTYMLPKDTDTKNPAKYRPITCLQTIYKIITGCVSESVSSHLNKYNILAEQQKGCRKYSQGCKEQLTIDAIVMMQAHRRKRNIHTMYIDYKKAFDSVPHSWLLEILTYYKIHPQLVTFLEITMNNWQTVLNLNFGDTSITTEPIRIKRGIFQGDTLSPLWFCLALNPLSTLLNKSEIGYRLTYNGSHCKLSHLMYMDDIKLYGSSKDELFKLAELTEMFSNDIQMQFGIDKCKIHSVNRGRILQSSYSLQTGDIIESMNHHTGYKYLGFHQSNQIHHKQIKSTLTKHFRCRLNQILKSELNSRNIIKAINTFAIPVLTYSFGIINWSQSDLIRLQRVINTSLTKRRKHHPKSCAQRLTLLRREGGRGLIDLTNLHNTQIHTLRRYFFLKSDSSQLHKYVSNVDTKFTPLNLHDRNTQHNERIISSEEKLTTWASKTLHGRHYSDLNKPHVDKMASNAWLKNGELFPETEAFMLAIQDQVISTANYRKYITKEISHKNDLCRHCKSSPETIQHITGACKVLVQTDYKHRHDQIASIIHQHLAHTCNFIASKEPYYKYKPQVVLENKTHKLYWDRTLLTDKTVHFNRPDITLHDKKHDTAYLIDIAIPNTHNLQSTISEKMTKYRDLAIEIRKQWKIKTVHIVPIVISTTGVIPKTLADSLKILNIHPLISNTLQKASILNTCRIVRKFLNLQ

SEQ ID NO: 2839 - protein, 1330 aa, Myscelus nobilis
MRLRNRILPQAGTREGQSRPGPSGSGSPAYSGGGNDSHMTAQSRAGAVDKTPAHIPHPSSPTISSHSSYQSLDSAESLFESSDFSSCPDEDPSSECSRSIPVRAVDVVQEATAIHPAPTTGAIKRKRRQWTQDMNEFLWRTYLTKTVLETRIRGYLDHLHQEFTQKYPDMNASRQRLGDQCRAIIRNKLLNQNTLDNIRNQVMKQFQETDQQIPHNQHSHNPNQTQNSSRTTRIKWTDDINQNILRFYFESTDVERDMTAYRKKMHEKFKAHYPQLSHISEQRLADQRRVIVHNKMLTFDIIQNIRTEVELRLGEKETSHETHNTLNHPFHTNTLQNENIQSEKTEDTAVYDREQIECQEEYTDCRTNKKCTRKDIVETFTTILDEFKNTEPISRPYIPKQKTSRKLAFIIHNINQHILPQHLHPDIDFFTLHMLIYVAAYTTAICNGTKLEMNRNMQKNRKKPAWEKRLESKVEALRSYIARMNEYLSGNRNSKILAAVQAVKQKYRIHAQFEDENSDPSHYLDTLKQKLNSTANRLRRYRNCTKRKIQNTQFYNNEKNFYRNLSTHQKETNTTIEIPTTNDLRQYWGNIWENPVQHKVDSNITNSNNTSIPDMQFEEITIDTLIQVIKSTHNWKAPGTDHIHNFWYKKLTCTHSHMHKHINQFIKTPDLMPKYITHGKTYMVPKDNYSQNPEKYRPITCLQTIYKIITACISEHIYTHLNKHNILTEQQKGCRKYSQGCKEQLTIDAITMTQAYKRKKNIHTMYIDYKKAFDSVPHSWLLQVLNQYKIHPHIIHFLKISMNNWQTTLNLNYNNTSLTTEPIRIQRGIFQGDALSPLWFCLALNPLSELLNKTNLGYKLTFDRSHYKLSHLLYMDDIKLYASSKKELFHLADLTEKFSNNIQMQFGIDKCKVFSINRGRVINSKYTMQTGEIIDNMNEKVGYKYLGFNQSKQIHHKQIKTDIVKRFKHRLNQIFKTQLNSRNMFKAINTFAIPIITYSFGVIKWSQTDLTKLQRIINTGLTKHRKHHPKSCIQRLTIPRREGGRGLIDLTNLYRKQINTLRTYFHCKADTSQLHKYASNVDIKFTPLNLHNRNAEHNKQIISSQEKENIWASKSLHGRHYTDLTQPHVDKNASNAWLRYGQLFPETEAFMLAIQDQVIGTANYQKYIMKKALQQNDLCRQCKSAPETIQHITGACKTLVQTDYKHRHDQIASIIHQQLAHTYKFIANKEPYYKYKPASVLENKSCKLYWDRTILTDRTIHHNRPDITLHDKRNNTVYFVDIAVPNTHNLQSTTSEKLIKYRDLATEINKQWQVKKVHIVPIIISSTGVI

SEQ ID NO: 2840 - protein, 830 aa, Mysoria catomelaena
MNCTKRKTQNNQFYNNEKLFYKKLCVPPKENELQTSIPTSEKLREYWANIWEKPIEHNTNTNWNESCIKTGIPEMHFEQITEDTLLQVIKRTHNWKAPGTDNIHNYWYKKFTCIHSHLHKFINQFIESPHLMPTFITEGKTYMVPKEGYTDDPAKYRPITCLQTIYKIITACISVNIYSHLNKHNILAEQQKGCRQLSQGCKEQLTIDAIAMTQAFKGKKNIHSMYIDYKKAFDSVPHSWLLEILNHYKIHSHIRHFLKTSMENWQTVLNLNFYSTSLTTEPIRIQRGIFQGDALSPLWFCLALNPLSELLNRSNIGYKLSYNKTHYTLSHLMYMDDIKLYASSKENLFRLADLTERFSSDVRMQFGIDKCKILSVNRGHIIKNNYTLQSGEIIDSLKEKFGYRYLGFSQCRQINHKQIKDDIIKKIKYRLNQILKTELNSRNTLKAINTFAIPVINYSFGIIKWSQTDIAKLQRIINTYLTKHRKHHPKSWTQRLTIPRREGGRGLIDLANLYHKQIDTLRQYFHSKADTSELHKYVSDIDLNFTPLNLHDRHTQHNDRITSSHEKLKAWAGKSLHGRHYADLMQSHVDKNASNAWLRYGWLFPETEAFMLAIQDQVINTSNYQKHITKQILHQNDLCRQCKSASETIQHITGACKILVQTDYKHRHDQIASIIHQHIAHKCKFITTKEPYYKYKTETVLENRIYKLYWDRTILTDKTIHYNRPDITLHDKLKNTVYIIDIAVPNTHNLQSTITEKMTKYRDLAIEIKKQWQVQMVHIVPIVISSTGIIPKTLFNSLKILNINSNTSHLLQKAAILNTCRIVRKFLSIT

SEQ ID NO: 2841 - protein, 1338 aa, Pyrrhopyge hadassa
MQNTNPKNVKYNLRSLSQAKSVKRSIRTSVTDDVQSSSLTRTLSPESLFESVASSPRSYEQPSPTCSLSITSSPSSVDVVQEAIATYPAPITETTRKRRQWTKDMNECIWRAYLIGTELGKRTRGYLDYLYKEFNEKYPEMCASKQRLGDQCRAILRKKLLNENTLADIRQQVIKQLQTINFEHTQIQHQTQNKSGTTRMKWTDDINETILRFYFEITNMEKDMVAYRKKLHDKFTTHYPHLSHITEQRLADQRRVIVNNKMITVDKIQEIRKEVELQIKQTKSTNETHNILIKSVIRETEECDEAERGEMHDGEKNDFQENDFQENDTDNQSKRETLNHKYIGKQFADIFNRFKNTEPTSRLFIPKQKSSRKLALIVNTIDQHILPKYLGSEIDFRTLHTLIYVAAYTAAECNGAKLCQNQIKQHINKKPEWQKRLENKVNELRSYIGRLKEFINGNKSSKILAAVETIKTKYKIHAQYENQNIEPSHFLDTLKQKLNTTANRLRRYLNCTKRKTQNNQFYNNEKLFYKKLYLQPRESTLQTRIPTSEKLRQYWANIWENPIQHNSDTNWTESCIKTGIPEMQFEQITKDTLIQVIKRTHNWKAPGTDHIHNYWYKKLTCTHSHLHKHINQFIEAPHLMPTFITQGKTYMVPKEGYTDDPEKYRPITCLQTIYKIITACISVNIYSHLNKHNILAEQQKGCRQLSQGCKEQLTIDAIAITQAFKGKKNIHSMYIDYKKAFDSVPHSWLLEILNQYKIHPHIRHFLQTSMANWQTVLNLNYNSTSLTTEPIRIQRGIFQGDALSPLWFCIALNPLSELLNRSNIGYKLTYNKTHYTLSHLMYMDDIKLYASSKENLFRLADLIERFSSDIRMQFGIDKCKILSVNRGRTIINNYTLRSGEIIDSLNEELGYKYLGFLQCRQINHKQIKSDIIKKFKHRLHQILKTELNSRNTFKAINTYAIPVITYSFGIVKWSQTDITRLQRIINTNLTKHRKHHPKSCTQRLTIPRREGGRGLIDLANLYHKQIDTLRRYFHSKADTSDLHKYVSDIDFKLTPLNLHDKNTQHNERIISTQEKVRVWAGKSLHGRHCADLMQSHVDKNASNAWLRYGQLFPETEAFMLAIQDQVINTSNYQKHIRKQNLHQSDLCRQCKSASETIQHITGACKILVQTDYKHRHDQISSIIHQHIAHTCKFITAKEPYYKYKPETVLENRTHKLYWDRTILTDKTIHYNRPDITLHDKIKNTVYLIDIAVPNTHNLQSSISEKMAKYRDLAIEIKKQWQVQTVHIVPLVISSTGVIPKTLFNSLKILNINSNISYLLQKASILNTCRIVRKFLSIT

SEQ ID NO: 2842 - protein, 756 aa, Muschampia kuenlunus
MVFEKVNIDVLIHVIKRTHNWKSPGTDHIHNYWYKKLTCTHPHIHNHINQFIRSPHLLPTFVTHGKTHMIPKQGYTDNPANYRPITCLQTIYKIITACISEYIYTHLNKHNILAEQQKGCRKYSQGCKEQLTIDAIAMTQAFRRKKNIHTMYVDYRKAFDSVPHSWLLYILKQYQIHPSLINFLEISMTTWQTVLNLNHNNISLITESIRIQRGIFQGDALSPLWFCLALNPLSEILNKSEAGYKLTHSNTHYTLTHLMYMDDIKLYASSEQDLFRLADLTERFSTDIQMQFGIDKCKIQSVNRGHIQNTEYTLQNGELIESLQEEVGYKYLGFYQSRQIHHKQIKLDITQKFKNRLNKLLKTELNSRNLMKAINTYAIPVVTYSFGIIKWSQTDLSKLQRIINTSLTRYRKHHPKSCLQRLTIPRREGGRGLIDLTNLYHKQLHALRQYFHSKSEMSQLHKYVTNIDNKYTPLNLHNKNIEHNDKIVTSQEKMKTWASKSLHGRHYADLEQPHVDKCASNAWLKQGYLFPETEAFIMAIQDQVINTANYKKYITKELSQQSDLCRQCKCSPETIQHITGACKILVQSDYKHRHDQIASIVHQHLAHLTNFIPNKQPYYKYKPETVLENKGHRLYWDRTILTDRTIHYNRPDITLHDKLNQVAYLIDIAVPNTHNLQSAFNEKMVKYRDLAVEIKKQWQVQTVHIVPIVISSTGVVPKTLFNSFKILNINSNISNLLQKASILNTCRIVRKFLNTY

SEQ ID NO: 2843 - protein, 1143 aa, Muschampia musta
MKWTSEINETIIRCYYESTNLEKDMTGYRKKMHDKFIAQYPHLSHISEQRLADQRRAIVNNKMLTTDRIVEIRREVESSITLIQTEVSNNLINITQELLEREDAVAEKERSEIVYESTSQICSLDNENKDHIESGNKSKNSENASRKYVEERFIEVLGEFKNTDPVCRPFIPKQKQTRKLALIVHDINQHVLPKYLSPDTDFSTLHTLIYVAAYTAAKCNSKRFDTGTYEQKQKKKPKWQARLEEKINKLRSYIARLTEFIKGNRNKKILAAVQEIKKNYKKHAQHEDENNEPNQYLDTLKQQLNATANRLRRYLNCTRRKKQNAQFYNNEKNFYRSLNREKKLGKSIEKLPTSEELRQYWANIWENPMQHNASANWINNSLDTTPAMDFEKVNIDVLTHVIKRTHNWKSPGTDHIHNYWYKKLTCTHPHIHNHINQFIQSPHLLPKFVTHGKTHMIPKQGYTDNPANYRPITCLQTIYKIITSCISEYIYTHLNKHNILAEQQKGCRKYSQGCKEQLTIDAIAMTQAFRRKKNIHTMYIDYRKAFDSVPHSWLLHTLKQYQIHTSLINFLEISMTNWQTILNLNHNDTLLTTESIRIQRGIFQGDALSPLWFCLALNPLSEILNKSGAGYKLTHSNTHYTLTHLMYMDDIKLYASSEQDLFRLADLTERFSTDIRMQFGIDKCKIQSVNRGHIQNTEYTLQNGELIESLQEEVGYKYLGFYQSRQIHHKQIKLDITQKFKNRLNKLLKTELNSRNLMKAINTYAIPVITYSFGIIKWSETDLAKLQRIINTSLTRYRKHHPKSCLQRLTIPRREGGRGLIDLTNLYHKQLHELRQYFYSKADMSQLHKYVTNIDNKYTPLNLHNKNIEHNDKIITSQEKMKTWASKSLHGRHYADLEQPHVDKCASNAWLKQGYLFPETEAFVMAIQDQVINTANYKKYITKELSQQSDLCRQCKCSPETIQHITGACKILVQSDYKHRHDQVASIIHQHLAHLTNFIPNQQPYYKYKPETVLENKEHRLYWDRTILTDRTIHYNRPDITLHDKLNQVAYLIDIAVPNTHNLQSAFNDKIFKYRDLAVEIKKQWQVQTVHIVPIVISSTGVVPKTLFNSFKILNIHSNISNLLQKASILNTCRIVRKFLNTY

SEQ ID NO: 2844 - protein, 1354 aa, Pholisora mejicanus
MNNTKSENVRYNLRSLSRSRNGTWSMQTNNDCNQIYGTTDSRNGSLTRTPSSESLFESVASSTRSYEELSTTSSRSSTLSPIVTTDVVQEATATQLPPTTGTSKSKRRHWSEDMNKFIWRTYLFATKLGKYTRGYLDYLHHEFSQKYPEMNASRQRLGDQCRAIVRNKLLNETILDDIKNQVIEQLNVADCQTPNTHTQYQQSNLLGTSRMKWTNEINETIMRYYYESSNIEKDLTGYRKKMHDRFITQYPHLNHITEQRLADQRRAIVNNKMLTINRIEEIRKEVELYTTLTETEVLDKLHTTTHDLLEEQNTVAEEGNAEIFNEHTLEDHYSEHEEQEEHTLRRTRKNRENTIRKLVQEQFVKALEQFKNTDPICRPYIPKQKQTRKLALIVHHINQHVLPKHLCPDTDFNFVHTLIYVAAYTAAKSNNTRFDSSQTKQHQRKKPRWQRRLEAKVNILRSYIARLQEFIKGNRNKKILAAVEEIKRNYKKHAQHEDVNNEPNQYLDTLKQQLNTTASRIRRYSNCTKRKRQNTQFYNNEKNFYKSLNTQENQGKPIEKLPTSDELRQYWANIWENPVQHNNSANWINNSSDPSIPGMNFEKVNIDVLARVINRTHNWKAPGTDHIHNYWYKKFTCTHSHIHDHINQFIQSPHLLPTFVTHGKTHMVPKQSYTKDPANYRPITCLQTIYKIITACISEYIYNHLYKYNILAEQQKGCRKYSQGCKEQLTIDAIAMTQAFKRKKNIHTMYIDYKKAFDSVPHSWLLHTLRQYQIHPSLINFLETSMLNWQTVLNLNSNDSSLVTEPIRIQRGIFQGDSLSPLWFCLALNPLSELLNQTEVGYKLTYNNSQHTLSHLMYMDDIKLYASSKQDLFKLADLTEKFSSDIQMQFGIDKCKIQSVNRGRTQDTKYTLQTGEFIKSLEEEVGYKYLGFYQSRQLHHKQIKLNLIKKFKFRLNQILKTELNSRNIIKAINTFAIPVITYSFGVIKWSPTDLTKLQRIINTSLTKHRKHHPKSCLQRLTLARREGGRGLIDLTNLYHKQIHKLRQYFHCKADTSQLHKFVTNIDNKYTPLNLHDKQVNHTDKTVSLQEKMNTWASKSLHGRHYADLLQPHVDKDASNAWLKHGTLFPETESFMLAIQDQVINTANYRKYITKELSQKSDLCRQCKCSPETIQHITGACKILVQTDYKHRHDQIASIVHQHLAQSSNFILNKQPYYKYKPETILENKKFKLYWDRTILTDKTIHYNRPDITLHDKSNHIAYLIDIAVPNTHNLQSTISDKMSKYRDLAIEIKKQWQVKTVHIVPIVISSTGVVPKVLFNSFNILNIPSNISILLQKASILNTCRIVRKFLNIS

SEQ ID NO: 2845 - protein, 1333 aa, Yanguna spatiosa
MQNKNPKHIKYNLRSLTQGKSVKRSIRTSVTDDIQSSYFTRTSSPESLFESLASSPRSYEQPSPTCSLSINSSPRSVDVVQEAIATYPAPITETKRKRRQWTRDMNECIWRAYLIGTELGKRTRGYLDYLYKEFNEKYPEMCATKQRLGDQCRAILRKKLLDETTLANIRQQVIKQLQTINFEHTQTQHQTQNKSGTTRMKWTDEINETILRFYFEITNMEKDMIAYRKKLHDKFKAQYPHLSHISEQRLADQRRVIVNNKMITVDKIQEIRKEVELHFKQTKLTHKTQNKLINSVTSENEEIDEAERGEMHDGEKNDFQENDIDNRSNDETLNHKHIEKQFADIYNSCKNTKPTSRLYIPKQNSSRKLAFIVNTIDQHILPKYLGPEIDFCTLHTLIYVAAYTAAKCNGAKLCQNQIKQHITKKPEWQKRLENKVNELRSYIGRLKEFINGNKSSKILAAVETIKTKYKIHAQYENQNIEPSHFLDTLKQKLNTTANRLRRYMNCTKRKTQNNQFYNNEKLFYKKLYLQPKENVLQTRIPTSEKLRQYWANIWENPIQHNSDINWTESCIKTGIPEMQFEQVTIDTLLQVIKRAHNWKAPGTDHIHNYWYKKLTCVHSHLHKYINQFIEAPHLMPTFITQGKTYMVPKEGYTDDPAKYRPITCLQTIYKIITACISVNIYSHLNKNNILAEQQKGCRQLSQGCKEQLTIDAITMTQAFKGKKNLHSMYIDYKKAFDSVPHSWLLEILNQYKIHPHITHFLQTSMTNWQTVLNLTFNSTSLTTEPIRIQRGIFQGDALSPLWFCLALNPLSELLNRSNIGYKLTYNKTHYTLSHLMYMDDIKLYASSKENLFLLADLIERFSSDIRMQFGIDKCKIHSVNRGRTINNNYTLQSGEIIDSLNEEVGYRYLGFLQSRQIKHKQIKSDIIKKFKHRLNQILKTELNSRNTFKAINTFAIPVITYSFGIIKWSQTDIAKLQRIINTNLTKHRKHHPKSCTQRLTIPRREGGRGLIDLTNLYHKQIDTLKRYFHSKADTSELHKYVSDIDIKLTPLNLHDKNTQHNERIISSQEKIRVWAGKALHGRHCADLMQPHVDKNASNAWLRYGQLFPETEAFMLAIQDQVINTSNYQKHITKQNLHQSDLCRQCKSAPETIQHISGACKILVQTDYKHRHDQISSIIHQHIAHTCKFIKSKEPYYKYKPETVLENRTHKLYWDRTILTDKTIHYNRPDITLHDKIKNIVYLIDIAVPNTHNLQSSISEKMAKYRDLAIEIKKQWQVQTVHIVPLVISSTGVIPKTLFNSLKILNINPSISNLLQKASILNTCRIVRKFLNVT

SEQ ID NO: 2846 - protein, 1110 aa, Mimoniades nurscia
MIAYRKKLHDKFKEQYPHLSHITEQRLADQRRVIVNNKMITEEKIQEIRREVKLHLKQTEMSHETQNIAINSVIREHKEIEEVGKDGMHTDEDYSYHENDINNLSNDETLIRRRIEKQFSDTFNDFKNTEPTSRPYITKQKLSRKLALIVNTIDQHILSKYLEPEVDFYTLHTLIYVAAYTAVKCNGAKLPQNQNKQIINKKPEWQRRLENKVKELRAYIGRLKEFTNGNRSSKILRTVETIKTKYKIHAQYENQNIEPSHFLDTLKQKLNTTANRLRRYMNCTKRKTQNNQFYNNEKLFYKKLCLLPEETELQTSVPTSEKLRQYWANIWENPTQHNPDTNWTESCINIGIPEMQFEQITEETLLQVIKRTHNWKAPGTDHIHNYWYKKFTCTYSHLHKYINQFIQTPHLMPTFITEGKTYMVPKEGYTDDPAKYRPITCLQTIYKIITACISVNIYSHLNKHNILAEQQKGCRQLSQGCKEQLTIDAIAMTQASKGKKNIHSMYIDYKKAFDSVPHSWLLEILNLYKIHPHIRHFLKTSMKNWHTVLNLNFNSTSLTTEPIRIQRGIFQGDALCPFWFCLALNPLSELLNRSNIGYKLTYSKTHYTLSHLMYMDDIKLYASSKENLFRLADLTERFSSDIKMQFGIDKCKILSINRGRIIKNNYTLQSGEIIDSLNEKFGYRYLGFFQCRQINHKQIKDDIIKKFKYRLNKILKTDLNSRNTFKAINTFAIPVITYSFGIIKWSQTDIAKLQRIINTNLTRHRKHHPKSCTQRLTIPRREGGRGLIDLANLYHKQIDTLRRYFHAKSDTSQLHKYVTNIDLNFTPLNLYNRHTQHNDRITSSQEKIKAWASKSLHGRHCADLMQSHVDKNASNAWLRYGQLFPETEAFMLAIQDQVINTSNYQKYITKQILHQNDLCRQCKSASETIQHITGACKILVQTDYKHRHDQIASIIHQQIAHTSKFIATKEPYYKYKPETVLENKTYKLYWDRTILTDKTIHHNRPDITLHDKLKNTVYLIDIAVPNTHNLQSSITEKITKYRELAIEIKKQWQVQTVHIVPIVISSTGIIPKTLFNSLKILNISSNTSHLLQKASILNTCRIVRKFLSIT

SEQ ID NO: 2847 - protein, 1192 aa, Heliopetes ericetorum
MEASKQRLGDQCRAIVRNKLLHQSILDEIKNQVSLEYASSTTNDTSQNTQRFGQTQQSLNSQGIGRMRWSDEINESIIQLYFEASHLEQDMTAYRKKLHGKFTALYPHLFFVTEQRLADQRRSIVHNKMLTKERIEEIKRKVEVSMKEKEISSSKHNILLNESIADQQTNVCLHTSQLQLETIENRTEHIETSLTNTMYIEEQFVKSFNRFKDTPPTARPHIPKQKTSRKLTNIVHNINKYILPKYLSSQIDFNTLHTLTYISAYTAASCNNKKFDYHNNESYKRKPAWQTRLENKVKELRSQIARLIQYIRGNRSWKIIAAVDKIKEKFKIHAQYEKENNKPHLYLDTLKQQLNKTANRLRRYINCSKRKTQNAQFYNNEKNFYRKMKTDQETTEPLSDIPTPDDYRHYWANIWENPLTHNKNVEWLKNISGKSDIEMQFEQIDAGTLIQVINRLHNWKAPGTDHIHNYWYKKFTCLHPYIHKYINQFIQSPDTMPKFITHGKTYMIPKDTDTKNPAKYRPITCLQTIYKIITACVAESIYLHLDKFNILAEQQKGCKKYSQGCKEQLTIDSVVMTEAFRRKKDIHTMYIDYRKAFDSVPHSWLLETLHLYKIHPQIIKFLETTMKNWQTVLNLNYKNKTLTTEPIFIKRGIFQGDALSPLWFCLALNPLSELLNNSKKGYKLAENTYTLSHLMYMDDIKLYGSCEEELFYLAGLTETFSTDIHMEFGIDKCKIHSIRLGRTVNNSFILQSGESIEPINKEIGYKYLGFQQSNQIHHIQTKSTLTKHFRHRLNQILKTELNSRNLIKAINTFAIPTLTYSFGVIKWSKSDLNKLQRIINTSLTKHRKHHPKSCIQRLTLSRREGGRGLIDLTNLHNTQISTLRKYFFSRSKTSMLHKHISNTDKKYTPLNLHDRTPQQNENIINFQEKLATWAGKTLHGRHYADLNQPHVDKKESNAWLKCGQLFPETEAFILAIQDQVINTANYRKYITKELSQKSDLCRHCKVAPETIQHITGACKVLVQNDYKHRHDQIASIIHQHLAHSCKFISCKEPYYKYKPQIVLENKEFKLYWDRTILTDRTIHFNRPDITLHDKQNKTAYLIDIAVPNTHNLQSAISEKLTKYRDLAIEIKKQWQVQTVNIVPIVISTTGVIPKILLNSLKTLNIHPQNLHTLQKAAILNTCRIVRKFLNLS

SEQ ID NO: 2848 - protein, 1322 aa, Potamanaxas melicertes
MRLRSREIPQAGTGANSNGESRPESSSSGCPTYSGGGNVSHMTAQFHTVAVEPTPRPTSISPTSIVESLFESPASSPRSYEVMDQCSTRSTTLSPTSVDVVQEAVATNLAPTTGIVKNKRRQWTDEMNTFIWRQYLIGTQLEKHTRGYLGYLHQEFTKKYPEMEASRQRLGDQCRAIVRNKYLNQDILDNIRNQVRKQLHEAHLQSDITNPHIQHDLHSLPNITRITWTDEINETILRIYFETTNLEKDMTAYRRKLHDKFKIHYPQLSHISEQRLADQRRVIIRNKMLTVKRIEEIKRETEIKLKHLELSHDSQYIPPHNTSQILNTVTNEDQTEVTYLTQGSTDLDDEHQDTHKNDRNVNSKIHKDIDEQFRESLGEFKNTGPTCRPYIPKQHSSKKFALIVQYINQHILPKHLSPDIDFNSLQTLIYVAAYTAAKCNGTKFQPIKNETQHKRKPPWQKRLETRVETLRSQIARLTEFIRGNRSSKIVAAVQTIKNNYGNHAKYEDKNIEPNHYLDTLKQKLNLTANRLRRYLNCTKRKVQNSQFCNNEKLFYRNLSFNQRETESATTIPTSAELRNYWANIWENPVQHNANASWISTLKNTNIPNMQFEEITQDILTHVIRRTQNWKAPGTDHIHNYWYKKLTCTHSHIQKYVNQFVKEPQTMPAYITHGKTFMIPKDQHSADPSKYRPITCLQTIYKILTGCISDHIYSHLNANNILSEEQKGCKKRSQGCKEQLTIDAIAMTQAYRKKKNIHSMYIDYKKAFDSIPHSWLIEILHLYKIHPNITNFLSTTMSNWQTVLNLNNSVISTPISIQRGIFQGDALSPLWFCMALNPLSELLNKTNGGYRLSYNRSHYTLSHLLYMDDIKLYATHKDELFHLADLTEIFSKDIQMQFGIDKCKVFSVHHGQSLNENYTLQSGQLVDPLNEEVGYKYLGFHQSKQIHHKQIKKSISKKFKHRLIQILKTELNSRNTIKAINTFAIPVVTYSFGIIKWSQTDLIKLQRTINTTLTKHRKHHPKSCIQRLTLARSEGGRGLIDLSNLYNKQINTLRQYFHYKADSSELHKYVAAIDTKFTPLNLHDTTVRSDIQTTQKKIETWASKSLHGRHHADLTQPHVDKDASNAWLRYGELFPETEAFMLAIQDQVISTANYRKHITKELQHNDLCRQCKSASETIQHVTGACKILVQTDYRHRHDQIASIIHQHLAHTCKFIPKKVPYYKYKPETVLENKLYKLYWDRTILTDKTIHYNRPDITLHNKLDNTAYLIDIAVPNSHNLQSTINDKMSKYIDLAIEIKKQWQVQRVHIVPIVISSTGIIPKAL

SEQ ID NO: 2849 - protein, 1325 aa, Atarnes sallei
MNTINPKNIKYNLRSLSLVTGTRSLQANNNQNQVDDTVDHRTSSSLLSESLVSSPHTYESSSTYTRSTNLSPRSIDVVQQAIATNAAPTTGTATYKRRKWTEEMNKFIWRTYLIATNLEKNIKGYLDYLHPEFTQKYPEMNASRQRLGDQCRAIVRNKLLHQNVLDEIRLEVSLEHASKNTCINTNRTPHNTQQGISRMKWSDEINETIIKLYFESTNLEQDFTAYRKKMYHKFIEQYPDLSFLTEQRIADQRRSITHNKLVSSKKVTEIKNQVQLQIANKNTTQITQPFNTEIITDIDTVHRHMETHYTDNHHKGKNIDNSENNKNRRKIEEDFKKNLDNFKNSNPTSRPHIPKQKTSRKLAETVHYINQEILPKYLLPDIDFNLLHTLIYVAAYTSAVNNGTKFNVSLLRQPKSKPAWQQRLEFKINDLRLNIGRLTQYIKGNRSHKIIATVDKIRKKYEKHAEYEPMNSKPNLFLDTLKQKLNITANRLRRYLNCTKRKTQNSQFYNNEKEFYRKLSKVQENNKSTCIPPTAHELRQYWANIWENPVVHNLDSNWFHNSNESNFTTMAFEEITENVLHQVINRTHNWKAPGTDQIHNYWYKKLTSTHPHIHRHINLFIQTPSIMPSFITQGKTYMLPKDIDTKDPAKYRPITCLQTLYKIITGCITEYIYSHISTHNILAEQQKGCRRNSQGCKEQLTIDSIIMSQALKHKRNIHSMYIDYRKAFDSVPHSWLLETLHNYNIHPRLIKFLKVSMQNWQTVLNLYHNTQLVTTSPIQIKRGIFQGDALSPLWFCLALNPLSDTLNQSKVGYKITNNNSHCLVSHLMYIDDIKLYGSNKKELFRLADITERFSTDIRMQFGIDKCKIHSIQRGRTLSNSYMLKTGETIECMNAQMSYRYLGFNQSNQIHHKEIKYNLTKHFKNRLNQILKTELNARNIVKAVNTFAIPVLTYSFGIIKWSQTNLIQMQRIINTSLTKYRKHHSKSCIQRLTLPRKEGGRGIIDLTNLHNRQVQTLRQYFHSKANTSKLHKFVSDSDNKMTPLNLNDRSRQNNERTINSQEKLDAWASKSLHGRHYSDLNLSHVDKEESNAWLKRGELFPETEAFMIAIQDQVISTANYRKHITKEISNQSDLCRLCKSSPETIQHVTGACKVLVQNDYKHRHDQIASIIHQHLAHYYKFIQFKEPYYKYKPQTVLENKTHKIYWDRTILTDRTIHFNRPDITIHDKQNSTAYIIDIAIPNTHNVQTTFTEKLTKYKDLAVEIQKQWRVQTVQIVPIVISTTGVIPKSLKHSLNTLHINTRITYTLQKASILNTCRIVRKFLNIQ

SEQ ID NO: 2850 - protein, 1255 aa, Charidia lucaria
MNTTNPKNIKYNLRSLSRVPGTRSLQATKDQNQVDDAVDHHTSSSLLTGSLASPPFTHESSSTYSRSTNLSPRSIDVVQEAIATNSAPTTGTTTYKRRKWTEEINKFIWRAYLIATNLEKNIKGYLDYLHPKFTQKYPEMNASRQRLGDQCRAIIRNKLLHQNVLDDIRLEVSQEHTGESTFIHTNDSSHNTQQRITRMKWSDEINETIIRLYFESTNLEQDFTAYRTKMHHKFIEQYPHLSFLTEQRIADQRRSITHNKMISSKKITEIKNQAQLQIANQNTSHITQDLNTELITDIEHRHVDTHYTDTQHKEENIDNSENYKNRRKIDEQFKKNFEHFKNSNPTSRPYIPKQKTSRKLAETVHYINQEVFPKYLFPDIDFNLLHTLIYVAAYTAEENNGTKFNDSRIKQPKRKPAWQQRLEFKIKELRLNIGRLTQYIKGNRSYKIIATVDIIRKRYGKHAEFEPINNNPQLFLDTLKQKLNITANRLRRYVSCTKRKTQNSQFYNNEKEFYRKLGKVQEINESTCIPRTVHELRQYWANLWENPVEHNEDSNWFKNFNKSNITTMAFEEVTENVLYQVIKRTHNWKAPGTDQIHNYWYKKLTSTHPHIHRHINLFIQTPSTMSLFITQGKTYMLPKDNDTKDPAKYRPITCLQTIYKIITACITEYIHSHINTHNILAEQQKGCRRNSQGCKEQLTIDSIIMSQALKHKRNIHSMYIDYRKAFDSVPHSWLLETLNNYNIHPRLITFLKSSMQNWQTVLNLYHNTTLITTSSIQIKRGIFQGDALSPLWFCLALNPLSDSLNQSKVGYKITNNSSHCLVSHLMYIDDIKLYGSNKKELFRLADITERFSTDIRMQFGIDKCKIHSIHRGRTLSNSYTLKTGENIECMNAQMSYRYLGFNQSKQIHHKQIKSNLTKHFKCRLNQILKTELNSRNIVKAVNTFAIPVLTYSFGIIKWSQTNLTQLQRIINTSLTKYRKHHSKSCVQQLTLPRKEGGRGIIDLTNLHNRQVQTLRQYFHSKANTSELHKFISESDHKMTPLNINNRAKQNNERTINIQEKLDAWASKSLHGRHYNDLHQSYVDKEESNAWLKRGELFPETEAFMIAIQDQVISTANYRKHITKEIASQSDLCRLCKSSPETIQHVTGACKVLVQNDYKHRHDQVASIIHQHLAHYYQFIPFKEPYYKYKPQTVLENKTHKIYWDRTILTDRTIHFNRPDITIHDKQNSTAYIIDIAIPNMYTQSTNNIYRETHKV

SEQ ID NO: 2851 - protein, 1403 aa, Oechydrus chersis
MRLRNRQLPQAGTLPGESRPESTGSGCPSYSGGGNVSHTAVQSHSAAVDKKPSSQTPNPLSSPLSSRSSLFPLKYNLRSLSRKTRNTETQIFPTQDLTSSYVQTSYPTRTSTPDTLFDSLASSPRSYEAPSRSRSTTVSPRSVDVVQEATAIQPVPTTGMKKRLKWTVDMNKFIWRTYLIATELERNTRGYLDYLHQKFSQMYPEIDASRQRLGDQCRAIIRNKLLNQTILDQIKHQVSLDYPAFNSHNHTQNPNQHTKQRDETQNSLGMMRIRWSNDLNEAIIRIYFEVSNLEHDLTAYRKKMHDKFKEQYPHLPFITEQRLADQRRAIIHNKMITTARIEEIRKEVELSMEQLQNIAENALHISIQNKKTEVEDLRTHDNASEICYGQNTDITDKTINKNKSNHAHIEKEFQIILERFKNSDPTSRPHIPKQKCSHKLNSIVNIINRHILPKYLTQDIDFNSLHTLIYVAAFTATICNGAKFCDNQSRSSKRKPIWQIRLESKISELRSHIARLTQYIRGNRSHKILMAVDIVRRKYKVHSQYEHENNKPQHFLDTLKQKLNTTANRLRRYMNCTKRKTQNSQFYNNEKTFYRKLMTDQEHKEPTAMGTPTIDALRQYWANIWENPVTHNENASWLSDRDDPIAEMEYKQISESILIQVINRTHNWKAPGTDQIHNYWYKKLTCTHPHIHKHINQFIQTPTIMPSFITHGKTFMLPKDTDIENPAKYRPITCLQTIYKIITACISESIYSHLNKSNILAEQQKGCRKYSQGCKEQLTIDAIVMMQAYKRKRNIHTMFIDYRKAFDSVPHSWLIKILHYYKIHPQIITFLESSMSNWQTILNIYHKNTSLTTKPIHIKRGIFQGDALSPLWFCLALNPLSELLNNSKTGYKLTYNRSYCILSHLMYMDDIKLYGSSKEELFRLADLTESFSNDIKMQFGIDKCKINSVRRGRTLNTMYTLQTGEKIESINKQIGYKYLGFHQSNQIHHKLTKNTLTKQFKSRLNQILKTELNSRNIIKAINTFAIPLLTYSFGVIKWSQSDLLKLQRIINTNLTKYRKHHPKSCLQRLTLPRCEGGRGLIDLTNLHNTQVNTLRKYFHSQADKSKLHKYAIDADFNYTPLNLHDRSTQRNERITTSKEKLDAWASKTLHGRHFAHLNEAHVDKTESNAWLKCGQLFPETEAFMLAIQDQVVNTANYRKYITKEISQQSDSCRQCKSSPETIQHITGACKILAQTDYRHRHDQIASIIHQHLAHSCKFINCKEPYYKYEPQIVLENKTYKLYWDRTILTDRTIHYNRPDITLHDKKNNTAYLIDIAVPNTHNLQSTVSEKMSKYKDLAVEIRKQWQLQNVYIVPIVLSTTGVIPKILINSLKTLNIPSHIMYTLQKASILNTCRIVRKFLNIP

SEQ ID NO: 2852 - protein, 1102 aa, Pythonides amaryllis
MYGKFKTLYPHLSFISEQRIADQRRAIVNNKMLSEEKIEEIRREVQLEMRHLQIKQTNLNTLQVATESGNEVMENREEITTAESYISNIHIENVITCQDKNNLNGKFIEKEFTKYLDQFSNSIPTSRPHIPKQKTSRKFASIVHYINTHILPKFLNPEIDFDTLHTLIYVSAITAATCNGTKFDKHETKRFRRKPRWQHRLEDKIRELRANIARLTQYINGNRSYKILATVDVIREKYKNHAKFEHQNNKPSLFLDTLKQKLNVTANRLRRYINCTRRKTQNAQFQNNEKSFYRKLSNNQENNGPISVAPTPHELRQYWASIWEEPVTHNKDANWLNHHNDNLIADMSFEQISETVLIKIINHSHNWKAPGTDQIHNYWYKKLTSTHSHIHKHINKFIQSPNIMPSFITHGKTYMLPKDSDTKDPANYRPITCLQTIYKIITSCISELIYSHLLKYNVLAEQQKGCRKQSQGCKEQLTIDSIVSSQAFKQKRNIHTMYIDYKKAFDSVPHSWLLETLHNYKIHPQLISFLETSMQKWQTVLNINHHDSLLTTEPINIRRGIFQGDALSPLWFCLALNPLSELLNESKAGYKLTYDGSHCTLSHLMYMDDIKLYGSSKKELFKLVDITERFSDDIQMQFGINKCKIHSIKRGRTINTSYPLKTGKSIECLDSNIGYKYLGFHQSNKIHYKKEKSNLTKQFKHRLKQILKTELNSYNTFKAINTYAIPVLSYSFGIIKWSQTDLIKLQRIINTTLSKHRKHHPKSCIQRLTLPRKEGGRGLIDIVNLHNRQIQTLRKYFHTKADSSELHKYTSYSDHKFTPLNLHDKNTQRNERAIKSEEKIDTWASKSLHGRHYADMNQPHVDKNESNAWLRNGQLFPETEAFMMAIQDQIINTANYRKHITKEIANQSDLCRQCKSSSETIQHITGACKMLVQTDYKHRHNQVASIIHQHLAHFYKFLDRKEPYYKYNPQTVLENKTHKLYWDRTILTDRTIHFNRPDITLHDKHNETVYLIDIAVPNTHNIQSTITEKLSKYRDLAAELKKQWHVHTVHIVPIVISTTGVIPKSLISNLKTLQIQPNISHTLQKACILNTCRIVRRFLNVN

SEQ ID NO: 2853 - protein, 756 aa, Eburuncus unifasciata
MTFEEITENVLHQVINRTHNWKAPGTDQIHNYWYKKLTSTHPHIHRHINLFIQTPSTMPTFITQGKTYMLPKDIDTKDPAKYRPITCLQTLYKIITACITEYIYSHISTHNILAEQQKGCRRNSQGCKEQLTIDSIIMSQALKHKRNIHSMYIDYRKAFDSVPHSWLLETLNNYNIHPRLITFLKISMQNWQTVLNLHHNTNLVTTSPIQIKRGIFQGDALSPLWFCLALNPLSDSLNQSKVGYKITNNSSHCLVSHLMYIDDIKLYGSNKKELFRLADITERFSTDIQMQFGINKCKIHSIQRGCTLSNSYTLKTGETIECMDAQMSYKYLGFNQSNQIHHKEIKSNLTKHFKCRLNQILKTELNSRNIVKAVNTFAVPVLTYSFGIIKWSQTNLIKLQRIINTSLTKYRKHHSKSCLQRLTLPRKEGGRGIIDLTNLHNRQVQTLRQYFHSKANISKLHKFVSDSDHKMTPLNLNDRSRQNNEHTINIQEKLDAWASKSLHGRHYKDLNLSHVDKEESNAWLKRGELFPETEAFMIAIQDQVISTANYRKHITKEISNQSDLCRLCKSSPETIQHVTGACKVLVQNDYKHRHDQIASIIHQHLAHYYQFIPFKEPYYKYKPQTVLENKTHKIYWDRTILTDRTIHFNRPDITIHDKQNNTAYIIDIAIPNTHNIQTTFTEKLTKYKDLAAEIRKQWRVQRVQIVPIVISTTGVIPKSLKYSLNTLHINTRITHTLQKASILNTCRIVRKFLNID

SEQ ID NO: 2854 - protein, 1325 aa, Paramimus stigma
MNTTNPKNIKYNLRSLSRVLGTRSLQATNDQNQVDDTVDHHTSSSLISGSLASSPYAYESSSAYTQSTNLSPRSIDVVQEAIAANAAPTTGTTYKRRKWTEEINKFIWRTYLIATNLEKNRKGYLDYLHPKFNQKYPEMNASRQRLGDQCRAIIRNKLLHQNVLDEIRLEVISIEHVGESTCTHTNDTLHDTQQRITRMKWNDAINETIIRLYFESTNLEQDFTAYRTKMHQKFIEQYPHLSFLTEQRIADQRRSIIHNKMISSEKLIEIKSQVQLQIANQNTSYIAQSFNNEPITDIDIEHRHLETHYTDNGHREKNIDNSENNKNRRKIEENFRENLEHFKDRNPTSRPYIPKQKTSRKLAETVHYINQEILPQYLFSDIDFNLLHTLIYVAAYTAAENNGTKFNDSRLKQPKRKPAWQQRLEFKIKELRLNIGRLTQYIKGNRSYNIIATVDIIRKRYGKHAEYEPINNNPHLFLDTLKQKLNITANRLRRYLSCTKRKTQNSQFYNNEKQFYRKLGKVQENNESTCISPTIHELRQYWANLWENPVKHNIDSNWFRNFSNPNITTMAFEEVTEDVLYQVINRTHNWKAPGTDQIHNYWYKKLTSTHSHIHRHINLFIQTPSTMPLFITQGKTYMLPKDNDSKDPAKYRPITCLQTIYKIITACITQYIYSHISTNNILAEQQKGCRRNSQGCKEQLTIDSIIMSQAFKHKRNIYSMYIDYRKAFDSVPHSWLIDTLNNYNIHPRIITFLENSMQNWQTVLNLYHDTTLLTTSPIRIKRGIFQGDALSPLWFCLALNPLSDCLNQSKVGYKITNNNSHYLASHLMYIDDIKLYGSNKKELFRLADITERFSTDIRMQFGIDKCKIHSIHRGRTLSNSYTLKTGETIECMNAQMSYRYLGFNQSKQLHHKQIKSNLTKHFKCRLNQILKTELNSRNIVKAVNTFAIPVLTYSFGIIKWSQTDLTQLQRIINTSLTKYRKHHSKSCVQRLTLPRKEGGRGIIDLKNLHNRQVQTLRQYFHSKANISELHKFISESDHKMTPLNLNNRVRQNNERTINIQEKLDAWASKSLHGRHYNDLHQSYVDKEESNAWLRHGELFPETEAFMIAIQDQVISTANYRKHITKEIASQSDLCRLCKSSPETIQHVTGACKVLVQNDYKHRHDQVAAIIHQYLAYHYHFIPFKEPYYKYKPQTVLENKMHKIYWDRTILTDRTIHFNRPDITIHDKQNSIVYIIDIAIPNTHNLQTTFTEKLTKYKDLAVEIQKQWRVQTVQIIPIVISTTGVIPKSIKYSLNTLHINTRIIYTLQKASILNTCRIVRKFLNIE

SEQ ID NO: 2855 - protein, 1365 aa, Erynnis tages
MRLRNRDIPQAGTGANSTGESGPGASTPGCPTYSGGGNVSHMTAQSCTAAANPTPRSNSSTPTSIVESLFESPASSPRSYEDIDQYSTRSSTLSPESVDVVQEAIATNLVPANGIAKSKRRQWTDDMNKFIWRKYLIASQLEKQTRGYLNYLHEEFTKKYPEMEASRQRLGDQCRAIVRNKLLDQSILDDIRNQVRTELHMTDLQTEITNSQPLHKLHSLSNTTRMTWTDEINETILRIYFETTNLEKDMTAYRQKMHEKFMTHYPQLSHISEQRLSDQRRVIMRNKMLKVDRIEEIRRDIELQLNQPKLSDNTHSMILNTLQSHTENTIISEEEIEDVTNKVQETTDTDNEPHKRHKNDKYDGKMLCKDIDTQFTEKLGEFENTDPTCRPYIPKQKSSKKLAIIVQHLNQNTLPRYLHSDIDFNTLQTLIYVAAYTAAKCNGTKLQKTKARKQIRRKPSWQIRLENKVETLRAQIARLIEFIRGNRSQKILAAVETIKTKYRIHARYEDENKEPNQFLDTLKQKLNVTASRLRRYLNCTKRKTQNNQFCNNEKNFYRNLTLNQKETESAKKVPTTDELRNYWANIWENPTQHNVEANWIKTLDDTEIPNMQFEQITKDTLIQVIKRTHNWKAPGIDHIQNYWYKKFTCTHLHIHKYINKFIKMPHTMPAYITHGKTFMIPKDHHTEDPSKFRPITCLQTIYKIITACISDHIYAHLNANNILAEQQKGCRKLSQGCKEQLTIDAIAMTQAFRKKKNIYSMFIDYKKAFDSVPHSWLIQILHLYKIHPDITNFLSTTMSNWQTVLNINTNNTSTTTSTPISIQRGIFQGDALSPLWFCMALNPLSELLNKTEVGYKLTHDRTHYTLSHLLYMDDIKLYATSKEELYNLADLTEKFSDDIGMQFGIDKCKVFSIQRGKTINTNFILQNGEIIDSLNEEAGYKYLGFHQSKQIHHKQIKHSITKKFKHRLNQILKTELNSRNIFKAINTFAIPVVTYSFGVIKWSQTDLIKLQRIINTTLTKHRKHHPKSCIQRLTLPRCEGGRGLIDLTNLYNKQIDTLRKYFHDKADSSPLHKYVSAIDNQYTPLNLHDSNRNNVKIISSQEKNKTWASKSLHGRHHADLTQPHVDKDASNEWLRYGELFPETEAFMLAIQDQVISTANYRKHITKELQTNDLCRQCKCAPETIQHVTGACKILVQTDYRHRHDQIASIIHQNLAYTCKFIDNKQPYYKYKPVTSLENKTYKLYWDRTLLSDRTIHYNRPDITLHNKLSNTAYLIDIAVPNSHNLQSTINEKMSKYIDLAIEIKKNWQVQRVHIVPIVISSTGIIPKTLFNSLKTLNINSKTSITLQKAAILNTCRIVRKFLNIE

SEQ ID NO: 2856 - protein, 1365 aa, Erynnis tages
MRLRNRDIPQAGTGANSTGESGPGASTPGCPTYSGGGNVSHMTAQSCTAAANPTPRSNSSTPTSIVESLFESPASSPRSYEDIDQYSTRSSTLSPESVDVVQEAIATNLVPANGIAKSKRRQWTDDMNKFIWRKYLIASQLEKQTRGYLNYLHEEFTKKYPEMEASRQRLGDQCRAIVRNKLLDQSILDDIRNQVRTELHMTDLQTEITNSQPLHKLHSLSNTTRMTWTDEINETILRIYFETTNLEKDMTAYRQKMHEKFMTHYPQLSHISEQRLSDQRRVIMRNKMLKVDRIEEIRRDIELQLNQPKLSDNTHSMILNTLQSHTENTIISEEEIEDVTNKVQETTDTDNEPHKRHKNDKYDGKMLCKDIDTQFTETLGEFENTDPTCRPYIPKQKSSKKLAIIVQHLNQNTLPRYLHSDIDFNTLQTLIYVAAYTAAKCNGTKLQKTKARKQIRRKPSWQIRLENKVETLRAQIARLIEFIRGNRSQKILAAVETIKTKYRIHARYEDENKEPNQFLDTLKQKLNVTASRLRRYLNCTKRKTQNNQFCNNEKNFYRNLTLNQKETESAKKVPTTDELRNYWANIWENPTQHNVEANWIKTLDDTEIPNMQFEQITKDTLIQVIKRTHNWKAPGTDHIQNYWYKKFTCTHLHIHKYINKFIKMPHTMPAYITHGKTFMIPKDHHTEDPSKFRPITCLQTIYKIITACISDHIYAHLNANNILAEQQKGCRKLSQGCKEQLTIDAIAMTQAFRKKKNIYSMFIDYKKAFDSVPHSWLIQILHLYKIHPDITNFLSTTMSNWQTVLNINTNNTSTTTSTPISIQRGIFQGDALSPLWFCMALNPLSELLNKTEVGYKLTHDRTHYTLSHLLYMDDIKLYATSKEELYNLADLTEKFSDDIGMQFGIDKCKVFSIQRGKTINTNFILQNGEIIDSLNEEAGYKYLGFHQSKQIHHKQIKHSITKKFKHRLNQILKTELNSRNIFKAINTFAIPVVTYSFGVIKWSQTDLIKLQRIINTTLTKHRKHHPKSCIQRLTLPRYEGGRGLIDLTNLYNKQIDTLRKYFHDKADSSPLHKYVSAIDNQYTPLNLHDSNRNNVKIISSQEKNKTWASKSLHGRHHADLTQPHVDKDASNEWLRYGELFPETEAFMLAIQDQVISTANYRKHITKELQTNDLCRQCKCAPETIQHVTGACKILVQTDYRHRHDQIASIIHQNLAYTCKFIDNKQPYYKYKPVTSLENKTYKLYWDRTLLSDRTIHYNRPDITLHNKLSNTAYLIDIAVPNSHNLQSTINEKMSKYIDLAIEIKKNWQVQRVHIVPIVISSTGIIPKTLFNSLKTLNINSKTSITLQKAAILNTCRIVRKFLNIE

SEQ ID NO: 2857 - protein, 1079 aa, Erynnis brizo
MRNKMLKVERIEEIRRDIELQLNQTKLSDNTQTMTLNTEHMENTIISEEEIEETTNPVEETTDADNEPHKGHKNDKCDEKMICKDINTQFIETLDEFDNTDPTCRPYIPKQKSSKKLAIIVQHLNQNILPKYLHSDIDFNTLQTLIYAAAYTAAKCNGTKLQKTKTKKQIRRKPSWQIRLENRVETLRAQIARLIEFIRGNRSPKILVAVETIKTKYRIHARYEEENKEPNQFLDTLKQKLNVTASRLRRYLNCTKRKTQNSQFCNNEKNFYRNLTLNEKETETAKKVPTTDELRNYWASIWENPTQHNAEANWIKTLDDTEIPHMIFEQITKDTLIQVIKRTHNWKAPGTDHIHNYWYKKFTCTHLHIHKYVNQFIKTPHTMPAYITHGKTFMIPKDHNTEDPSKFRPITCLQTIYKIITACISDHIYTHLNANNILAEQQKGCRKLSQGCKEQLTIDAIAMTQAFRKKKNIHSMYIDYKKAFDSVPHSWLIQILHLYKIHPDITNFLSTTMSNWQTVLNINTNNTLVTSTPISIQRGIFQGDALSPLWFCMALNPLSELLNKTEVGYKLTHDRTHYTLSHLLYMDDIKLYATSKEELFILADLTEKFSDDIGMQFGIDKCKVFSIHNGKTINTNFILQNGEIIDSLNEEVGYKYLGFPQSKQIHHKQIKHSITKKFKHRLNQILKTELNSRNTFKAINTFAIPVVTYSFGVIKWSQTDLIKLQRIINTTLTKHRKHHPKSCIQRLTLPRREGGRGLIDLTNLYNKQIDTLKKYFHDKTDSSPLHKYVSAIDIKYTPLNLHDSNQNNVKIISSQEKNQTWASKSLHGRHHADLTQPHVDKDASNEWLRYGELFPETEAFMLAIQDQVISTANYRKHITKELQTNDLCRQCKCAPETIQHVTGACKILVQTDYRHRHDQIASIIHQNLAYTCKFIDSKQPYYKYKPVTSLENKTYKLYWDRTLLSDRTIHYNRPDITLHNKLSNTAYLIDIAVPNSHNLQSTINEKMSKYIDLAIEIKKNWQVQKVHIVPIVISSTGIIPKTLFNSLKTLNIHSKISVTLQKAAILNTCRIVRKFLNIE

SEQ ID NO: 2858 - protein, 1365 aa, Erynnis tages
MRLRNRDIPQAGTGANSTGESGPGASTPGCPTYSGGGNVSHMTAQSCTAAANPTPRSNSSTPTSIVESLFESPASSPRSYEDIDQYSTRSSTLSPESVDVVQEAIATNLVPANGIAKSKRRQWTDDMNKFIWRKYLIASQLEKQTRGYLNYLHEEFTKKYPEMEASRQRLGDQCRAIVRNKLLDQSILDDIRNQVRTELHMTDLQTEITNSQPLHKLHSLSNTTRMTWTDEINETILRIYFETTNLEKDMTAYRQKMHEKFMTHYPQLSHISEQRLSDQRRVIMRNKMLKVDRIEEIRRDIELQLNQPKLSDNTHSMILNTLQSHTENTIISEEEIEDVTNKVQETTDTDNEPHKRHKNDKYDGKMLCKDIDTQFTETLGEFENTDPTCRPYIPKQKSSKKLAIIVQHLNQNTLPRYLHSDIDFNTLQTLIYVAAYTAAKCNGTKLQKTKARKQIRRKPSWQIRLENKVETLRAQIARLIEFIRGNRSQKILAAVETIKTKYSIHARYEDENKEPNQFLDTLKQKLNVTASRLRRYLNCTKRKTQNNQFCNNEKKFYRNLTLNQKETESAKKVPTTDELRNYWANIWENPTQHNVEANWIKTLDDTEIPNMQFEQITKDTLIQVIKRTHNWKAPGTDHIQNYWYKKFTCTHLHIHKYINKFIKMPHTMPAYITHGKTFMIPKDHHTEDPSKFRPITCLQTIYKIITACISDHIYAHLNANNILAEQQKGCRKLSQGCKEQLTIDAIAMTQAFRKKKNIYSMFIDYKKAFDSVPHSWLIQILHLYKIHPDITNFLSTTMSNWQTVLNINTNNTSTTTSTPISIQRGIFQGDALSPLWFCMALNPLSELLNKTEVGYKLTHDRTHYTLSHLLYMDDIKLYATSKEELYNLADLTEKFSDDIGMQFGIDKCKVFSIQRGKTINTNFILQNGEIIDSLNEEAGYKYLGFHQSKQIHHKQIKHSITKKFKHRLNQILKTELNSRNIFKAINTFAIPVVTYSFGVIKWSQTDLIKLQRIINTTLTKHRKHHPKSCIQRLTLPRCEGGRGLIDLTNLYNKQIDTLRKYFHDKADSSPLHKYVSAIDNQYTPLNLHDSNRNNVKIISSQEKNKTWASKSLHGRHHADLTQPHVDKDASNEWLRYGELFPETEAFMLAIQDQVISTANYRKHITKELQTNDLCRQCKCAPETIQHVTGACKILVQTDYRHRHDQIASIIHQNLAYTCKFIDNKQPYYKYKPVTSLENKTYKLYWDRTLLSDRTIHYNRPDITLHNKLSNTAYLIDIAVPNSHNLQSTINEKMSKYIDLAIEIKKNWQVQRVHIVPIVISSTGIIPKTLFNSLKTLNINSKTSITLQKAAILNTCRIVRKFLNIE

SEQ ID NO: 2859 - protein, 1368 aa, Pyrgus malvae
MRLRTRFIPQAGTRKGESRPGPSSSGSPAYSGVGTASHLTAQSSTVTVNKSPSHIVSSPSSYTSTHSLFESVASSPRSYEERLDSRSTTPSSRSVDVAQKASADCSVPTTGTKLKIKRRKWTDDMNKLIWRSYLIATGLEKRTRGYLDYVHQEFSQKFPEMEASRQRLGDQCRAIVRNKLLPQNTLDDIRHEVSIEYPLLTSKTNTFSSSQYPQLNSQTQQTQNHIGPSRMRWSDEVNESIIRFYFETSHLEQDMTAYRKKMHDKFIAHYPNLSFITEQRLADQRRAIVHNKMLTSEKIQEIRKEVELHITHIQTTNHTQETVNISIQEEINNLVTDTVTPISENLCINNSDEEQQDGQWITSNTTKSNNINEIFIEEQFMKAFNRFKNSDPTSRPHIPKQKTSHKLACIVQNINQYMLPKFLTPDIDFNSLHSLIYISAYTAAACNNTNFNNYNKTRYTKKPGWQVRLENKINDLRSLIARLTQYIKGNRSWKILAAVDTIKKKFKIHAQFEQENNTPNLYLDTLKQQLNTTANRLRRYLNCTKRKIQNSQFSHNEKHFYRKLKTNQNQNQSTTRILAPNILRQYWSSIWENPVTHNKNASWLKDCSNNNILEMPFEQIEADTVRHIINRTHNWKAPGTDQIHNYWYKKLTCIHPYIHKFINKFIETPDTMPTFITHGKTYMLPKKADSENPAEYRPITCLQTIYKIITACVAESVYSHLNKFNILAEQQKGCKKYSQGCKEQLTIDSIVMTQAFKRKRNIHSMYIDYRKAFDSIPHSWLLQTLHLYKIHPQLIKFLETSMENWQTELNISFNNTTLTTEPIHIRRGIFQGDSLSPLWFCLALNPLSDLLNNSNMGYKLHKKDCSLSHLMYMDDIKLYGSSKEELFRLADIVETFSRDIHMQFGIDKCKIHSVTRGHTLNTSYTLQSGQTIESLEKEMGYKYLGFVQSNQIHHKHTKHNLTKEFKHRLRQILTTELNSRNLIKAVNTFAIPVLTYSFGVIKWSKSDLLKLQRYINISLTKHRKHHPKSCIQRLTLPRREGGRGLIDLTNLHNKQISTLRNYFHSKIETSVLHKYASDNDKKFTPLNLRDRTTQNNENIISSQEKQKKWANKALHGRHYADLCQPHVDKTESNAWLKYGQLFPETEAFMLAIQDQVINTANYRKYIIKETPQKSDLCRQCKSSPETIQHITGACKVLVQNDYKHRHDQVGSIIHQHLAHTCKFIPNKVPYYKYKPEIVLENKSYKLYWDRTILTDKTVHFNRPDITLHDKHNNIAYLIDIAVPNTHNLQSTISEKMTKYRDLAIEISKQWQVQTVNIVPVVLSTTGVIPKILISSLKTLNINPHISHTLQKAAILNTCRIVRKFLNLT

SEQ ID NO: 2860 - protein, 1368 aa, Pyrgus malvae
MRLRTRIIPQAGTRKGESRPGPSSSGSPAYSGVGTASHLTAQSSTVTVNKSPSHIVSSPSSYTSTHSLFESVASSPRSYEERLDSRSTTPSSRSVDVAQKASADCSVPTTGTKLKIKRRKWTDDMNKLIWRSYLIATGLEKRTRGYLDYVHQEFSQKFPEMEASRQRLGDQCRAIVRNKLLPQNTLDDIRHEVSIEYPLLTSKTNTFSSSQYPQLNSQTQQTQNHIGPSRMRWSDEVNESIIRFYFETSHLEQDMTAYRKKMHDKFIAHYPNLSFITEQRLADQRRAIVHNKMLTSEKIQEIRKEVELHITHIQTTNHTQETVNISIQEEINNLVTDTVTPISENLCINNSDEEQQDGQWITSNTTKSNNINEIFIEEQFMKAFNRFKNSDPTSRPHIPKQKTSHKLACIVQNINQYMLPKFLTPDIDFNSLHSLIYISAYTAAACNNTNFNNYNKTRHTKKPGWQVRLENKINDLRSLIARLTQYIKGNRSWKILAAVDTIKKKFKIHAQFEQENNTPNLYLDTLKQQLNTTANRLRRYLNCTKRKIQNSQFSHNEKHFYRKLKTNQNQNQSTTRILAPNILRQYWSSIWENPVTHNKNASWLKDCSNNNILEMPFEQIEADTVRHIINRTHNWKAPGTDQIHNYWYKKLTCIHPYIHKFINKFIETPDTMPTFITHGKTYMLPKKADSENPAEYRPITCLQTIYKIITACVAESVYSHLNKFNILAEQQKGCKKYSQGCKEQLTIDSIVMTQAFKRKRNIHSMYIDYRKAFDSIPHSWLLQTLHLYKIHPQLIKFLETSMENWQTELNISFNNTTLTTEPIHIRRGIFQGDSLSPLWFCLALNPLSDLLNNSNMGYKLHKKDCSLSHLMYMDDIKLYGSSKEELFRLADIVETFSRDIHMQFGIDKCKIHSVTRGHTLNTSYTLQSGETIESLEKEMGYKYLGFVQSNQIHHKHTKHNLTKEFKHRLRQILTTELNSRNLIKAVNTFAIPVLTYSFGVIKWSKSDLLKLQRYINISLTKHRKHHPKSCIQRLTLPRREGGRGLIDLTNLHNKQISTLRNYFHSKIETSVLHKYASDNDKKFTPLNLRDRTTQNNENIISSQEKQKEWANKALHGRHYADLCQPHVDKTESNAWLKYGQLFPETEAFMLAIQDQVINTANYRKYIIKETPQKSDLCRQCKSSPETIQHITGACKVLVQNDYKHRHDQVGSIIHQHLAHTCKFIPNKVPYYKYKPEIVLENKSYKLYWDRTILTDKTVHFNRPDITLHDKHNNIAYLIDIAVPNTHNLQSTISEKMTKYRDLAIEISKQWQVQTVNIVPVVLSTTGVIPKILISSLKTLNINPHISHTLQKAAILNTCRIVRKFLNLT

SEQ ID NO: 2861 - protein, 1368 aa, Pyrgus malvae
MRLRTRIIPQAGTRKGESRPGPSSSGSPAYSGVGTASHLTAQSSTVTVNKSPSHIVSSPSSYTSTHSLFESVASSPRFYEERLDSRLTTPSSRSVDVAQKASADCSVPTTGTKLKIKRRKWTDDMNKLIWRSYLIATGLEKRTRGYLDYVHQEFCQKFPEMEASRQRLGDQCRAIVRNKLLPQNTLDDIRHEVSIEYPLLTSRTNTFSSSQYPQLNSQTQQTQNHIGPSRMRWSDEVNESIIRFYFETSHLEQDMTAYRKKMHDKFIAHYPNLSFITEQRLADQRRAIVHNKMLTNEKIQEIRKEVELHITHIHTTNHTQETVNISIQEEINNLVTDTVTAISENLCINNSDEEQQDGQWITGNTTKSNNINEMFIEEQFMKAFNRFKNSDPTSRPHIPKQKTSHKLACIVQNINQFIIPKFLTPDIDFNSLHSLIYISAYTAAACNNTNFNNYNKTRHTKKPGWQVRLENKVNDLRSLIARLTQYIKGNRNWKILAAVDTIKKKFKIHAQFEQENNTPNLYLDTLKQQLNTTANRLRRYLNCTKRKTQNYQFSHNEKHFYRKLKTNQNQNQSTTRIPAPDVLRQYWSSIWENPVTHNKNASWLKDCSNNNILEMPFEQIDANTVRHIINRTHNWKAPGTDQIHNYWYKKLTCIHPYIHKFINKFIETPDTMPTFITHGKTYMLPKKADSENPAEYRPITCLQTIYKIITACVAESVYSHLNKFNVLAEQQKGCKKHSQGCKEQLTIDSIVMTQAFRRKRNIHSMYIDYRKAFDSIPHSWLLQTLHLYKIHPQLIKFLETSMENWQTELNISFNNTTLTTEPIHIRRGIFQGDALSPLWFCLALNPLSDLLNNSNMGYKLHKKDCSLSHLMYMDDIKLYGSSKEELFRLADIVETFSRDIHMQFGIDKCKIHSVTRGQTQNTSYTLQSGETIESLEKEMGYKYLGFVQSNQIHHKNTKHNLTKEFKHRLRQILTTELNSRNLIKAVNTFAIPVLTYSFGVIKWSKSDLLKLQRNINISLTKHRKHHPKSCIQRLTLPRREGGRGLIDLTNLHNKQISTLRNYFHSKIETSVLHKYASDNDKKFTPLNLRDRATQNNENIISSQEKQKEWANKALHGRHYADLCQPHVDKTESNAWLKYGQLFPETEAFMLAIQDQVINTANYRKYIIKETPQKSDLCRQCKSSPETIQHITGACKVLVQNDYKHRHDQVGSIIHQHLAHTCKFIPNKVPYYKYKPEIVLENKSYKLYWDRTNLTDKTVHFNRPDITLHDKHNNIAYLIDIAVPNTHNLQSTISEKMTKYRDLAIEISKQWQVQTVNIVPVVLSTTGVIPKILISSLKTLNINPHISHTLQKAAILNTCRIVRKFLNLT

SEQ ID NO: 2862 - protein, 1280 aa, Agara belti
MTAQSHTVAVDKTPADIISHTSSSTISSHSSYQSLDSAESLFESFDSSPRFSEDPSPESFRSTPVRAVDVVQEATAIHPAPTTGTIKRRRRQWTQDMNEFLWRTYLTKTALGTRIRGYLDHLYQDFTQKYPDMNASRQRLGDQCRAIIRNKLLNQTTLDNIRNQVMKQIQETDQQIPHHHHSQNSHHTQNSFGMTRIQWSDDINQTILRFYFESTDVERDMTAYRKKMHDKFIAHYPHLSHISEQRLADQRRAIIHNKMLTLDIIQNIRKEVELRLGVKETSHKTYNTLNQPYHTLQNENIEIEEIEDVAVHDREEIEYQEKYTDCRTNKYFTRKDIEEKFTIILDEFKNTEPVSRPYIPKQKTSRKLAFIVHNINQHILPKYLHTDIDFLTLHMLIYVAAYTTAICNGTKLEINRNIQKIRRKPAWEKRLESKVEELRSYIARLNEYINGNRNSKILAAVQAVKQKYRIHAQFENENSDSSHYLDTLKQKLNATANRLRRYRNCTKRKIQNSQFYKNEKNFYRNLSTHQKETETTIKIPTANDLRQYWANIWENPVQHNPDTNTTNSNNITTPNMQFEQITVDTLIQVIKRTHNWKAPGTDHIHNFWYKKFTCTHSHIHKHINQFIKAPDLMPKYVTHGKTYMVQKESYSQEPEKYRPITCLQTIYKIITACIGEHIYSYLNEHNILTEQQKGCRKYSQGCKEQLTIDAITMTQAYKRKKNIHTMYIDYKKAFDSVPHSWLLQVLNQYKIHPHIIHFLKISMNNWQTTLNLNYNNTSLTTEPIRIRRGIFQGDALSPLWFCLALNPLSELLNNTSLGYNLTFDDSHYKLSHLLYMDDIKLYASSKKELFHLVDLTEKFSNNIQMHFGIDKCKVFSINRGRVIDLKYTLQTGEIIDKMNEEVGYKYLGFYQSKQIHHKQIKTDITKRFKHRINQIQIQIQIQILKTQLNSRNIFKAINTFAIPIITYSFGVIKWSQTDLTKLQRIINTSLTKHRKHHPKSCIQRLTIPRREGGRGLIDLTNLYRKQINTLRSYFHCKAVTSQLHKYASDIDTKFTPLNLHNRNTEHNKHIISSQEKENIWASKSLHGRHYTDLAQPHVDKNASNAWLRYGQLFPETEAFMLAIQDQVMGTANYQKHIIKKLLQQNDLCRQCRSAPETIQHITGACKTLEQTDYKHRHDQIASIIHQQLAHTYKFIANKEPYYKYKPESVLENKSYKLYWDRTILTDRTIHHNRPDITLHDKLNNSVYFIDIAVPNTHNLQNTISEKMIKYRDLATEINKQ

SEQ ID NO: 2863 - protein, 1319 aa, Timochares trifasciata
MSAQSQTVAANIKSRSTTSTPTSIVESLFESPASSRHSYEEIDPNPTRSPTSSPQSVDVVQEALAANLAPTTGIAKKKRRQWTDDMNRFIWRKYLLITELEKHTRGYLNYLHQEFTKQYPEMEASKQRLGDQCRAIVRNKLLDESVLDDIKNQVKEKLQHTVPLSEITNSQTLYQLHNIPTRTRTSRMTWTDEINETILRIYFESTNLERDLTAYRKKLHDEFKTRYPQLSHITEQRLADQRRAIMYNKMISIERIEEIKKETELRLKHSEISDETHNISHIRNTILCEVESQDVTNNTEEIIDLDNDHEKSHESYRKIEGIVSIDIDKNFRETFNQFDNTDPTRRPYIPKQKSSKKFALIVQYINQHILPKHLSPDITFNTLQTLIYVAAYTAAKCNGAKILSKQSKTQIDRKPPWQKRLEGRVESLRSQIARLTEFIRGNRSSKVIAAVEMIWNKYETHARYEDENKEPNHYLDTLKQKLNLTANRLRRYLNCNKRKIQNNQFCNNEKNFYRNLTSTQIKPESTAISPTIDELRNYWAGLWENPIRHNEEADWIDTLNISTIPNMQFEQVTKDIFIQTIKRTQNWKAPGTDHIHNYWYKKFTSTHLHIYKYINLFITTPHIMPAYITQGKTFMIPKDHHSGDASKYRPITCLQTIYKIITACISEHIYTHLNTHNILAEQQKGCRKRSQGCKEQLTIDAIVMTQAFRRKKNIHSMYIDYKKAFDSVPHSWLLQILHLYKIHPIITKFLSTTMLNWQTVLNINNTSETSAPISIQRGIFQGDALSPLWFCMALNPLSELLNKTDGGYKLMNNRTHYTLSHLLYMDDIKLYSTSKEELFRLADLTERFSADIRMQFGIDKCKVFSIHRGQTLNTNFTLQNGEVVESLNEEVGYKYLGFHQSKKIHHKEVKHNITQKFKHRLSQILKTELNSRNTFKAINTFVIPVVTYSFGVIKWSQTDLMKLQRIINTTLTKHRKHHPKSCIQRLTLPRHEGGRGLIDLSNLYHKQVDTLRQYFHHKSNSSTLHKYISAIDKKLTPLNLHNTDKQHNTHIITFQEKNQTWASKSLHGRHHTDLTQPFVDKDASNAWLRYGELFPETEAFMLAIQDQVISTANYRKHILKELQDNDLCRQCKSAPETIQHITGACKILVQTDYRHRHDQIASIIHQHLAHICKFVTSKEPYYKYKPETILENKTYKLYWDRTILTDRTIHYNRPDITFHNKSSSTVYLIDIAVPNSHNLQSTINDKMSKYIDLAIEIKKQWQVQKVHIVPIVISSTGIIPKTLFNSLDMLNINSKISITLQKAAILNTCRIVRKFLNIE

SEQ ID NO: 2864 - protein, 888 aa, Muschampia nomas
MEFIRGNRNKKILVAVQEIKKNYKKHAKHEDENNEPNQYLDTLKQQLNATANRLRRFLNCTRRKKQNAQFCNNEKNFYRSLNREQKLGESIEKLPTSEELRQYWANIWENPVQHNTSANWIKNSLDTTSAMVFEKVNIDVLIHVIKRTHNWKSPGTDHIHNYWYKKLTCTHPYIHNHINQFIRSPHLLPTFVTHGKTHMIPKQGYTDNPANYRPITCLQTIYKIITACISHYIYTHLNKHNILAEQQKGCRKYSQGCKEQLTIDAIAMTQAFRRKKNIHTMYVDYRKAFDSVPHSWLLYILKQYQIHPSLINFLKISMTNWQTVLNLNHNNISLITESIRIQRGIFQGDALSPLWFCLALNPLSEILNKSEAGYKLTHSNTHYTLTHLMYMDDIKLYASSEQDLFRLADLTERFSTDIQMQFGIDKCKIQSVNRGHIQNTKYTLQNGELIESLQEEVGYKYLGFYQSRQIHHKQIKLDITQKFKNRLNKLLKTELNSRNLTKAINTYAIPVVTYSFGIIKWSQTDLSKLQRIINTSLTRYRKHHPKSCLQRLTIPRHEGGRGLIDLTNLYHKQLHALRQYFHSKSDMSQSQLHKYVTNIDNKYTPLNLHNKNIEHNDKIVTSQEKMKTWASKSLHGRHYADLELSHVDKCASNAWLKQGYLFPETEAFIMAIQDQVINTANYKKYITKELSQQSDLCRQCKCSPETIQHITGACKILVQSDYKHRHDQIASIVHQHLAHLTNFIPNKQPYYKYKPETVLENKGHRLYWDRTILTDRTIHYNRPDITLHDKLNQVAYLIDIAVPNTHNLQSAFNEKMVKYRDLAVEIKKQWQVQTVHIVPIVISSTGVVPKTLFNSFKILNINSNISNLLQKASILNTCRIVRKFLNTY

SEQ ID NO: 2865 - protein, 1314 aa, Chiomara georgina
MTAQSRTVAVNPTPRSCSSTPTSIVESLFESAASSPRSYEEPDPCSSRSTTLSPVSVAVVQEARARNLAPTTGNAKNKRRQWTDDMNRFIWRKYLTATKLEKHTRGYLSYLHQEFSEKYPQMEASRQRLGDQCRAIVRNKLLDQTILDDIRQQVRVQLHAADPQTEITNSQSLNVLRNLSSNTRMTWTDEINETILRIYFEITNLEKDMTAYRRKLYDKFKTYYPELSHINEQRLADQRRVIMNNKMLSAERIEEIKREVEQQLIHTHLLDSTENTHNTFQYEISLEQVIENSTNLIPESNDLDKEDPKTDESDSKIQNLISIDIDKLFTELLGEFKNTDPTCRPYIPKQKSSKKLAILVQHLNQHILPKHLHSDIDFHSLQTLIYVAAYTAAKCNGMKPQATKNKAHIRRKPPWQIRLENRVKTLRLEIARLSEFIRGNRNPKILATVQVIKDKYGTHAQYEDVNKEPSQYLDTLKQKLNLTANRLRRYLNCTKRKIQNSQFCNSEKIFYRNLTSNQGETKSESTTPTTDELRNYWASIWEDPIQHNEEANWIKTVNNNAIPDMQFEHVTLDIFTQVIRRIQNWKAPGTDHIHNYWFKKLTCTHPYIYKYVNQFIKTPQTMPAYITHGKTFMIPKDHHSEDPSRYRPITCLQNIYKIITACISEHIYSHLNSHNILAEQQKGCRKHSQGCKEQLTIDAIAMTQAFRKRKNIHSMYIDYKKAFDSVPHSWLLQTLHLYKIHPHITNFLSNTMLNWQTVLNINETSSTPITIQRGIFQGDALSPLWFCMALNPLSELLNQSDKGYKLTYNRSHCTLSHLLYMDDIKLYATNKEELFQLAEITERFSNDIHMQFGIDKCKIFSIQRGQILNTNFTLQNGEIVDSLNEEVGYKYLGFHQSRQIHHKQIKYNIIKKFKHRLSQILKTELNSRNTFKAINTFAIPVVTYSFGVIKWSQTDLIKLQRIISTTLTKFRKHHPKSCIQRLTLTRREGGRGLIDLTNLYHKQISTLRQYFHFKADSSPLHKYAQLIDTKLTPLNLHDTNEQHNVEIISSQEKNQTWANKSLHGRHHADLMQPHVDKNASNAWLRYGELFPETEAFMLAIQDQVVNTANYRKHITKELQHDLCRQCKSAPETIQHITGACKILVQTDYRHRHDQIASIIHQHLAHACKFISTKEPYYKYKPETVLENKISKLYWDRTILTDRTIHYNRPDITLHDKTNNTVYLIDIAVPNSHNLQSTINDKMSKYIDLAIEIKKQWQAQKVHIVPIVLSSTGIIPKDLFKNLKMLNMHPKFSITLQKAAILNTCRIVRKFLNIE

SEQ ID NO: 2866 - protein, 1237 aa, Timochares trifasciata
MNRFIWRKYLIATQLEQHTRGYLNYLHQEFTKKYPEIEASRQRLGDQCRAIIRNKLLDQSILDDIRNEVTKQIQVADLPTRITNSQTLHQLNSLSSTTRMTWTDEINETILRIYFESTNMEKDMTAYRRKLHEKFKTRYPQFSHITEQRLADQRRVIMSNKMLTLEKIEEIRRETESQLRHTDNIQNAYAKGAELYTQNTLISEKEIEDVAHQTQEITGIDKEQIQTQKGNKNDREIDGDLRKDIDKQFKEILEQFDNTDPTCRPYIPKQKTSRKLALIVQYINQHILPKHLLPDTSFHSLQTLIYVAAYTVAKCNGAKLLPTKKESQIRRKPSWQIRLESRVETLRSQIARLTEYIRGNRSSKILAAVQIIRDKYGTHAQYEGDNKEPSHYLDTLKQKLNLTSNRLRRYLNCTKRKLQNNQFHNNEKMFYRNLTLNQRETESKTTEIPTTDELRNYWAGLWEDPIQHNAEADWIDTLKNTSIPNMQFEQVTTDIFTQVIRRTQNWKAPGTDHIHNYWYKKFTCTHSHIHKYINQFINTPHTMPAYITHGKTFMIPKDHHSKDPSKYRPITCLQTIYKIITACISEHIYSHLITNNILNEQQKGCRKHSQGCKEQLTIDAIVMTQALRKRRNIYSMYIDYKKAFDSVPHSWLTQILHLYRIHPNITNFLSFAMSNWQTVLNISNTLITSTPISIQRGIFQGDALSPLWFCMALNPLSELLNKTNDGYRLTYNRSYHTLSHLLYMDDIKLYAANEEQLYRLADITETFSKDIRMQFGIDKCKVYSIHRGKTLNNNFTLKNGEIVDSLNEEVGYKYLGFHQSKQIHHKQIKHTITKKFKHRLNQILKTELNSQNTFKAINTFAIPVVTYSFGVIKWSQTDLIKLQRMINTTLTKYRKHHPKSCIQRLTFPRREGGRGLIDFTSLYNKQIDILRQYFHYKADSSPLHKYTSASDNNFTPLNLQDTKQRTVKIITSQEKNQTWASKSLHGRHHADLTQSHVDRDASNAWLRYGELFPETEAFMLAIQDQVISTANYRKYITKELQHNDLCRQCKSAPETIQHITGACKILVQTDYRHRHDQIASIIHQHLAHTCKFISNKEPYYKYKPETVLENKTCKLYWDRTILTDRTIHYNRPDITLHNKLSNIVYLIDIAIPNSHNLQSTINNKMSKYIDLAIEIKKQWQVQKVHIVPIVISSTGIIPKDLFDNLKILNINTQISITLQKAVILNTCRIVRKFLNIE

SEQ ID NO: 2867 - protein, 1082 aa, Ebrietas anacreon
MGNKMLTLQTIEEIRRETELRQKHTHDIQNITPNNNAHNIISHIQNTLMCEEEIEDVAHQTQIITGLDKGQTQKTNKNDRENDERLRRDIDIQFREILQQFENTDPMCRPYIPKQKTSRKLALIVQYINQQILPKHLQSDTSFHTLQTLIYVAAYTVAQCNGAKLPPTKNASLIRRKPSWQLRLENRVETLRLQVAHLTEFIRGNRSSKILATVQIIKSKYGTHAKYEDDNKEPSHYLDTLKQKLNLTSNRLKRYLSCTKRKVQNNQFRNNERTFYRNLTLNQREPESTPINIPTTDELRSYWAGIWEDPIQHNTEANWIETLNCTSIPNMQFEKVTVDTFTRVIRRTQNWKAPGTDHIHNYWYKKFTCTHAHIHKYINEFIDTPHTMPAYITHGKTFMIPKDHHSTDPARYRPITCLQTIYKIITACISEHIYTHLNKNDILNEEQKGCRKHSQGCKEQLTIDAIAMTQAFKKRRNIHSMYIDYRKAFDSVPHSWLMEILHLYKIHPNITNFLSVAMSNWQTVLNLNNTSITSTPISIQRGIFQGDALSPLWFCMALNPLSELLNKTDDGYRLTYKRSHYTLSHLLYMDDIKLYATSKEQLFRLADITDRFSNDIKMQFGIDKCKIYSIHRGETLNTNFSLQNGEVVESLNEEVGYKYLGFHQSKQIHHKQIKHAITTKFKHRLSQILKTELNSRNTFKAINTFAIPVVTYSFGVIKWSQTDLIKLQRMINTTLTKYCKHHPKSCIQRLTLPRREGGRGIIDLRNLYHKQIDSLRQYFHNKADSSPLHKYTSAIDNKYTPLNLQDTKQHTVQIITTQEKNQKWASKSLHGRHHADLTQPHVDKDASNAWLRCGELFPETEAFMLAIQDQVISTANYRKHITKELQHNDLCRQCKCAPETIQHITGACKILVQTDYRHRHDQIASIIHQHLAHTCKFISNKEPYYKYKPETVLENKTSKLYWDRTILTDRTTHYNRPDITLHNKLNNTVYLIDIAVPNSHNLQSTIKDKMSKYQDLAIEIKKQWQIQKVHIVPIVISSTGIIPKDLFNSLKILNMNPGTAKTLQKAAILNTCRIVRKFMNIE

SEQ ID NO: 2868 - protein, 1321 aa, Cycloglypha thrasibulus
MSAQSQTVAANPTPRSTSSTPTSIAESLFVSPASSPRSYEEIDQYSTRSTTLSPKSVDVVQEAQAMNLAPTTGIGKTKRRQWTDDMNRFIWRKYLIATRLEQHTRGYLNYLHQEFTVKYPNMEASRQRLGDQCRAIIRNKLLDQSILDDIRKEVTKQIHESNLQTEITNSQTQQLHNLSCTTRMTWTDEINETILRMYFESTNMEKDMTAYRRKLHDKFKTHYPQFSHITEQRLADQRRVIIRNKMLTTEKVEEIKREIELQLKHTNDMQNITPNNNSSHPQNTHIFERESEGVAHQAQEITGLDKEQTQTQKTNKKDRDIDEHLGRDINKQFREILEEFENTDPTCRPYIPKQKSSRKLASIVQYINQQILPKHLLPDTSFHSLQTLIYCAAYTVAKCNGSKLGPTKKESEIKRKPSWQRRLESRVETLRSQIARLTEFIRGNRSSKILKTVQIIKNMYGTHAQFEDDNKEPSHYLDTLKQKLNLTSNRLRRYLSCTKRKVQNNQFRNNEKNFYRNFTLNQREPESTTTNTPTTEELRSYWAGIWEDPIQHNAEANWIETLNYNSIPNMQFDKVTVDTFTQVIRRTQNWKAPGTDNIHNYWYKKFTCTHSHIHQYINQFIDSPHTMPAYITHGKTYMIPKDHQSTDPSRYRPITCLQTIYKIITACISEHIYNHLNKNNILNEEQKGCRKHSQGCKEQLTIDAIAMTQAFKNRRSIHTMYIDYKKAFDSVPHSWLTQILHLYKIHPNITNFLSFAMSNWQTVLNLNNTSETSTPISIQRGIFQGDALSPLWFCMALNPLSELLNKTDDGYRLTYNRSHYTLSHLLYMDDIKLYATSKDQLFRLADISERFSNDIRMQFGIDKCKVYSIHRGETLKTNFILQNGEIVDSLNEEVGYKYLGFHQSKQIHHKQVKHAITKKFKHRLCQILKTELNSRNTFKAINTFAIPVVTYSFGVIKWSQTDLIKLQRMINTTLTKYRKHHPKSCIQRLTLPRREGGRGLIDLTNLYHKQIATIRQYFHYKADSSPLHKYTSAIDNKYTPLNLKDTKQHTVQVITTQEKNQAWASKSLHGRHHADLTQPHVDKDASNAWLRYGELFPETEAFMLAIQDQVISTANYRKHITKELQHNDLCRKCKCAPETIQHITGACKILVQTDYRHRHDQIASIIHQHLAYTCKFISNKEPYYKYKPETVLENKTSKLYWDRTILTDRTIHYNRPDITLHDKLSNIAYLIDIAVPNSHNLQSTINDKMSKYTDLSIEIKKQWQVQKVLIVPIVLSSTGIIPKDLFNSLKILNMKPQIAITLQKAAILNTCRIVRKFMNTE

SEQ ID NO: 2869 - protein, 1312 aa, Camptopleura auxo
MSAQSQTVAANPTLRSSSSTPTSIVESLFESPASSPRSYEEIDQYSTRSTNSSPKSVDVVQEALAVNLAPTTGNAKTKRRQWTDDMNRFIWRKYLIATELEKHTRGYLNYLHQEFTKKYPEMEASRQRLGDQCRAIVRNKLLDRNVLNDIKNQVREKLQLTDSQSETTNSQTLQQLHSLPNTTRMAWTDEMNEIILRIYFESTNLEKDMTAYRKKLHDKFKTHYPQLSHITEQRLADQRRAIMNNKMLSLERIEEIRKETELQLKHTEVSNETHKTSHTRNTIICEVEAHVTNSPEEIIDLENDHKKNKKEIEDMICIDIDKQFRETLDEFDNTNPTHRPYIPKQKSSRKLALIVQYINQHILPKHLSPDIDFITLQTLIYVAAYTAAKCNGMKILPNQNKTQMRRKPPWQMRLENRVEKLRSQIARLTEFIRGNRSPKITAAVEMIRSKYGTHAKYEDENKEPSHYLDTLKQKLNLTANRLRRYLNCTKRKIQNNQFCNNEKNFYRNLTSNQIEPESTAILPTTDALRNYWASIWENPTRHNEEADWIDTLNNTTIPNMQFEQVSKDIFTQVIRRTQNWKAPGTDHIHNYWYKKFTCTHLHIHKYINLFITTPHIMPTYITQGKTFMIPKDHHSEDPSKYRPITCLQTIYKIITACISEHIYTHLNTHNILAEQQKGCRKRSQGCKEQLTIDAIVMTQAFRRKKNIHSMYIDYKKAFDSVPHSWLIQILHLYKIHPSITNFLSTTMSNWQTVLNINNTSETSTPIFIRRGIFQGDALSPLWFCMALNPLSELLNKTDKGYKLTNNRSHYTLSHLLYMDDIKLYATSKEELFHLADLTEKFSTDIRMQFGVDKCKVYSIHRGQTLNTNFTLQNGDVVNSLNEEVGYKYLGFHQSKQIHHKQIKHTITQKFKYRLSQILKTELNSRNTFKAINTFAIPVVTYSFGVIKWSQTDLMKLQRIINTTLTKYRKHHPKSCIERLTLPRHEGGRGLIDLRNLYHKQMDTLRQYFHHKADSSTLHKYITAIDNKFTPLNLHDTDKQHTTHIITSQEKHRTWASKSLHGRHHADLTQPLVDKDASNAWLRYGELFPETEAFMLAIQDQVISTANYRKHITKELQDNDLCRQCKSAPETIQHITGACKILVQTDYRHRHDQIASIIHQHLAHTCKFISSKEPYYKYKPETILENKTYKLYWDRTILTDRTIHYNRPDITLHNKSSSTAYLIDIAVPNSHNLQATINDKMSKYIDLAIEIKKQWQVQKVHIVPIVISSTGIIPKTLFNSLDILNMNSKISITLQKAAILNTCRIVRKFLNIL

SEQ ID NO: 2870 - protein, 1308 aa, Helias cama
MSAQSRTVAANLTSRSISSTPTSIVESLYESPASSPRSYEEIDQYLTRSTTSSPKTVDVMQEALAVNLAPTTGIAKTKRRQWTDDINRFIWRKYLTATELGKHTRGYLNYLHQEFTKQYPEMEASRHRLGDQCRAIVRNKLLDQNVLDDIKNQVRKELQLTVPQSENTKAEQIHQLHSFPSSTRMTWTDEINETIMRLYFESTNLEKDKTAYRKKLHNKFKTHYPQFSHITEQRLADQRRAIMCNKMLPLKRIDEIRKEAESHLKHIEISDETYNNTIISEVKTQNATNFTENTIDLDSEHKKPRKSYRKIEGEDIDEQFRDTLDEFKNTDPTHRPYIPKQKSSRKLALIVQYINQHILPKHLLPEIDFNTLQTLIYVAAYTAAICNGMKITPSQNKTQVRKKPSWQVRLECKVEILRAHIARLTEFIRGNRSSKVIAAVETIKSKYGTHATYEDENQEPNHYLDTLKQKLNLTASRLRRYLNCTKRKAQNKQFCNNEKNFYRNLTSNIIGHEPKGILPTTNELRNYWASIWENPIRHNEDASWIETLNNISIPNMQFEQVTSDIFTKVISRTQNWKAPGTDHIHNYWYKKFTCTHLYIYKYINQFITTPHTMPAYVTQGKTFMISKDQHSGDPSKYRPITCLQTIYKIITACISEHIYTHLNTHNILAEEQKGCRKRSQGCKEQLTIDAIVMTQAFKRKKNIHSMYIDYKKAFDSVPHSWLIQILHLYKIHPNITNFLSTTMSNWQTVLNINNTSETSSPIFIQRGIFQGDALSPLWFCMALNPLSELLNKTDSGYKLTYNRSHYTLSHLLYMDDIKLYATSKEELFRLADLTEIFSTDIGMQFGIDKCKVYSIHRGQTTNINFPLQNGEVVNSLNEEVGYKYLGFHQSKQIHHKQIKHTITQKFKHRLSQILKTELNSRNTFQAINTFAVPVVTYSFGVIKWSQTDLMKLQRIVNTTLTRHRKHHPKSCIQRLTLPRHEGGRGLIDLINLYHKQVHTLRQYFHRKADSSTLHKCISAIDNKFTPLNLHDTDKQHTIHIITPQEKHQTWASKALHGRHHADLTQSHVDKDASNAWLRYGELFPETEAFMLAIQDQVISTANYRKHITKEIQDNDLCRQCRCAPETIQHITGACKILVQTEYRHRHDQIAAIIHQHLAHTCKFICSKEPYYKYKPETILENNAYKLYWDRTILTDRTIHYNRPDITFHNKLSNTAYLIDIAVPNSHNLQSTINDKMSKYTDLAIEIKKQWQVQKVHIVPIVISSTGIIPKTLFKSLDILNMNSNISITIQKAAILNTCRIVRKFLNVD

SEQ ID NO: 2871 - protein, 1356 aa, Grais stigmaticus
MRLRNRLIPQAGTREGESRPGPSGSGSPAYSGGGNVSHITAQPNTVAVDTEPSSPNSSNHSSYYHQSSSSSQSPSSSVSSSRTVDVVQEAIATHLAPTTGTAKRKRRQWTQDMNEFIWRTYLIGTELEKRTRGYLDYLHHEFVQKYPEMDASRQRLGDQCRAITRNKLLNQTTLDNIRNQVIKQLQSIDSQMPTKHSQPNHQINQPQNLSGMIRMTWTDEINETIMRIYFETSNLEKDMTAYRKKMHVKFITHYPHLSHISEQRLSDQRRVIVHNKMLTLDRIQEIRKDVELHLAQEKISTETLSNETQNTIIYNSQRTENTVADHLECVGIIHNSEEDDCHENDTYTHNSTENENMICKDLEEQFAQILEEFKNSEPITRPYIPKQKTSRKLALIVKNINQHILPKYILPDIDFYTLHTLTYVAAYTAAKYNGTKLGLNQNKQHARKKPSWQKRLENKVLELRAHIARLKEFINGNRSSKILEAVQTVKKKYRIHAQHENENSEPHHYLDTLKQKLNSTASRLRRYLNCTKRKVQNAQFYKNEKNFYRNLSARSNETQPTASVPTSDELRQYWANIWENPVQHKSNTNWMENCNYATISEMQFNQVTEDTLIQVIKRTHNWKAPGTDHIHNYWYKKFTCIHTHILRHINQFIKAPHLMPTYITHGKTYMVPKEGYTRDPGRYRPITCLQTIYKIITACISEHIYTHLNKHNILAEQQKGCRKYSQGCKEQLTIDAIAMTQAFRRKKNIHCMYIDYKKAFDSVPHSWLLQILDQYKIHPDIINFLNISMTNWQTVLNLSYNNTSLTTDPIRIQRGIFQGDALSPLWFCLALNPLSEILNKTDAGYKLTYNNSHYTLSHLMYMDDIKLYASSKDELFRLTDLTEKFSNDIQMQFGIDKCKIHSVERGRTLNTNYTLQTGELIESMTEGGYRYLGFHQSKQIHHSEIKSNITKKFKHRLNQILKTELNSRNIFKAINTFAIPIITYSFGVIKWSQTDLIKLQRIINTTLTKHRKHHPKSCLQRLTISRREGGRGLIDLANLYHKQIDTLRRYFHCKADTSQLHKYASDIDIKLTPLNLHDRNTQHMEKIVSSQDKVKTWASKSLHGRHYADLIKPHVDKNASNAWLRYGQLFPETEAFMLAIQDQVINTANYRKYITKEISQHSDLCRQCKCAPETIQHITGACKTLVQSDYKHRHDQVAAIIHQHLAHTYKFIPNKNPYYKYKPETVLENKTHKLYWDRTILTDRTIHFNRPDITLHDKLNNTVYFIDIAVPNTHNLNSTISEKMIKYQDLATEIRKQWQVQTVHIVPIVISSTGVIPKSLFNSLKILNINSNTSTILQKASILNTCRIVRKFLNIS

SEQ ID NO: 2872 - protein, 1198 aa, Timochares trifasciata
MEASRQRLGDQCRAIVRNKFLDQNVLDDIRNEVREQLQGTDLQTEITNTQSLQVLHSSPSINRMTWTDEMNETLLKIYFEVTNLEKDMTAYRRKLHDKFKTHYPHLSHITEQRLADQRRVIMHNKMLSVQRIEEIRRETEIHLRYTDLSNNTQILSPYNTLHNESTVACDEGIVNSTNWTQEIISLNNEHQKTNKNYRNIENILGIEIDKQFKETLDKFNGTDPTCRTYIPKQKSSRKLALIVQHINQHVLPEHLFCDIDYNSLQTLIYVAAYTAAKCNGTKFQPTKNKTNISRKPSWQIRLEDRVTTLRLQIARLTEFIRGNRSAKVFTTVQTIRDRYGTHAQFEDINKDPNQYLDTLKQKLSLTASRLRRYLNCTKRKTQNNQFCNNEKTFYRNLTLNQGETKSKTTPATDELRKYWAGIWENPIQHNLEANWIEEVNNNTIPNMQFENITLDTFLQVIKRTQNWKAPGTDHIHNYWYKKFTCIHSHIYKYVNQFIKTPHTMPSYITHGKTYMIPKDGHSEDPSKYRPITCLQTIYKIISACISEHIYIHLHSNNILTEQQKGCRKRSQGCKEQLTIDAIAMTQAFKKKKNIHSMYIDYKKAFDSVPHSWLIQTLHLYKIHPNITNFLCTTMSNWQTILNINNTTVTTPISIQRGIFQGDALSPLWFCMALNPLSELLNKTNSGYKLIFNRSHYTLSHLLYMDDIKLYATSKEELFHLADLTEKFSNDIQMQFGIDKCKIFSIQRGQKIDTKFTLQNGEVVDSLNDEVGYKYLGFYQSKLMHHKQIKSNITKKFKHRLNQILKTELNSRNTFKAINTFAIPVLTYSFGVIKWSQTDLNKLQRIINTTLTKYRKHHPKSCIQRLTLPRREGGRGLLDLTNLYHKQISTLRQYFHYKADSSPLHKYVTCIDHKLTPLNLHDTNEQNNAQIISSQAKNQTWANKSLHGRHHAELTQPHVDKDASNAWLRYGELFPETEAFMLAIQDQVISTANYRKFITKELQNNDLCRQCKCAPETIQHITGACKILVQTDYKHRHDQVASIIHQHLAHTCKFISSKEPYYKYKPETVLENKTSKLYWDRTILTDRTIHYNRPDITFHNKVSNTVYLIDIAVPNSHNLLTTINDKMSKYIDLAIEIKKQWHVQKVYIVPIVISSTGVIPTALFKSLKMLNMSDQISVTLQKAAILNTCRIVRKFLNIE

SEQ ID NO: 2873 - protein, 1378 aa, Cycloglypha thrasibulus
MLYTIPATNGAIVLKYAMRLRNRDIPQAGTSLPRGEEESGPGPSSSGCPTYSGGGNVSHMTAQSCTVAANPISRSTSSTPTSIVESLFESPPSSPRSYEGADQCSSRSNISSPVSVAVVQEALAANTAPTTGITKRKRRQWTDDMNRFIWRTYLIATQLEKYTRGYLNYLHKEFTVKYPEMEASRQRLGDQCRAIVRNKLLDQITLDEIRNQVREQLHVTDFETGITNSQSLRNLHNSSDTIRMTWTDEINETLLRLYFETTNLEKDTTAYRKKLHDKFKTYYPQLSHITEQRLADQRRVIIRNKMLSEERIDKIRREIEIQLKDTELSDDIQNITPHSMLHNESTLVCDEEIEHGINRTQESICLDNEHQNSNKNDRKIESIIGIDINKKFTETLNEFNSTDPTSRPYIPKQKSSRKLALIVQHINQHILPKHLFSDIDYHSLQTLIYAAAHTAATCNGTKFQTTRNKTKIRRKPPWQIRLESRVDTLRSQIARLTEYIRGNRSSKVLATVQTIRDKYGTHAQYEDENKEPSQYLDTLKQKLNLTASRLRRYLSCTKRKTQNNQFCTNEKIFYRNLTLNEEETSSEATTPTTDELRKYWASIWENPIDHNVEASWIETLNNTAIPNMQFEHIALDTFTQIIKRTHNWKAPGTDHIHNYWYKKFSCLHSHIYKFVNQFIKTPQTMPAYITHGKTFMIPKDRHSEDPSKYRPITCLQTIYKIITACISEHIYFHLNSNNILTEQQKGCRKRSQGCKEQLTIDAIAMTQAFKKRKNIHSMYIDYRKAFDSVPHSWLLQTLHLYKIHPNITNFLSITMSNWQTVLHINNTTATTPISIQRGIFQGDALSPLWFCMALNPLSELLNKTHSGYKLTFNRSHYTLSHLLYMDDIKLYATSKEELFDLADLTERFSNDIQMQFGIDKCKILSIQRGQTLNTNFTLQSGEIVDSLNEEVGYKYLGFHQSRQIHHRQIKHNITKKFKHRLNQILKTELNSRNTFKAINTFAIPVLTYSFGVIKWSQTDLIKLQRIINTTLTKHRKHHPKSCIQRLTLPRREGGRGLIDLTNLYHKQISTLRQYFHHKADSSPLHKYVSSIDNKLTPLNLHDTNEHTVQIVSSQEKNQTWANKTLHGRHHADLTQPHVDKDASNAWLRYGELFPETEAFMLAIQDQVISTANYRKHITKELQHTDLCRQCKCAPETIQHITGACKILVQTDYRHRHDQIASIIHQHLAHTSKFISSKEPYYKYKPEIVLENKTSKLYWDRTILTDRTIHYNRPDITLYNKLSSTVYLIDIAVPNSHNLQSTINDKMSKYVDLAIEIKKQWHVQKVHIVPIVISSTGIIPTALFKSLKILSITPQISITLQKAAILNTCRIVRKFLNIE

SEQ ID NO: 2874 - protein, 1337 aa, Polyctor polyctor
MKMKTTKPKNIKYNLRSLTRYSNMGSLQTSVEQGQINSPKDRGTIASRRTSSSKSLFESLPSSPQSYEEPADNFSRSDTSHTRSVDVEQEALATIPGPTTDTIKKRRKWTDDMNKFLWRTYLISTNLGNRTRGYLNYLHQEFSKQYPEMGATRQRLGDQCRAIVRNNLLSEHIRDDIRRQVTRENSDINSHNTILDPFQYTNHSQQTLHPPNLGRIKWTDDINETIIRLYFECSDLENDLTAYRKKMHDKFIICYPHLSFITEQHLADQRRAIVRNNMLTTGKIQEIKAEVELQIRHNMLHLQKLQNTFEPQTRDGNQTDLMEEYELLKTCESFYTDSVEKETVIHTSNKNTTFIEEQFEKIYDQFKNSNPTSRPYIPKQNTSRKLAIIVKTINERILPKYLHPDIDFNSLHTLIYVSGYTAAVCNGTKFEHKQSEYIKRPPAWKTRLEHKINEIRSHIARLIQYMKGNRSHKILKAVNAIKEKYRIHAQHENDNTELDHFLDTLKQKLNTAANRLRRYTNCTKRKTQNALFNNNEKHFYRKLNINSENNGDKRPTPSPSALQQYWSGIWDNPIQHNKDANWFKPPETAVPAMEFEEITETMLAYVINQTHNWKAPGTDQIHNYWYKKFTSTHPYILKYLNQFIKTPSTLPAFITNGRTYMLPKDNDTENPAKYRPITCLQTIYKILTACISNIIYHHLNKHDILAEQQKGCRKYSQGCKEQVTIDAVVMTQAFRRKKNLHSMFIDYQKAFDSVPHSWLLEVLHYYKIHPQLINFLENTMKNWRTVLNLRLNNHSITTEAIHIRRGIFQGDALSPLWFCLALNPLSELLNTSNAGYKLSHMGSRYILSHLMYMDDIKLYGSSQEELFQLTVITERFSNDIKMRFGIDKCKIQSINRGRLLSTSYTLQSGESIECLNSQMSYKYLGFHQSNQIQHKQTKITLTKQFKCRLNLILKTTLNSRNIIKAINTFAIPILTYSFGVIRWSQTDLLKLQRVVTAHLTKFRKHHPKSCIQRLTLPRRDGGRGLIDLKNLHNRQIQTLRRYFHSKADRSILHELTSKSDIKYTPLNLHAKETQHNEQIIKHQEKLDSWANKSLHGRHFADLHQPHVDIEESNAWLKSGTLFPETEAFMLAIQDQVINTANYRKYITKQNADQNDLCRQCRSAPETIQHITGACKMLVQTDYKHRHDQTAAIIHQHLAHFCKFISSKEPYYKYKPQIVLENHTYKLYWDRTILTDRTVHFNRPDITLHDKQKSTVYLIDIAVPNTHNIQCTIKEKLSKYKDLAVEIEKQWQVKTVHIVPIVISTTGIIPKILKKSLNLINVNEQHSYISHTLQKSCI

SEQ ID NO: 2875 - protein, 886 aa, Pyrgus malvae
MQYMKGNRNFKILAAVDVIKKKYKIHALHEQVNSEPNLYLDTLKQKLNATANRLRRYLNCTKRKTQNGQFQNNEKLFYRKLGSDQEDPRCEVRIPTPEALRQYWADIWENPVKHNSNATWLEKIKESPVIEMKFEEIPVDTLTHVINRTHNWKSPGTDQIHNYWYKKLTSAHTYIHTFINKFIHAPHTMPLFITQGKTYMLPKDNDTENPAKYRPITCLQTIYKIITACIGESLHSHLQKFNILAEEQKGCRKHSQGCKEQLTIDAIVMNQAFKRKKNIHSMYIDYKKAFDSVPHSWLLDILQYYKIHPQIIQFLEITMNNWQTILNLNYNNTSLVTAPIYIKRGIFQGDALSPLLFCLALNPLSELLDRSELGYKLSYGGSHCTLSHLMYMDDIKIYSSSKDELFQLANLIETFSNDIRMQFGIDKCKIHSVIRGRTQSASYTLQSGESIESISKEMGYKYLGFQQSNKIHHKYTKSCLTKQFKYRLNQILKTELNSRNLIKAINTFAIPVLTYSFGVIKWSKSDLIRLQRIVHTSLTKFRKHHPKSCIQRLTLPRREGGRGLIDLINLHNRQITTLRKYFHLRSDTSKLHKHVSEVDKKLTPLNLFDRTTQSNEHITTSRDKLDTWASKSLHGRHFKDLHQSHVDKNESNAWLRSGYLFPETEAFILAIQDQVINTANYQKHITNNIHQKDLCRQCKSSSETIQHITGACKMLVQTDYKHRHDQVAAIIHQHLAHSSKFISCKQPYYKYKPEVVLENHTHKLYFDRTILTDRTIHYNRPDITLLDKKNDTVYLIDIAVPNTHNLQSTFSEKMSKYRDLAVEIKKQWRVKNVVIVPIVISTTGVIPKTLSNSLKTLNIQSHMSHILQKAAILNTCRIVRKFLNIS

SEQ ID NO: 2876 - protein, 1491 aa, Pyrgus malvae
MRLRCRVIIPQAGTREGESRPGPSSSGSPAYSGVGTASHLTVQSSTATVSDPNVASSTSTELVQTHSTTSMKSIQPLVASSRSYEEELPPQSSASLPISDTVQPRRKSRIFKRSVRNDLANSILNEPAVEKETRASPSTHTTSPTSSTLSITSSTKVSYSHKYNLRSLSRKQVSPNHHRQNSLYDLQIDSTTCISSPESLFASPPSSPRSYEQLSPSRSTTSSLRSVDVVQEATAILPVPTTGTSKRRKWTDDMNKFIWRTYLIATDLEKRTRGYLDYLYQEFNAKYPEMNASRQRLGDQCRAIVRNKLLHQTILDDIRHQVSLEYPLPRPQYPTLHIPQQNTFSTSGMRMKWSDEINETIIRLYFEASNLEQDLTAYRKKMHDKFIALHPHLSYITEQRLADQRRVIIRNKMIKIGRIQEIRKEVELHMKEIQGHTSTQTNSHNSLYSNNEETERPEEQESVNYTARYNYDEEQNEELLNSSNKYNDNQNHKYIDDQFRAAFERFKNTDPTKRPQIPKQKSSRKLAIIIQTINKNILPKYLQPDIDFNSFHTLIYISAYTAAKCNDTKFNHNIAQNKQITKKKPAWQARLESKINELRSNIARLMQYMKGNRNFKILAAVDVIKKKYKIHALHEQVNSEPNLYLDTLKQKLNATANRLRRYLNCTKRKTQNGQFQNNEKLFYRKLGSDQEDPRCEVRIPTPEALRQYWADIWENPVKHNSNAMWLEKIKESPVIEMKFEEIPVDTLTHVINRTHNWKSPGTDQIHNYWYKKLTSAHTYIHTFINKFIHAPHTMPLFITQGKTYMLPKDNDTENPAKYRPITCLQTIYKIITACIGESLHSHLQKFNILAEEQKGCRKHSQGCKEQLTIDAIVMNQAFKRKKNIHSMYIDYKKAFDSVPHSWLLDILQYYKIHPQIIQFLEITMNNWQTILNLNYNNTSLVTAPIYIKRGIFQGDALSPLLFCLALNPLSELLDRSELGYKLSYGGSHCTLSHLMYMDDIKIYSSSKDELFQLANLIETFSNDIRMQFGIDKCKIHSVIRGRTQSASYTLQTGESIESISKEMGYKYLGFQQSNKIHHKYTKSCLTKQFKYRLNQILKTELNSRNLIKAINTFAIPVLTYSFGVIKWSKSDLIRLQRIVHTSLTKFRKHHPKSCIQRLTLPRREGGRGLIDLINLHNRQTTTLRKYFHLRSDTSKLHKHVSEVDKKLTPLNLFDRTTQSNEHITTSRDKLDTWASKSLHGRHFKDLHQSHVDKNESNAWLRSGYLFPETEAFILAIQDQVINTANYQKHITNNIHQKDLCRQCKSSSETIQHITGACKMLVQTDYKHRHDQIAAIIHQHLAHSCKFISCKQPYYKYKPEVVLENHTHKLYFDRTILTDRTIHYNRPDITLLDKKNDTVYLIDIAVPNTHNLQSTFSEKMSKYRDLAVEIKKQWRVKNVVIVPIVISTTGVIPKTLSNSLKTLNIQSHMSHILQKAAILNTCRIVRKFLNIS

SEQ ID NO: 2877 - protein, 886 aa, Pyrgus malvae
MQYMKGNRNFKILAAVDVIKKIYKIHALHEQVNSEPNLYLDTLKQKLNATANRLRRYLNCTKRKTQNGQFQNNEKLFYRKLGSDQEDPRCEVRIPTPEALRQYWADIWENPVKHNSNATWLEKIKESPVIEMKFEEIPVDTLTHVINRTHNWKSPGTDQIHNYWYKKLTSAHTYIHTFINKFIHAPHTMPLFITQGKTYMLPKDNDTENPAKYRPITCLQTIYKIITACIGESLHSHLQKFNILAEEQKGCRKHSQGCKEQLTIDAIVMNQAFKRKKNIHSMYIDYKKAFDSVPHSWLLDILQYYKIHPQIIQFLEITMNNWQTILNLNYNNTSLVTAPIYIKRGIFQGDALSPLLFCLALNPLSELLDRSELGYKLSYGGSHCTLSHLMYMDDIKIYSSSTDELFQLANLIETFSNDIRMQFGIDKCKIHSVIRGRTQSASYTLQSGESIESISKEMGYKYLGFQQSNKIHHKYTKSCLTKQFKYRLNQILKTELNSRNLIKAINTFAIPVLTYSFGVIKWSKSDLIRLQRIVHTSLTKFRKHHPKSCIQRLTLPRREGGRGLIDLINLHNRQITTLRKYFHLRSDTSKLHKHVSEVDKKLTPLNLFDRTTQSNEHITTSRDKLDTWASKSLHGRHFKDLHQSHVDKNESNAWLRSGYLFPETEAFILAIQDQVINTANYQKHITNNIHQKDLCRQCKSSSETIQHITGACKMLVQTDYKHRHDQVVAIIHQHLAHSSKFISCKQPYYKYKPEVVLENHTHKLYFDRTILTDRTIHYNRPDITLLDKKNDTVYLIDIAVPNTHNLQSTFSEKKSKYRDLAVEIKKQWRVKNVVIVPIVISTTGVIPKTLSNSLKTLNIQSHMSHILQKAAILNTCRIVRKFLNIS

SEQ ID NO: 2878 - protein, 1491 aa, Pyrgus malvae
MRLRCRVIIPQAGTREGESRPGPSSSGSPAYSGVGTASHLTVQSSTATVSDPNVASSTSTELVRTHSTTSMKSIQPLVASSRSYEEELTPQSSASLPISDTVQPRRKSRIFKRSVRNDLANSILNEPAVEKETRASPSTHTTSPTSSTLSITSSTKVSYSHKYNLRSLSRKQVSPIHHRQNSSYDLQIDSTTCISSPESLFASPPSSPRSYEQLSRSRSTTSSLRSVDVVQEATAILPVPTTGTSKRRKWTDDMNKFIWRTYLIATDLEKRTRGYLDYLYQEFNAKYPEMNASRQRLGDQCRAIVRNKFLHQTILDDIRHQVSLEYPLARPQYPTLHIPQQNTFSTSGMRMKWSDEINETIIRLYFEASNLEQDLTAYRKKMHDKFIALHPHLSYITEQRLADQRRVIIRNKMIKIGRIQEIRKEVEVHMKEIQGHTSSQTNSHNSLYSNNKETERPEEQESVNYTARYNYDEEQNEELLNSSNNYNDNQNHKYIDDQFRAAFERFKNTDPTKRPQIPKQKSSRKLAMIIQTINKNILPKYLQPDIDFNSFHTLIYISAYTAAKCNDTKFNHNIARNKQITKKKPAWQARLESKINELRSNIARLMQYMKGNRNFKILAAVDVIKKKYKIHALHEQVNSEPNLYLDTLKQKLNATANRLRRYLNCTKRKTQNGQFQNNEKLFYRKLGSDQEDPRCEVRIPTPEALRQYWADIWENPVKHNSNATWLEKIKESPVIEMKFEEIPVDTLTHVINRTHNWKSPGTDQIHNYWYKKLTSAHTYIHTFINKFIHAPHTMPLFITQGKTYMLPKDNDTENPAKYRPITCLQTIYKIITACIGESLHSHLQKFNILAEEQKGCRKHSQGCKEQLTIDAIVMNQAFKRKKNIHSMYIDYKKAFDSVPHSWLLDILQYYKIHPQIIQFLEITMNNWQTILNLNYNNTSLVTAPIYIKRGIFQGDALSPLLFCLALNPLSELLDRSELGYKLSYGGSHCTLSHLMYMDDIKIYSSSKDELFQLANLIETFSNDIRMQFGIDKCKIHSVIRGRTQSASYTLQSGESIESISKEMGYKYLGFQQSNKIHHKYTKSCLTKQFKYRLNQILKTELNSRNLIKAINTFAIPVLTYSFGVIKWSKSDLIRLQRIVHTSLTKFRKHHPKSCIQRLTLPRREGGRGLIDLINLHNRQITTLRKYFHLRSDTSKLHKHVSEVDKKLTPLNLFDRTTQSNEHITTSRDKLDTWASKSLHGRHFKDLHQSHVDKNESNAWLRSGYLFPETEAFILSIQDQVINTANYQKHITNNIHQKDLCRQCKSSSETIQHITGACKMLVQTDYKHRHDQVAAIIHQHLAHSSKFISCKQPYYKYKPEVVLENHTHKLYFDRTILTDRTIHYNRPDITLLDKKNDTVYLIDIAVPNTHNLQSTFSEKMSKYRDLAVEIKKQWRVKNVVIVPIVISTTGVIPKTLSNSLKTLNIQSHMSHILQKAAILNTCRIVRKFLNIS

SEQ ID NO: 2879 - protein, 1358 aa, Cabirus procas
MRLRSRLIPQAGTREGQSRPDPSGSGSPSYSGGGNVSHTTAQSRTVAVADTPSSPLPASDNQSLSSPESLFQSPASSSSYEQPLSTCSRSVSLSPRSVDVVQEATATYPVPTTGAIKRKRRHWTQAMNEFIWRTYLVGTELEKHTRGYLDYLHQEFTQKYPEMDASRQRLGDQFRAILRNKLISQATLDNIRNQVINQFEEAENQIPIQHSQILHNTPNVSSKTTRMKWTDEINENILRFYFQSSNIERDLTAYRRKLHDKFITYYPDLSHISEQRLADQRRAIVNNKMLTSDRIQEIRKEVELQLGQIEIFINSNTIPNENTNIDERDDERVINERESYECEEDCIVNSRKDKENLITKDVRETFITTLNEFENTEPTSRPYIPKQKTSRKLAIIVNNINQYILPKYLHHEIDFNTLHMLIYVAAYTAAKCNGSNFNTHQNKTQIKRRPAWQKRLENKVAELRSQIARLTEFINGNKSSKILATVQIIQKKYKIHAQYENQNTEPKHYLDTLKQKLNAIANRLRRYLNCTKRKTQNTQFYNSEKNFYRNLNMYQKQNDPIAQIPKSDELRQYWANIWENPVQHNSDADWIKDSSITNIPDMHFEDISKDTFLQVIKRTHNWKAPGTDHIHNYWYKKFTSTHSHIHKQINNFINVPNSMPAYITKGKTYMVPKEGGHTLDPAKYRPITCLQTIYKIITACISEHIYTHLNKYNILAEQQKGCRKFSQGCKEQLAIDAIAMTQAFKRKRNIHSMYIDYKKAFDSVPHSWLLQTLNRYKIHPNITHFLETSMTNWQTILHLQCNSTSLTTEPIRIQRGIFQGDALSPLWFCLALNPLSELLNKTDVGYKLTYNSTHYTMSHLMYMDDIKLYASSKQDLFHLADLTDKFSKDIQMQFGIDKCKILSVHRGQTINTNYTLQTGELIDSISEEVGYRYLGYHQSKQIHHKQIKIDLTKKFKQRLNKILKSQLNSRNIFKAINTFAIPILTYSFGIIKWSLTDISRLQRIINTTLTKHRKHHPKSCTQRLTIPRREGGRGLIDLSNLYHKQINTLRQYFHCKSDTSQLHKFASDIDIKQTPLNLSDRNTQNTEQIITLQGKMYTWASKVLHGRHYDDLIQPHVDKNASNAWLRYGQLFPETEAFMLAIQDQVINTANYRKYITKEISQQSDMCRHCKSAPETIQHITGACKVLVQTDYKHRHDQVASIIHQHLAHTCKFLRNKKPYYKYKPETVLENKSHKLYWDRTILTDKTTHYNRPDITLHDKHKSTVYLIDIAVPNTHNLQSTLSEKIRKYRDLAVEIKKQWQVQTVHIVPIIISSTGVIPKVLLKSLKTLNINASTTVLLQKASILNTCRIVRKFLNIV

SEQ ID NO: 2880 - protein, 1238 aa, Cycloglypha thrasibulus
MNKFIWRTYLIATELGKRTRGYLEFVHTEFSKKYPEMDASRQRLGDQCRAIIRNKFLDKTTLDTIKNEVILQLNSTSSQNILQHSQITQLTLGLSGTCRMSWTDEINETVLRYYLKLTNLEKDMTGYRKKLHDKFIEHYPHLTHISEQRLADQRRVIINNKMLSEDKIQEIRREVELQISQNETSNYSHNTSSDIQVHEEIEEGNSQETFYKTPDVCIRKQKNLELYPDYSMISKNKDIVRKEIEEQFIATLEEFQNTDPISRPYIPKQKTSRKFSLIVQSINEHILPKYLAPDIDFQSLHTLVYVAAYTAVRCNNAKIGRSNRQLIKRKPEWQKRLENKVKVLRSHIARLKEYIVGNRSPKVVAAVQVIRESYKTHAQHEDENREEHHYLDTLKQKLNVTASRLRRYNNCTKRKKQNAQFSTNEKNFYRHLNTDKNQPESSVKLPTSEDLRQYWAGIWENSVQHNKHANWIDISTDSIPRMDFEQVTMDTLVNIIKRTHNWKAPGTDQIHNYWYKRLTCTHPHLHRHINLFIQTPDLMPTYITQGKTFMIPKEGYTDDPASYRPITCLQTVYKIITTCISEYIYNHLSKYNVLTEQQKGCRKYSQGCKEQLTIDSIVMTHAFKRKKNIHSMYIDYKKAFDSVPHSWLLHVLQQYNIHSSITNFLETTMLNWQTIINLNYKDSTLTTEPISIRRGIFQGDALSPLWFCLSLNPLSELLNKSGIGYKLLHNKSCYPLSHLMYMDDIKLYASRKQDLLQLADLTDQFSNDIKMQFGIDKCKVHSVQRGHVLKTEYTLQNGETIEPMNEEIGYRYLGFHQSRQIHHTQIKKDITKKFKHRLNQILKSELNFRNLFKAINTFAIPVLTYSFGVIKWSQTDIEKLQRIINVTLTKYRKHHPKSCIQRLTIPRREGGRGLIDLLNLYHKQINTLRGYFHSKAEISDLHKFASDIDIKYTPLNLNDKGTQNETKILSLQDKNKAWASKSLHGRHYTDLTQPHVDKNASNEWLRYGQLFPETEAFMLAIQDQVINTANYRKHITKANLHKCDLCRLCKSAPETIQHITGACKTLYLSNYKHRHDQIAAIIHQHLAHTCNFIQQKEQYYKYKPDIVLENKAFKLYWDRTIITDRTIHYNRPDITLHDRLNNTAYLIDIAVPNTHNLQTTIAEKLTKYRDLAIEIKKQWQVQNVHIVPIVISSTGVIPKTLFESFRKLNIKSSKSITLQKAAILNTCRIVRKFLNMTI

SEQ ID NO: 2881 - protein, 1360 aa, Chiomara georgina
MRLRNRDIPQAGTSPNSEEESGPGPSSSGCPTYSGGGNVSHMTAQSRTVAANPTPRSCSSTPTSTVESLFESPASSPRSYEGLDPCSSRSTTLSPVSVVVVQEAQAINLAPATGTIKNKRRQWTEDMNKFIWRSYLIATELGKHTRGYLEYLHKEFSKKYPEMDVSRQRLGDQCRAIVRNRFLDQTTLDKIRNEVIIELKTIDSQNRLEPSQLINQSVILSGTTRMNWTDEINEKIIQYYLESTNLEKDMTGYRKKLHDKFISHYPQLTNISEQRLADQRRAIVNNKMLSIGRIEEIRKEVEFKIRQDAISNSNKNINDDYLQIVEQTEVVNSEETFCTTQEESRIEEHFDLCIDHKLINKNEMRREIEDQFKATLDKFKNTDPVTRPHIPKQKTSRKFSVILQIINEHTLPKYLTPDIDFHNLHTLIYVAAFTAAKCNNTKIGASKRPLSKRKPEWQRRLENKVEVLRAHIARLKEYTLGNRSPKVVAAVQVIKTKYKKHAQYEDENTEANHYLDTMKQKLSVTASRLRRFINCTKRKKQNCQFNTNEKSFYRYLTASPNQHESSAKLPTTEDLHDYWAGIWENPIQHNNQADWINSSVNSVPSMEYEQVTLDTLLNVIKRTKNWKAPGTDQIHNYWYKRLTCTHSHLHRHINLFIEKPHLLPPYVTQGKTYMIPKQGYTDDPSNYRPITCLQTVYKIITACISEYIYNHLSKYDVLAEQQKGCRKNSQGCKEQLTIDAIVMTQAFRRKKNIYSMYIDYKKAFDSVPHSWLLLVLNQYNIHPNITNFLNTTMANWKTIINLNYKDTSLTTDPISIRRGIFQGDSLSPLWFCLSLNPLSDLLNRSQIGYKFSHTKPCYPLSHLMYMDDIKLYASSKQDLLQLADLTEKFSNDIKMQFGIDKCKIHSVQRGHTIQTEYTLQNGETIEPLNEDIGYRYLGFYQSKQIHHTQIKKDITKKFKHRLNQILKSELNSRNLFKAINTFAIPVLTYSFGVIKWSQTDIVKLQRIINVTLTKYRKHHPKSCIQRLTIPRREGGRGLIDLSNLYFKQISTLRKYFYCKAELSELHKHAVAADVKYTPLNLKDKNIQHDNKLLSLQAKKDAWSNKSLHGRHYTDLMQSHVDQSASNEWLRHGQLFPETEAFMLAIQDQVINTANYRKHITKENLHKSDLCRLCKSAPETIQHITGACKTLVQTDYKHRHDQIASIIHQHLAHTCKFIQRKEPYYKYKPEVVLENRKFKLYWDRTIITDRTTHYNRPDITLHDRLHNTVYLIDIAVPNTHNLQSTFTEKLTKYRDLAIEIKKQWQVQHVHIVPIVISSTGVIPKMFESFKKLNIDSKKSIVLQEAAILNTCRIVRKFLNVT

SEQ ID NO: 2882 - protein, 1364 aa, Ebrietas anacreon
MRLRNRDIPQADTSLPRGEEESGPGPSSSGCPTYSGGGNVSHMTAQSFTDAVNPTSRSTSSTPTSLVESLFESPASSPRSYEVVYQCSGRSTTLSPISVDVVQEAIAVNPAPTTGNLKSKRRQWTKDMNKFIWRTYLIATELGKHTRGYLDYLHKEFSKKYPEMDTSRQRLGDQCRAILRNRFLDEAIRDEIKNEVLIQLKPTDSQNLLQHSQIIGQTVCLSGTTRMNWTHEINETIIRLYLESTNLERDMTGYRKKLHDRFIAHYPQLTHISQQRLADQRRAIVNNRMLSVGRIQEIRKELELKIKQDEISNCDHTQRDYSQIDEEIRADNDNETLCTAQEYYRDKEEHLELCTDSNVLNKNSGKLLREIQEQFTVILNEFKNTDPVSRPHIPKQKTSRKFSFIVQSINEQILPQYLTQDIDFHSLHTLIYVAAYTAAKCNNPKIGSNKRMSPIRKPAWQKRLENKVEILRAHIARLKEYTLGNRSRKVVAALKTIKKKYKKHAQHEDENTETNHYLDTMKQKLNVTASRLRRYTNCTKRKIQNSQFINNEKNFYRNLTSSQNQHEPSAKLPSPQELHQYWAGIWENPVQHNEQANWINFPRDSIPSMDYEQVTLDALVNVIKNTHNWKAPGTDHIHNYWYKRLTCIHSHLHRHINLFIETPSLLPSYVTQGKTYMIPKKCYTDDPANYRPITCLQTVYKIITACISKYIYNHLSQYDILAEEQKGCRKYSQGCKEQVTIDAIAMTQAFRRKKNIHSMYIDYKKAFDSVPHSWLLHVLNQYNIHPSITNFLNTTMGNWKTIINLNYKDSLVTTDPIFIRRGIFQGDALSPLWFCLSLNPLSELLNKSEAGYKLSHNKSCYPLSHLMYMDDIKLYASSKQDLFRLADLTERFSDDIKMQFGIDKCKIQSVQRGHTVSTEYILQTGETIEPLDEEIGYRYLGFHQSKQIHHTQIKKDITQKFKHRLNQILKSELNSRNLFKAINTYAIPVLTYSFGVIKWSHTDIVKLQRIINTTLTKYRKHHPKSCIQRLTIPRREGGRGLIDLSNLYYKQIDTLRKYFHGKGEVSQLHKHVVNIDTKYTPLNLNNKSIQLHNQILSLQSKKDTWSNKSLHGRHYTDLTQSHVDKNASNEWLRYGQLFPETEAFMLAIQDQVINTANYRKHITKETPHKCDLCRLCKSASETIQHITGACKTLVQTDYKHRHDQIASIIHQHLAHTCNFIQRKEPYYKYKPEIVLENRAFKLYWDRTIITDRTIHYNRPDITLHDRLNNTVYLIDIAVPNTHNLQSTLTDKLTKYRDLAIEIKKQWHVQNVHIVPIVISSTGVIPKMLFESLKKLNIKSNKSIILQKAAILNTCRIVRKFLNIT

SEQ ID NO: 2883 - protein, 1323 aa, Timochares trifasciata
MAVQCRTVAADPTSRSITSTPTSIAESLFESPASSPRSYEVRDQYSTRSTTSSPISVDVVQEALATNLVPTTGMKRNKRRVWTEDMNKFIWRTYLIATELGKRTRGYLELVHTEFSKAYPEMNASRQRLGDQCRAIVRNKFLDETTLDAIRNDVTRELNLTNSPNLLQRSESTHHTLGLSGTRRISWTDEINETVLRYYLELTSLEKDRTGYRKKLHEKFIEHYPQLKHISEQRLADQRRAIINNKMLSEDKIQEITKEVEQKICQNEEEESNYSHNASRDLQINEEIEEENIQELYIEPELYNRKEENLELCTDYRTLSKNNDIMCRKIEEQFIATLKEFQNTDPISRPYIPKQNTSRKFSLIVQSINGQILPKYLTPDIDFQSLHTLVYAAAYTAVKCNNTKIGRNNRQAIKRKPEWQRRLENKVEVLRAHIARLKEYIIGNRSPKVVAAVQIVRRNYRKHAQHEDENTETHQYLDTLKQKLNVTASRLRRYNNCTKRKIQNFQFSTNEKNFYRYLNGNQYQPESSVKLPKPEDLRKYWAGIWENPVQHNMQANWIDSPTDSIPGMDFEQITMETLVNVIKRTHNWKAPGSDQIHNYWYKKLTCLHTHLHRHINLFIQSPHLMPTYITQGKTFMIPKQGYTDDPANYRPITCLQTVYKIITTCISEYIYSHLSKHNILAEQQKGCRKYSQGCKEQLTIDGIVMTQAFKRKKNIHSMYIDYKKAYDSVPHSWLLHVLHQYNIHASITKFLETTMENWQTIVNLSYKNSSLTTEPISIRRGIFQGDALSPLWFCLALNPLSEILNKSGIGYKLLHNKSCYPLSHLMYMDDIKLYASRKQDLFQLADLTDQFSKDIKMQFGIDKCKVHSVQRGRTVKTQYTLQNGETIGPINEEIGYRYLGFHQSKQIHHTQIKKDITKKFKHRLNQVLKSELNSRNLFKAINTFAIPVVTYSFGIVKWSQTDIVKLQRIINVTLTKHRKHHPKSCIQRLTIPRREGGRGLIDLSNLYLKQVNTLRGYFHSKAEISDLHKFASNIDTKYTPLNLNDKNTQNNNKIRTLQDKNEAWASKSLHGRHYTDLMQPHVDKNASNEWLRYGQLFPETEAFMLAIQDQVINTANYRRHITKENLHKCDLCRLCKSASETIQHITGACKTLVQTDYKHRHDQIANIIHQHLAHTCKLIQQKEPYYKYKPEIVLENKAFKLYWDRTIITDRTIHYNRPDITLHDRLNNTTYIIDIAVPNTHNLQSTITEKLLKYRDLAIEIKKQWKVQNVYIVPIVISSTGVIPKMLFESFKKLNISSDKSKILQKAAILNTCRIVRKFLNMT

SEQ ID NO: 2884 - protein, 1314 aa, Mylon lassia
MRLRNRDIPQAGTSLPREEESGPGPSSSGCPAYSGGGNVSHMTAQSHTVAVNPTSRSTSSMPTSPVESLFESPASSPRSYEVMGQCSTRSTTLSPISVDVVQEALATNLVPTTGNKNKRRQWTEDMNKFIWRTYLITTELGQRTRGYLDYLHTEFNKKYPDMEASRQRLGDQCRAIVRNRFLDEATLAEIKSEVLIQLKLTDSQNILQHSQNRHRTPALSGATRMSWTDEINETILRFYLQSTNLEKDMTGYRKKLHDKFIAQYPQLTHISEQRLADQRRVIVNNKMLPIGRIQEIRNEVELQISRDETLNYSQNQDSLQINEQTEQENNEEILCETLEASTDDEVSSKNNDIVRRKIDEQFRVALDEFENTNPVSRPYIPKQKTSRKFCLIVQIINEHILPQYLFPDIDFQSLHTLIYVAAYTAAKCNNTKIGSNNKQLAKRKPEWQRRLENKVEIFRSHIARLKEYINGNRSRKVVATVQIIKQKYKRHAQHEDENTETNHYLDTLKQKLNVTASRLRRYTNCTKRKTQNSQFNTNEKSFYRHLNTNQSQNQSSVKLPTSEELHKYWAGIWENPVQYNKDASWIDSSAGSIPDMDFEQVTLDTLVNIIQRTHNWKAPGTDQIHNYWYKRLTCTHFYLHKHVNLFIETPHLLPSYITQGKTYMIPKQGYTDDPANYRPITCLQTIYKIITACISEHIYNHLSKFNILAEQQKGCKKFSQGCKEQLTIDAIVMTQAFKRKRNIHSMYIDYKKAFDSVPHSWLLHVLNQYNIHPSIINFLDTTMENWQTSLNLNCKTTSLTTESISIRRGIFQGDALSPLWFCLSLNPLSELLNKSGCGYKLSHNKSCYSLSHLMYMDDIKLYASNKQDLFQLADLTERFSKDINMQFGIDKCKIHSVQRGQLINTEYTLETGEIIESLNEDIGYKYLGFHQSKQIHHTQIKKDITKKFKHRLNQILKSELNSRNLFKAINTFAIPVLTYSFGVIKWSQTDISKLQRTINVTLTKHRKHHPKSCIQRLTIPRREGGRGLIDLSNLYYKQINTLRKYFHYKAEYSQLHNYSSNIDTKYTPLNLNDKSSQHDNQIISLQDKNDAWASKSLHGRHYTDLMQPHVDKNASNEWLRYGQLFPETEAFMLAIQDQVISTANYRKHITKEAQHKSDLCRLCKCAPETIQHITGACKTLVQTDYKHRHDQVASIIHQHLAHTCKFIQRKEAYYKYKPEIVLENRAFKLYWDRTIITDRTIHYNRPDITLHDKLNNTAYLIDIAVPNTHNLQSTLTDKMTKYRDLAIEIKKQWQVQNVHIIPIIISSTGVVPKI

SEQ ID NO: 2885 - protein, 1318 aa, Timochares trifasciata
MSAQFFTVAANPIPRSTSSTPTSHVESLFESPASSPRSYEVMYQCSARSTTSSPISVDVVQEAIAINPVPTTGVIKRKRRQWTKDMNKFIWRTYLIATKLEKHTRGYLDYLHEEFSKKYPEMDASRQRLGDQCRAIIRNRFLNQNTRDEIKSEVMILLRSSDAENVFQHSQTTHQTVNLSDATRMKWTDEINETIIRYYLESTNLENDMTGYRKKLHDRFIAHYPQLTHISEQRLADQRRAIINNKMLSLGRVQEIRKEVELKFRQEDISKCNQNTNRDYLQIDEEIEADNADEVLYTFQENNRKEEHVGLYSESKYEDIMRRKIQEQFLTTLDEFENTDPTSRPHIPKQKTSRKFSFIVQSINDHILPEYLKPDIDFNSLHTLIYVAAYTASKCNNTKIGFNKRQLPKRKPEWQKRLENKVEVLRAHIARLKEYTLGNRSPKVVAAVQIIKQKYKKHAQHEDENTETNHYLDTMKQNLNVTSSRLRRYTNCTKRKVQNSQFNNNEKNFYRNLTASENQHEPSVKLPSPEELHQYWAGIWENPVQHNKQAEWITSPQDPTPSMDFEEITLDTLINVIKRTHNWKAPGTDHIHNYWYKRLTCTHSHLHRHINLFIKTPSLLPPYVTQGKTYMIPKKGYTDDPANYRPITCLQTVYKIITACISKYIYNHLSKYDIFAEEQKGCKKYSQGCKEQLTIDAIAMTQAFRRKKNIHSMYIDYKKAYDSVPHSWLLYVLNQYNIHPSITKFLETTMGNWKTIINLNYRESSLTTEPIFIRRGIFQGDALSPLWFCLSLNPLSEILNKSKAGYKLSQNKKCYPLSHLMYMDDIKLYASSKQDLFKLADLTERFSDDIKMQFGIDKCKIQSVQRGHIVKTEYTLQTGDTIEALNEETGYKYLGFHQSKQIHHTQIKKDITKKFKHRLYQILKSELNSRNLFKAVNTFAIPVLTYSFGVIKWSQTDIVKLQRIINVSLTKYRKHHPKSCIQRLTIPRLEGGRGLIDLSNLYFKQIDTLRKYFYGKAEVSQLHKHAVDSDTKYTPLNLNNKEIQYDTHISSVQNKNDAWSNKSLHGRHYTDLMQSHVDKNASNEWLRYGQLFPETEAFMLAIQDQVINTSNYQKHITKETPHKCDLCRLCKNASETIQHITGACKTLVQTDYKHRHDQIASIIHQHLAHTCDFIQRKEPYYKYKPEIVLENRAFKLYWDRTIITDRTTHYNRPDITLHDKLNNIVYLIDIAVPNTHNLQSTQTDKLTKYRDLAIEIKKQWHVQSVHIIPIIISSTGVIPKMLFESLKKLNIDSKKSIILQKAAILNTCRIVRKFLNMA

SEQ ID NO: 2886 - protein, 1138 aa, Apostictopterus fuliginosus
MNEFIIKSYFEVTDLEKDLTVYRMKIYQKFREKFPDLHHITEQRVADQRRAIVHNKLLSADRIQEIRKDVELQLQQTDIFHNSHTQSSIDELNIIANNEGHENNELTHSHTPIHILHEERTQQEVRINTNNYKEHENETYNLETQFKKVLERFNKTNPVTRPYIPKQKTSRKLASIIDCINRYILPKYLLPDLQFDSLQTLIYVAAFTTALHNGSKLDNVLTKNQKGKPAWQKRLENKIKLLRSDIGRLTQFMKGNRSKRVIDAVEIIKDKYKIHTQFEMQNNDLSHFLDTLKQKLNLTASRLRRYLNCTQRKIQNSQFSFNESKFYKNLLNENEQSMVTGNTPTPNSLKQYWTNIWENPVEHNKEASWLHKLTKAPLIQDMEFNHITEDTLTQIIKRTHNWKSPGTDHIHNYWYKKLTCTHTFIHKYINSFIQTPNLMPKYLTHGKTFMLPKDTNTENPANYRPITCLQTFYKIITACVSASINTHLEKHNILAEQQKGCRKNSHGCKEQLTIDTVVMKQAYHGKRSIHSMYVDYRKAFDSVPHSWLLHTLYYYKIHPQLITFLKTAMSNWQTELNLTNNNISIRTEPIRIRRGIFQGDALSPLWFCLAFNPLSDLLNNSQVGFKLIHNNSHHILSHLMYMDDIKIYASTKKELYTLVDITQTFSNDIHMQFGIDKCKIYSVSRGRTLNTSYKLGSGESIEAMDEHSTYKYLGFQQSKYIHQKIAKTNLTNKFKFRLNRILRTQLNSRNIIKSINTFAVPILTYSFGIIKWSLTDLKKLQRIINTSLTKHRKHHPKSCIQRLTIPRLEGGRGLIDIVNLHNTQIHTLRQYFHSKSSESQLHKYAVDIDIKFTPLNLHDTTTQPSEQLTKIQEKTAIWEQKTLHGRHYADLNQPHVDKSASNAWLKHGELFPETEAFMLAIQDQVISTANYRKHITKELAQKSDLCRRCHGAPETIQHITGACKSLVQNDYKHRHDQIASIIHQHLAHTYRFILEKQPYYKYKPQTIWESNTHKIYWDRTILTDKTIHYNRPDITVHDKRNRTVYIIEIAVPNTHNLQSTISEKNSKYRDLAIELKCQWQVHNVHIIPIIISSTGVIPKNLSQSLKLLNIHSRVIETLQKAAILNTCRIVRKFLNIFD

SEQ ID NO: 2887 - protein, 1294 aa, Spioniades abbreviata
MCTKNPKNIKYNLRSLSRAPNMRIPQTFHGNHISDITDHQTDSSAHTSFPQSPFESPTSSLRSYEKPSSTNSQSTTLSPRSVDVVQEAIATDPVPTTGTTKNKRRKWTLEMNRFIWRTYLIATDLEKNVSGYLDYLHSEFTQKYPEMNASKQRLGDQRRTIFRNKLLHQDILNDIKKQVSMECAELSTQNHTHKLKQYTQQEILTPHTPHLTRMKWTDEINETIMRFYFESSNLEQDLTAYRKKMHEKFKVHYPQLSFVTEQRVADQRRAIVHNKMLTEEKIEEIRGEVQSQMKHIQTRPTAQNISCYSQTSKIRDIETTYEYSILNKTCENAKDNDNRNYKYVEEQFKTFLDKFRNCDPTSRPHIPKQKTSRKFANIVQNINQHILPKYLFPDIDFHLLHTLIYVSAYTAATCNDTKFSDCQITHPQRKPAWQNRLEFKIKELRSNIGRLTQYIKGNRSFKVLAAVDTVRKKYKIHAQYENKNNEPSHFLDTLKQKLNITANRLRRYLNCTKRKTQNAQFHNNEKNFYRKLGTVQNNEAMRQAPTLHALRQYWASIWENPVQHNKDADWLRTENTSITDMAYEKITENILLQIINRTHNWKAPGTDQIHNYWYKKLTSIHPYIHKHINQFIQTPNVMPAFITHGKTYMLPKDNDTVNPAKYRPITCLQTIYKIITACISEAIYSHLGKHNILAEQQKGCRRHSQGCKEQLTIDSIVMSQAFKRKRNIHSMYIDYKKAFDSVPHSWLLDTLHYYKIHPQLISFLENSMQNWQTVLNIFHRSTPVTTEPIQIKRGIFQGDALSPLWFCLALNPLSELLNRSKVGYRLTHNGSHFTLTHLMYMDDIKLYGSTNTELFKLADITEKFSNDIKMQFGIDKCKIHSVNRGRILHTSYTLQTGESIDCMDNSSSYKYLGFHQSNQIHHKQTKINLTKQFKYRLNQILKTELNSRNVTKAINTYAIPVLTYSFGVIKWSQSDLIKLQRIINTSLSKYRKHHPKSCSQRLTLPRQEGGRGLIDITNLHNKQIQTLRRFFHAKADTSKLHKFTSESDTKFTPLNLHYTAKQHNERYINSQEKLDIWASKSLHGRHYADLNQPHVDKNASNAWLKFGQLFPETEAFMLAIQDQVINTANYRKHITKEISNQSDSCRQCKSAPETIQHITGACKMLAQTDYKHRHDQIGSIIHQHLAHFHKFISKKEPYYKYKPQTVLENSTHKLYWDRTILTDRTIHYNRPDITLHDKSNHTAYLIDIAVPNTHNLQCTITEKHSKYRDLAIEIKKQWQVQTVHIVPIVISTTG

SEQ ID NO: 2888 - protein, 1030 aa, Polygonus savigny
MAHKNCSTIQSLHTQSHTCTPHEEQGEHESSLCQYIEEEFIQGIQRFENTNPTTRPFIPKQKPSRRLALAVNCINRHIFPKYITSDIPYNSLQTLIYVAAFTAANYNGTKLEKNINTDSTRKPPWQVRLEIKIERLRSEIGKLTQYIRGNRSKKVVSAVEIIKEKYRTHAQFQDLNFEPNHFLDTLKQKLNVAACRLRRYILCTKRKSQNSQFYNNESKFYRNLVNNKQTRTSDNAPTPNTLRHYWANIWETPVEHNKEAIWLKDLTMASEISHMHFEQVNKTTLIQIIKRTQNWKSPGTDHIHNYWYKKFTCIHSLIHKYVNQFIQSPNTMPTYITHGKTYMLYKGAETENPANYRPITCLQTIYKIITSCISEFIYGHLEKYNVLAEQQKGCRKYSQGCKEQLTIDAVVMKQAIQKKKNIHSMYIDYRKAFDSVPHSWLLHILRYYKIHPQIITFLETSMSNWRTVLNLSNNANNITTEPIRIQRGIFQGDALSPLWFCLAFNPLSELLNKSRTGFKLVHNNTHHILSHLMYMDDIKLYASSKKSLYKLADITQSFSNDINMEFGIEKCKIHSVNKGCIQNINYYLETGQQIDAMDENSSYKYLGFYQSKQIHHNSAKDNLTKNFKFRLNRILNTQLNSRNLIKAINTFAIPILTYSFGIISWTQTDLKKLQRIINTSLTKYRKHHPKSCTQRLTLPRREGGRGLIDIVNLHNTQIHTLRHFFHTKAPISELHKFIVNIDSKYTPLNLHDRSTQINEKVLNAHEKTEAWAKKSLHGRHYADLSQPHVDKIESNAWLQRGELFPETEAFMLAIQDQVINTANYKKYISKELANQSDLCRQCKGASETIQHITGACKALVQTDYKHRHDQIASIIHQHLAYTCKFIQRKQPYYKYKPQAVFENNSHKLYWDRTILTDKTIHYNRPDITLHNKLNSTAYIIDIAVPNTHNLQSTISEKMSKYRDLAIELKTQWKVQTVHIVPIALSSTGVVPKLLHKSLKTLNIHSHVSRTLQKAAILNTCRIVRKFLNIY

SEQ ID NO: 2889 - protein, 1454 aa, Atrytonopsis hianna
MMEAKRNRKLPQAGTSAECEGESRSKPTGLGCSTYSGGSNVARTFYRLRPRSTSGKVLQKNQNQTSPSSSSTQSLFSSLPSTKSFIQPNYITPTLNSLHQEDVAWEENLVSSSVPTTCGSRAINKWCLEMNVITNSNHKLPPRYNLRCRSHAQSNHQTDIATRSSSPESLFPSLPSSPCSYEDRLQNQSRSSTSTPTSIDVVQEANATNVAPTIGKIGRTRRRWTKEINEFLWRTYLIATELEKNHRGYLDYLHPHFIQKYPEMNVSRQRLGDQCRAIVRNKLLQQETLDKIRHEDSQLLLSNDSQTLESLPNNDLSSNRMRWSIDTNEFIIRSYFEVTEVEKELTAYRKKLYEKFQEKFPHLSHISEQRVADQRRSIICNKLLSPDRIQEIKKEVEMKILVQQTNVFSQHTTHEIINNDSYDHTEQVQADSIYTDQTEQEVVADSAGYMERKNRVYIKHKFKEFLERFENTNPITRPFIPKQKVSRKVVIAVDYIIRYILPEYLAPDITFDYLQTLIYVAAFTVTTYNGAKMDENCVIKNKKSKPAWQSRLEGKIEQLRSDIGRLTQFINGNTSRKVSRAVDRIKEKHKLHAQFEDKNNELYQFLDTLKQKLNVTASRLRRYLKCTKRKSQNIQFSNNESRFYKTILKDKEHPLITNATPTSDELRKFWGNIWENPVEHNRNANWLKELNNTQQIPEMQFEQITENTILQVIKRLHNWKSAGTDHIHNFWYKKLTSTHAHILKHINLFIQSPSTMPKYFTYGKTYMLPKDSDTKNPANYRPITCLQTIYKIITACISESIKNHVMKYNVLAEQQKGCRKYSHGCKEQLTIDAVVMKQAFHKKRNIHSMYIDYRKAYDSVPHSWLLHILAHYKIHPQLISFLETSMSNWQTVLNINVNNTTITTDPIHIKRGIFQGDALSPLWFCLAFNPLSELLNKTQAGFKLIYKGTHHVLSHLMYMDDIKLYASNKKELFTLADLTQNFSNDINMQFGVDKCKIHSVNKGRILNTSYRLDSGELIEAMDEHSSYKYLGFYQSRQIHQKSTKLILTNKFKFRTQQILKTQLNSRNTIKAINTFAIPILTYSFGIISWSKTDLKKLQRMINTNLTKHRKHHPKSCIERLTMPRHEGGRGLIDVLNLHNSQVKILRQFFHTKALTSDLHRYIVDVDEKLTPLNLHDRTTQPNEQLVNVQDKTARWAQKSLHGRHYADLNQPHVDKMESNAWLKHGELFPETEAFMLAIQDQVINTANYRKHITKELALQSDLCRRCKGAPETIQHITGACKALVQNDYKHRHDQVACIIHQHLAHTYKFIQKKQPYYKYKPHSVLESKTHKLYWDRTILTDKTVHFNRPDITVLDKHNTTAYIIDIAIPNTHNLQTTITEKLTKYRDLAIELKTQWQVQTVHIIPIVLSSTGIIPKFLSNSLRLLKIPSHVSKTLQKAAILNTCRIVRKFLNIN

SEQ ID NO: 2890 - protein, 1236 aa, Ochlodes sylvanus
MRTRRRWTKEINEFLWRTYLIATELEKNPRGYLDYLHPQFIQKYPDINVSRQRLGDQCRAIVRNKLLHQEVLDKIRQEVTLLLQTNDSQVYEPLPNNELGSNRMRWSNDINEYIIRSYFEVTEAEKELTAYRKKLYEKFQEKFPHLPHISEQRVADQRRSIICNKLLSASRIQEIKKEVEMQILIQQTSVLSQHATDEYIYNDSHDHPQQLQTDNTYTEQTHQEMVVDRNNYIEHKNRDYIKHKFKEFIDRFDNTNPLSRPFIPRQKVTRKLAVAVDYINKSILPEYLLPDVTFDHLQTLIYVTAFTVATYNGAKMDTCAIRSQKSKPAWQKRLEGKVVELRSDIGRLTQFINGSRGRKVCRTVDRIKEKYKLHAQFEDKNNDLPQFLDTLKQKLNVTASRLRRYLKCTKRKSQNIQFANNESKFYKTILNDIDQPVKTKDTPTSNELKHFWGNIWENPVEHNRNAIWLEELHNTQQIPEMQFERITENTMLQVINRLHNWKSAGTDQIHNFWYKKLTSTHTHILKHINLFIQSPSTMPKYLTHCKTYMLPKDSDTKNPANYRPIACLQTIYKIITACISESIKTHLMNHNVLAEQQKGCRKHSHGCKEQLTIDAVVMKQAFHKKRNIHSMFIDYKKAFDSVPHSWLLYILDYYKIHPQLISFLEASMSNWQTELNVNINNTTITTEPIHIQRGIFQGDALSPLWFCLALNPLSELLNKTQVGFKLIYKGTHHVLSHLMYMDDIKLYASNKKELFTLADLTQTFSNEINMQFSVDKCKIHSVNKGQIINTSYRLDSGELIEAIDEHSSYKYLGFHQSRQIHQKPTKLNLINKFKFRIDHILKTQLNSRNTVKAINAFAIPILTYSFGIISWSVTDLKKLQRMINTSLTKHRKHHPKSCIQRLTLPRLEGGRGLIDILNLHNSQVNILRRFFHTKSLTSDLHKYIVDIDEKLTPLNLHDRATQTNEQIVCVQDKSATWAQKSLHGRHYADLNQPHVDKSESNAWLKHGNLFPETEAFMLAIQDQVISTANYRKHITKELALQSDLCRRCKGAPETIQHITGACKSLVQNDYKHRHDQVACIIHQHLAHTYKFIPKKQPYYKYKPQSVLESKTHKLYWDRTILTDKTVHFNRPDITVHDKLNMTAYIIDIAIPNTHNLQTTISEKLTKYRDLAIELQTQWQVQTVHIIPIVLSSTGIIPKLLSKSLELLKIPAHISQTLQKAAILNTCRIVRKFLNVN

SEQ ID NO: 2891 - protein, 1295 aa, Doberes anticus
MNNTNPKNIKYNLRSLSRASGARSLHTPYGHNQVNTTADHQNGSSVHTSPPGSLFESLTSSPRSYEEPSSTKTRSTTLSPRSVDVVQEAIAINPAPTTGIINNMRRKWTEDMNKFIWRTYLIATDLEKHISGYLDYLHPEFTKMYPDMNASRQRLGDQCRAIVRNKLLHEDILNNIRHQVSVEYAALKTHNHIHNLHQHTHNHTTHTQQKHQTPNSLGLTRMKWSDQINETILRFYFESSNLEQDLTAYRKKMHDKFKTHYPHFSFVTEQRVADQRRAIVQNKMVTAERIEEIRREVQLQMRHQQIPHITQNKISQKHEDGDMEVMNESTVLNETSEIYTDIRNEAAVIDTEINSIDSKYVEQQFIFFLNQFKNSDPTSRPQIPKQKTSRKFACIVQNINQHILPKYLLPDIDFHSLHTLIYVSAYTAATCNGSKFGDYQIRHFKRKPAWQERLENKIQELRSNIARLTQYMKGNRSFKILAAVDKIKKIYKTHALYENENNEPCHFLDTLKQKLNITASRLRRYLNCTKRKTQNAQFNNNEKSFYRKLSISQENKESTIFTPTAHELRQYWASIWENPIQHKRDAGWMQNIVDTSVTDMSFVEISENILVQVINRTHNWKAPGTDQIHNYWYKKLSSTHPYIHKNINHFIQNPNTMPKFITHGKTYMLPKDSDTKNPAKYRPITCLQTIYKIITACVNESIYSHLSNHNILAEQQKGCRRHSQGCKEQLVIDSIAMSQAFKRKKNIHSMYIDYKKAFDSVPHSWLLETLHLYKIHPQLINFLETSMQNWQTVLTLHLNNTSLTTEPIQVKRGIFQGDALSPLWFCLALNPLSELINKSEVGYKLTYNGSHCTLTHLMYMDDIKLYGSSKEELFQLADITERFSNDIKMQFGIDKCKIHSVNRGRTLNTSYTLQTGESIECMNKQMTYKYLGFHQSNQIHHKQTKSNLTTQFKHRLNQILKTELNSRNIIKAINTFAIPVLTYSFGVIKWSQSDLTKLQRVINTNLSKFRKHHPKSCIQRLTLPRREGGRGLIDITNLHNRQIQTLRRYFHSKADRSELHKYTSYSDTKFTPLNLHDRASQRNEHIINSEEKLDIWASKSLHGRHYADLNQPHVDKKESNAWLRYGQLFPETEAFMLAIQDQVINTANYRKHITKEISNQSDLCRQCKSSPETIQHITGACKVLVQKDYKHRHDQIASIIHQHLAHYYKFIPRKEPYYKYKPQIVLENSTHKIYWDRTILTDRTIHYNRPDITVHDKQTDTAYLIDIAVPNTHNLQSSFTEKMSKYIDLSIEIRK

SEQ ID NO: 2892 - protein, 1359 aa, Pseudonascus paulliniae
MKKSQKVKHFYNLRSISSAHKQTTNMSSSNGEELGRRAHTEQLLVVSTARNETGSSTRPSSPESIFSSLASSPHSYEDPVQYQSRSTTVSPVSVDVVQEANATSPVPTADNKRKRRRWTEEMNKFIWRTYLIATKLEKHTRGYLDYLHPQFTQKYPEMDTSRQRLGDQCRAIVRNKLLPQVVLDDIRSQVTDYFQSTDSQSSSHHSQALHQTQNLLGLSRMKWTDDINEWIMRFYFEVTDVEKDMTAYRKKMYDRFMEKFPHLHHISEQRLADQRRAIVYNKLLPVLRIQNIKREVELKLHEHNLSNNILETTAEYNYITDNNVNENINQIETQTYTPDERQNEQEVRLNTARHIEHEYKICQYIEEEFTKVWKRFENTNPITRPFIPKQNTSRKLMLAVDCINRHIFPKHVTTNIPFDTLQTLIYVAAFTAATYNGTRVDKTPHTELLRKPNWQRRLENKIERLRSDIGKFTQFIKGNRSRKVIDAVEIIKEKYKTHAQFEDLNYEPSHFLDTLKQKLNTVANRLRRYLNCTKRKNQNSQFSTNESKFYRNLVTDRNNTQVSGTPTSSVLKHYWASIWENPVQYNKEASWLSNLSNFSEISDMHFEHVTENTFSQIIKRIHNWKSPGTDHIHNYWYKKFTSLHSLILKHINVFIQAPNTMPSYITHGRTFMLPKDDETENPAKYRPITCLQTIYKIITACISESIYTHLDKYNIIAEQQKGCRKYSHGCKEQLTIDAVVMKQAFQKKRNIHSMFIDYRKAFDSVPHSWLIHILRYYKIHPQIIRFLESSMSNWQTVLKLTNNRSTVTTEPIRIQRGIFQGDALSPLWFCLAFNPLSELLNKSRAGFKMTHNKSHHILSHLMYMDDIKLYASSKKDLYKLADITQTFSKDIHMEFGIDKCKIHSVNRGRLQNISYYLDSGEQIEAMDEHSTYKYLGFHQSKNIHQSAAKENLIKKFKFRLNRILKTQLNSRNLIKAINTFAIPVLTYSFGIIAWTQCDLKKLQCLVNKSLTKHRKHHPKSCIQRLTIPRREGGRGLIDIVNLHNSQVHTLREFFHTKTSVSDLHKYTVDIDSKFTPLNLHDRNTQHNEQLVSNKDKLEIRARKSLHGRHHKDLGQPHVDRNESNAWLKRGELFPETEAFMLAIQDQVINTANYKKFITKELAGQSDLCRQCKGASETIQHITGACKALVQNDYKHRHDQIASIIHQHLAHTYKFIPKKQPYYKYKPQTVFENSTHKLYWDRTILTDKTIHYNRPDITLHDKQSSTAYIIDIAVPNTHNLQSTISEKMLKYRDLAIELKSQWQIQTVHIIPIVISSTGVIPKLLSKSLKLLGIHSSASHTLQKAAILNTCRIVRKFLNID

SEQ ID NO: 2893 - protein, 1351 aa, Hyalothyrus neleus
MKQHKINPYNLRSLSSTSTSTRSMRPVHRKELNRRALTERNFAISTVDNQTRSSSRSTTPESLFPSLASSPRSYEDPVHNLSRSTTLSPTSGDVVQEAIAISPAPTTDCTKRKRRRWTEDMNKFIWRSYLIATEVEKHTRGYLDYLHEAFIQKYPEMDTSRQRLGDQCRAIIRNKLLPQSVLDDIKKEVTRNLHSTVSQTHHPLHQTQTSTGLTRMKWTDDLNECIIRYYFEVTEIEKDMTVYRKKLHDKFKEQFPHLHHISEQRLADQRRAIMYNKLLTINKIEEIKNEVELKLQQIQPKDSTTNTSTLPNVEHINYIDTVQLGSNEYEEEHEEQVGTNSTRHIEHASFNCQNINEEFSKVLKHFVNTNPISRPFILKQKTSRKLALIVDCINQHVLPKHLTPDTDFQTLQTLIYVAAFTAAVCNGTKRLDDSAIVYLKTKPKWQIRLENKIKQLRSDIGKLTQFIKGNRSKKVTDGVEVIKEKYRTHATFEDQNYEPNHFLDTLKQKLNATASRLRRYLKCTNRKKQNSQFSNNESKFYRNLVSNKEQQLPEATTLTSNTLKDYWANIWENSEEHNKEATWLQNLTQSSDIQDMPFEQITLNTLEQVIKRTHNWKSPGTDHIHNYWYKKFTCVHALIHKHINQFIQSPNTMPEYVTHGKTYMLPKDAEIDNPAKYRPITCLQTIYKIITACVSDSIYRHLDKYSVLAEQQKGCRKLSHGCKEQLTIDAVVMKQAFQSKRNIHCMYIDYRKAFDTVPHSWLLHILDYYKIHPQIITFLKASMSKWQTVLNLVNNSTNITTEPIHIQRGIFQGDALSPLWFCLAFNPLSELLNKSGAGFKLTHNKSYHKLSHLMYMDDIKLYASSKKDLFKLVDLTQLFSKDIHMQFGIDKCKIHSVTKGRIQNTSYYLENGEQIEAMDEHSSYKYLGFHQNKHINQRSAKANLTKKFKCRLNRILKTQLNSRNLIKAINTFAIPVLTYSFGIISWTQSDLKKLQQIVNTSLTKHRKHHPKSCIQRLTMPRREGGRGLIDILNLHNSQIHTLRQFFHAKALVSDLHKYTVDIDTKLTPLNLHDSSKQPNEHLVDNQQKTSVWAQKSLHGRHHSDLSKPYVDRNESNAWLKCGELFPETEAFMLAIQDQVISTANYRKHITKELANQSDLCRQCKGASETIQHITGACKSLVQNDYKHRHDQIASIIHQHLAHSHKFIPQKQPYYKYKPQTILENKTHKLYWDRTILTDKTIHYNRPDITLHDKQNMTAFIIDIAVPNTHNLQSTISEKMSKYRDLAIELKTQWKVQNVYIIPIVISSTGVIPKLLNNSLKSLNIHPQVSRTLQKAAILNTCRIVRKFLNID

SEQ ID NO: 2894 - protein, 1329 aa, Toxidia parvulus
MDAWLGGSSVANGPSPIPGDLGEYSSLTSASGALPELTFYSLAVFIIIMQNSNQKIYKRNKNPYNLRSLSGAHQGTSRNMRSTNSVDTSDNQTEIYTCSSSSESLFPSLASSPRSYEDVFQHQSRSTTPSPVSVAVVQEANAIHPAPTTGTIKRSRRRWTEDMNKYIWRTYLTGTELEKHTRGYLDYLHPKFKQQFPEIEASRQRLGDQCRAIIRNKLLPQAVLDDIRNQVALQLQSTHTQDSQTSLHSQNTLAIPTRMRWTSDINESIMRFYFEVTDVEKDMTVYRKKLYDRFKEKYPHLHHISEQRLADQRRAIVRNKFLSKDRIQEIKREVELQLQNEKNLFNENRQHAVDEGLVSLTMTDCDNDGQQFDTNIYLQRQIGITQEEQTEQEVNKISNIEDNNKAYIEEQFNKVLGRFQYTNAVTRPFIPKQKGSRKLDIVVDYINQNILPKYLQPDIQFDLLQTLIYVAAFTAALCNGTKIDNYVYKDPQRKPFWQKRLENKIEGLRSEIGRLTQFIKGNRSRKVTIAVSILKEKYKIHAQYEDQNSELNHFLDTLKQKLNATSSRLRRYLNCTKRKLQNSQFSNNEHKFYRNLVTNSEQQLPVSRDVPTSDELKQYWANIWENPVEYNRGAEWLQKLTKTSEIPEMLFDHITENTITQVIKRTHNWKSPGTDHIHNYWYKKLTCTHPYIHKFINKFIQSPNTMPEYFTQGKTYMLAKDTDTKNPANYRPITCLQTIYKIITACISESINTHLEKYNILAEQQKGCRKRSHGCKEQLTIDAVVMKQAYQKKRSIHSMYIDYRKAFDSVPHSWLLYILRHYKIHPQLIAFLETAMSNWQTVLNLTINNTSLTTTPIRIQRGIFQGDALSPLWFCLAFNPLSELLNKSQAGFKLIYNNSHHILSHLMYMDDIKLYASSKKELYNIVDLTQTFSKDIQMHFGIDKCKIHSVSRGQIQNTSYHLESGELIEAMDAYSTYKYLGFHQSKHIHQKTAKLSLTKKFKFRLNRILKTQLNSRNIVKAINTFAIPVLTYSFGIINWSQTDLKNLQRTINTCLTKHCKHHPKSCLQRLTLPRREGGRGLIDIMNLHNTQIHTLRQYFHTKAQQSDLHKYTVNIDNKFTPLNLHDTTTDFNKRLVNAEQKNAAWAQKSLHGRHYADLRLPHVDKTESNAWLRRGELFPETEAFMLAIQDQVINTANYRKHITKEGAHQSDLCRQCKGASETIQHITGACKSLVQNDYKHRHDQIASIIHQHLAYTYKFIHSKQPYYKYKPQTVFDNQTHKLYWDRTILTDRTIHYNRPDITLHDKQNMTAYIIDIAIPNTHNLQSTIS

SEQ ID NO: 2895 - protein, 1185 aa, Euphyes dion
MNVSRQRLGDQCRAIVRNKLLHPDILNKIRNEVSVLLQTNSSQTQHESLANSDLGSNRMRWSNDINEFIIRSYFEVTEVEKQLTAYRKKMYRKFQEKFPHLLHISEQRVADQRRSIIFNKLLPANRIQEIRTEVEMQILESQANVSLQNTTQEFINNDSNSHLQQAQTDNIHTEQIQQQNVANRINYRDYIQHKFKESLERFENTDPVCRPFIPKQKVSQKLSVVVDYINQSILPEYLVPNITFKDLQTLIYVTAFTVATYNGAKMDKYVKNEKSKPAWQKRLEGKIEKLRSDIGRLTQFINGNRSRKVNRAVDRIKEEHNLHAQFEDQNNNPQQFLDTLKQKLNVTASRLRRYLKCTKRKNQNIQFSNNESRFYKTLLDENNQPKIIKDTPTSNELKHYWGNIWENPVEHNKNANWFKELNNTHQIPEMEFEHITENTMSQVIKRLHNWKSAGTDHIHNYWYKKLTSTHTHIHKYINLFIQSPSTMPKYFTYGKTYMLPKDSNTNNPANYRPITCLQTIYKIITACISESINTHVIKYNILTEQQKGCRKHSHGCKEQLTIDAVVMKQAFHKKRNIYSMYIDYKKAFDSVPHSWLIHILHYYKIHPQLISFLETAMENWQTVLNININNTAITTDPIRIQRGIFQGDALSPLWFCLAFNPLSELLNNTQSGFKLIYKDTHHTISHLMYMDDIKLYASNKKDLFKLADLTQTFSIDINMQFGVDKCKIHSVNKGRILDNSYRLDSGELIEAMDEHSSYKYLGFHQSRQIHQKTIKLNLIQKFKYRINKTLKTLLNSRNTVKAINSFAIPILTYSFGIISWSVTDLKKLQRMINTSLTKHRKHHPKSCIQRLTMPRLQGGRGLIDLINLHNSQVNILRQYFHTKALTSDLHKYVADIDEKLTPLNLHDRTMQLNEQVVNVQEKSAAWAQKSLHGRHYADLNQPHIDKCESNAWLKHGELFPETEAFMLAIQDQVISTANYRKHITKELALQSGLCRRCKGAPETIQHITGACKSLVQNDYKHRHDQVAGIIHQHLAHTLKFILKKQPYYKYKPQPVLESKTHKLYWDRTILTDKTIHFNRPDITVHDKYNMTAYIIDIAIPNSHNLQTTISEKMTKYRDLAIELQTQWQVQTVHIIPVVLSSTGVIPKLLSKNLEVLKIPTNISYTLQKAVILNTCRIVRKFLFIK

SEQ ID NO: 2896 - protein, 922 aa, Thymelicus sylvestris
MDNSIIKNNKIQNNKPAWQKRLENKIAQLRSDIGRLTQFSNGNRSKKVCRAVERIQEKHKLHAQFEDKNYELTQFLDTLKQKLNVTSSRLRRYLKCTKRKSQNIQFINNESKFYKNFLNNKDQPVITDTPTSDELKHFWANIWENPVEHNRDAIWLKELNNNHIPEMQFGNITDNTISQVIKRTHNWKSPGTDHIHNFWYKKLTSTHTHLLKHINLFIQSPTSMPEYFTHGKTYMLPKNSDTSNPANYRPITCLQTIYKIITACISESIRTHLMKYNILAEQQKGCRKYSHGCKEQLTIDSVVMKQALHKKRNIHSMYIDYRKAFDSVPHSWLLHILNYYKIHPQLISFLETSMSNWQTVLNLNNMTTTITTDPIRIQRGIFQGDALSPLWFCLAFNPLSEMLNKTQAGFKLIYKDTHHVLSHLMYMDDIKLYASNKKELFTLADITQIFSNDINMQFGVDKCKIHSVNKGKILNTNYRLESGELVEAMDEHSSYKYLGFHQSRQIHQKSTKLELINKFKHRINQILKTQLNSRNTVKAINTFAIPILTYSFGIISWSPTDLKKLQRLINTSLTNHRKHHPKSCIQRLTIPRCDGGRGLVDILNLHNSQIHILRQFFHTKALTSDLHKFIVDIDEKITPLNLHDRTTQSSEQPVNIQEKTATWAQKSLHGRHYADLNQPHVDKSKSNAWLKYGELFPETEAFMLAIQDQVISTANYRKHITKELASQSDLCRRCKGAPETIQHITGACKSLVQNDYKHRHDQIASIIHQHLAHTYKFIPKKQPYYKYKPQSVLENKTHKLYWDRTILTDKTIHFNRPDITVHDKQNMTAYIIDIAIPNTHNLQTTISEKLTKYRDLAIEIQTQWHVQTVNIIPIVLSSTGVIPKLLDNNLKLLKIPTYISQTLQKAAILNTCRIVRKFLNIN

SEQ ID NO: 2897 - protein, 1337 aa, Racta chiria
MRLRNRQIIPRAGPRERESRPELSGSGCPNVYGGGNVSLTAQSSAVAGNIILHNSSPTSPTSLTSPTSPTSPTSPTSIFQSPVSSPQSFMYQHTPQSSPTTFTSSTTSHIVRQSISGENLSRKTPFELSEHLINQTNSRLAFKYNLRTRSQIKVSKRSYQLDPQTKITTRSSTPENLLSSLAISPCSYEDRLQNQSGSSTPTPATVDVVQEANAANFAPTTGKIVRTRRRWTEEMNKFLWRTYLIATELEKNLRGYLDYVHPQFIQKYPEMNVSRQRLGDQCRVIVRNKLLSQEILDNMRHEVSLFLQSNNSQTQRHEYNNHSNRMKWSNDINEFIIRTYFKVTGAEKDLTAYRKKLHEKFQEQYPHLEHISEQRVADQRRSIICNRLLSADRIQAIKNEVELQIQQENILSQNMATELIRDNIIYEYDYQHHTQPADTNTEPTQYNITSDRTNYMEHKNKLYIENKFNEFLKRFKNSNPVTRPFIPKQKTSRKLAIAVDYINRSILPEYLVPDIEFNHLQTLIYVTAFTAATYNGAKMDNYAVKNQKSKPAWQNRLEIRIEQLRSDIGRLTQFITGNRSRKVSRAVERIKDKYKVHAQFEDNNYDLNQFLDTLKQKLNVTASRLRRYLKCTKRKIQNVQFSNNESKFYKNLLNDKDQPVISRDAPTSEELKHFWGNIWENPVQHNTNAKWLKDLNDTKQIPEMQFEHITETTMTQVMKRTHNWKSPGTDHVHNFWYKKLTSTHVHILKYINLFIQSPSTMPKYFTQGKTYMLPKDTDTKNPANYRPITCLQTIYKIITACISVLINTHVTQNNILAEQQKGCRKYSHGCKEQLTIDAVVMKQAFHKKRNIHSMYIDYRKAFDSVPHSWLVHILIHYKIHPRLISFLEVSMSNWQTVLNINVANTTITTDPIRIQRGIFQGDALSPLWFCLAFNPLSEILNKTPSGFKLIYQGTHYVLSHLMYMDDIKLYATNKRELFTLADLTQTFSNDINMQFGVDKCKIHSVNKGRILDTGYHLDSGELIEAMDEHSSYKYLGFHQSRLIHQKTAKLNLIKNFKFRINRTLKTQLNSRNIIKAINAFSIPILTYSFGILSWSASDLKKLQRIINTSLTKHRKHHPKSCIQRLTMPRLEGGRGLIDILNLHNSQVHILRQFFHTKALTSDLHKFIVDIDKKLTPLNLHDRTVQSNEYLISLQEKSHTWAQKSLHGRHHADLNQPHVDKAESNAWLKNGDLFPETEAFMLAIQDQVIRTANYRKYITKELVLQSDLCRRCRGAPETIQHITGACKSLVQNDYKHRHDQIASVIHQHLAHTYKFIPKKQPYYKYKPQSVLENRTHNK

SEQ ID NO: 2898 - protein, 1355 aa, Ectomis pervivax
MKKSLKQQKHSYNLRSITAARKQITNSNSYTSEELSRRTLTEEHLAFTDESQTSSESLFPSLTSSPQSYEDLIQHRSRSTTESPMSVDVVQEANAILPAPNADNTKRKRRRWTEEMNKFIWRTYLVVTKLEKHTRGYLDYLLSEFAQKYPEMDASRQRLGDQCRAIIRNKLLPQAVLDDIKNQVTIELQCTSQTSIHKSQSQNSTLTRMKWTDEVNEYIMRFYFEVTDLEKDMTAYRKKLHEKIIERFPHLHNISEQRLADQRRIIVHNKLLSVEKLQEIKTEVEVKLHTLSLNHSNTQQAIVDINSNTNSNLQEYQYNINVNVAQQHNCMLGEENVQEEQINVTHVEHESFMCQDIEEEFIKRLKQFENTSPTSRPFIPKQKTSRKLALTVDCINRHILPKYLRADISFNSLQTLIYVAALTTAVCNGTKFKNNIDRNIERNKKTVFKPRWQIRLEIKIERLRSDIGKLTQFIKGNRRKKTVETIKEKYKKHAQFEDLNFEHSQFLDSLKQRLNVVSSRLRRYLNCTKRKNQNSQFSNNESRFYRNLVSDKKQTNNITNTPSPNALQHYWANIWQNPVEHNKEASWFQNLSMASKVPDMIFECITEKTVTKIIKRMQNWKAPGTGHIQNYWYKKFYCTHSLIHKYINQFIQSPNTMPTYITHGKTYMLPKNAETDNPANYRPITCLQTIYKIITACISESIYTHLENNNILAEQQKGCRKYSYGCKEQLTIDAVVMKQAVQKKRNLYSMYIDYRKAFDSVPHSWLLYILTYYKVHPQIIKFLETSMSNWQTVLNVPNNSTNVTTEPICIKRGIFQGDALSPLWFCLAFNPLSELLNTSQTGFKLIYNNSHYILSHLMYMDDIKLYAPSRNSLYKLADITQTFSKDIHMEFGIDKCKIHSLNKGCTQNTNYCLETGQQIEAMDENSSYKYLGFHQSKAIHQKSAKEDLTNKFKFRLNRILNTQLNSRNLIKAINSFAIPILTYSFGIITWTQTDLKKLQRIISTSLTKHRKHHPKSCSQRLTLPRREGGRGLIDIVNLHNTQIHTLRQFFHTKALVSDLHKHIVDIDSKFTPLNLCDKNTQLNEKLVNVKEKTDVWAQKSLHGRHYADLSQSHVDKNKSNAWLQRGELFPETEAFMLAIQDQVINTANYKKFISKELAHQSDLCRQCKGASETIQHVTGACKALVQTDYKHRHDQIAAIIHQHIAYSCKFILEKQPYYKYKPQTVFENATHKLYWDRTILTDKTIHCNRPDITLYDKRNSVAYIIDIAVPNTHNIQSTISEKMSKYRDLSIELKAQWKVQTVHIVPIVLSSTGVIPKHLSKSLNILNIHSYISLTLQKAAILNTCRIVRKFLNIF

SEQ ID NO: 2899 - protein, 1323 aa, Asbolis capucinus
MLREGRTLEAYSCIHTNDQRSSSKTKTAMRLRNRQIIPRAGPRERESRPEPSGSGCPNVYGGGNVSLSTAQPSAAAGNIISLTHSLPSLSTSLLPSPLSPPQLFMADKTKSNSNLPFRYNLRTRSHTKVSKRSNQLDHQTEIGTRSTTPESLFSSLPSSPRSYEERSQSQSRSNISSSATVDVVQEANAANFAPTTGKIVRKRRRWTEEMNKFLWRTYLVATDLEKNPRGYLDYVHPQFIQKYPELDVSRQRLGDQCRAIVRNKLLRQEIMDNIRHEVQLFLQSNSSQTQTHESQHNNDLTRMRWSNDMNEFIIRSYFQVTKAEKDLTAYRKKLYDKFQEQYPHLKHISEQRIADQRRSIMCNRLLSADRIQVIKNEVELQIHQENILPQNTTNVLHISNDTDYDYLHNTQIDTNTEPVQHEIITNRINYMEHKNKLYIKNKFKEYLERFQNTSPVCRPFIPKQKISRKVAVAIDYIDRSVLPDYLVPDIEFKYLQTLIYVSAFTVATYNGAKMDSCVIKTQKSKPNWQKRLEIRIEQLRSDIGRLTQFITGNRSKKVSRAVETIKEKYKVHAQFEDNNYNLNQFLDTLKQKLNVTASRLRRYLKCTKRKIQNVQFSNNESKFYKSLLKDKDPFISGDVPTADEIKHFWGNIWENPVEHNTNAKWLTDLSNTNQIPEMHFEHITESTMSNVIRRTHNWKSPGTDHIHNFWYKKLTSTHIHILRYINLFIRFPSAMPEYLTQGKTYMLPKDTDIKNPASYRPITCLQTLYKIITACISELIKTHVIQNNILAEQQKGCRKYSHGCKEQLTIDAVVMQQAYQKKRNIHSMYIDYRKAFDSVPHSWLLHVLDHYKIHPRLISFLEASMSNWQTILNLNVANTTITTDPIRIQRGIFQGDALSPLWFCLAFNPLSEILNKTPAGFKLIYQGTHFMLSHLMYMDDIKLYATSKKELFTLADLTQTFSNDINMQFGVDKCKIHSVNKGRILNTGYYLDSGELIEAMDEHSSYKYLGFHQSRQIHQKSTKLMLIDKFKFRINRILKTHLNSRNIIKAINTFAIPILTYSFGIIKWSKADLKKLQRSINTSLTKHRKHHPKSCIQRLTIPRLEGGRGLIDIFNLHNSQVNILRKFFHTKSLTSDLHKYVVDIDTRFTPLNLCDRTVQANENLTSVQEKNGIWSQKSLHGRHYADLNQPHVDKAESNAWLKYGNLFPETEAFMLAIQDQVISTANYRKHITKELALQSDLCRRCRGAPETIQHITGACKSLVQNDYKHRHDQIASIVHQHLAHIYKFISKKQPYYKYKPESVLENRTHKLYWDRTILTDKTI

SEQ ID NO: 2900 - protein, 1251 aa, Perichares adela
MESWLKSKRLGPLPGGDRRGTPGADAGCHSMQTVSGEELNRRAPSGYPEYVTANQTDSNCRTNHKSPSRYNLRSRPQTQFNTGPTQTQPQIEVDTHPTSPESLFPSLSSSPSSYAEQLQNQSRSATSTPTSVDVVQEADATNLASTAGKSIRTRRRWTEDMNKFLWRTYLIATELEKNPRGYLDYLHPQFTQRYPEMDVSRQRLGDQCRAIVRSKLLHQDILDTIRSEVSILLQSTGSQTTTHQSQSFNSAGTTRMRWSNDMNEFIIRSYFEVTEAEKEITAYRTKLHKKFQEKFPHLEHISEQRVADQRRVIIRNKLLSVDRIQEIKNEVELQIQQTSVQHTIDEYIYTDTYDHQHTQLNNTNTQHIPQEFPENNVTNIEHKNKLYIENLFYTLLDRFENTNPVTRPFIPKQKTSRKLFEAVDYINKHILPKHLIPDIEFDQLQTLIYVTAITTATYNGTKIDDYTVKDPKSKPAWQRRLERKIEQLRSDIGRLTQYIKGNTSKKVITTVDRIKEKHKLHAQFEDENYDHNQFLDTLKQKLNVTASRLRRYLKCTKRKSQNNQFSNNESKFYKNFLNDKNQPAVVTDTPTSEELKLFWGNIWENSVEHNKDAHWFTELSNTNHITEMYFEQINEDTITQVIKRTHNWKSPGTDHIHNFWYKKLTSIHKHIHKHINSFIQAPCTMPKYFTYGKTYMLPKDSDTKNPANYRPITCLQTIYKIITACISESIKIHLTKNNILAEQQKGCRKYSHGCKEQLTIDAVVMKQAFQKKRNIYSMYIDYKKAFDSVPHSWLLHILNHYKIHPQLISFLETSMTNWQTVLNVTNSNTTTTTEPIRIQRGIFQGDALSPLWFCLAFNPLSEILNKSQAGFKLIYKDSHHVLSHLMYMDDIKLYASNKKELFKLADLTQTFSKDINMQFGIDKCKIHSVNKGRILNTSYQLDSGDFIEPMDEHSSYKYLGFHQSRQIHQKTTKANLIKKFKHRLGQILKTHLNSRNTIKAINTFAVPILTYSFGIISWSQTDLKKLQRIINTSLTKYRKHHPKSCIQRLTLPRREGGRGLIDILNLHNSQIHILRHFFHTKSQTSDLHKYTVDIDTKLTPLNLHDRRTQHNEQLVRAQEKNATWAQKSLHGRHYADLTQPHVDKNESNAWLRRGELFPETEAFMLAIQDQVISTANYRKHITKELALQSDLCRRCKGAAETIQHITGACKSLVQNDYKHRHDQVASIIHQYLAHSYKFIQKKQPYYKYKPQ

SEQ ID NO: 2901 - protein, 1374 aa, Panoquina ocola
MENRLKLERLGPLPGGNRRGTPGADAGCSSMRTVSGDELNRRALSGSPEHVTANQANGNRKLSCRYNLRSRSHAHLNEQSNRTDHQTQVDTLSTSPQSLFSSLASSPRSYEEDRSSTSTPVLADVVQEADAAIFAPTTGTIVRTRRRWTQDINKFLWRTYLIATELEKNPRGYLDYLHQQFTQKYPEIDVSRQRLGDQCRAIVRNKLLHQEILDNIRHEVSLLLQSSDSQTHTHQLNNDLPGTTRMRWSNDINEYIIRSYFEVTEAEKELTAYRKKLHEKVLEKYPHLHHLSEQRVADQRRSIIHNKLLTADRIQEIKQDVQLQIQQRNILLPQTQEFINNIDDNYDHTQQTQEDTIHAEEIQNTVANRVNYTDHRNRDYIENKFKEFLERFENTNPISRPFIPKQKTSRNLITAVNYINESILPKYLKPDIQFSYLQTLIYVAAFTTATYNGSNIDNYLPKNQKSKPAWQIRLEKKIKQLRSDIGRLTQFVSGNRSKKVSKAVERIKATNKIHAQFEDINSDHSQFLDTLKQKLNVTASRLRRYLKCTTRKSQNNQFSNNESKFYKNLFNDNDFQATTKDTPTSNEFQLFWSNIWEKPVEHNRNAKWFKDLDNTHHIPEMHFEHVTEDTILQVIKRTHNWKSPGTDHIHNFWYKKLTSTHTHILKHINLFIKSPSTMPKYFTQGKTYMLPKSSDTNNPANYRPITCLQTIYKITTACISEAIKTHVMKHNILAEQQKGCRQHSYGCKEQLTVDAVVMKQAIHSKRNIHSMYIDYRKAFDSVPHSWLLYILDYYKIHPRLIHFLEISMSNWQTILNINIRNSMITTEPIRIQRGIFQGDSLSPLWFCLAFNPLSEILNRTQAGFKLTHEGTHQTLSHLMYMDDIKLYASSKKQLFLLADLTQTFSNDIHMQFGVDKCKIHSVSKGHILNTNYRLESGELIEAMDEHSSYKYLGFHQSRQIHIKNTKSELINKFKYRINKILKTQLNSRNIIKAINTFAIPILTYSFGIINWSQTDLIKLQRIINTSLTKHRKHHPKSCLQRLTIPRRDGGRGLVDIQNLHNNQIKLLRQYFHTKALTSDLHKYTVDIDKKMTPLNLHDRTVQCNIISIQEKTATWAQKSLHGRHYADLNQPHVDKDKSNAWIKIGELFPETEAFMLAIQDQVISTANYRKHITKELATQSDLCRRCKGAPETIQHITGACKSLVQNDYKHRHDQIASIIHQHLAHTFKFIPKKQPYYKYKPQSVLENRTHKIYWDRTILTDKTIHFNRPDITVHDKQNMIAYIIDIAIPNTHNLQSTISEKLTKYRDLAIELQTQWQVQTVHIIPIVLSSTGIIPTLLNNSLNLLKIPEHVSQTLQKAAILNTCRIVRKFLNIS

SEQ ID NO: 2902 - protein, 1120 aa, Quadrus cerialis
MNKFIWRTYLIATDLEKNTRGYLDYLHSEFSKKFPEMNASRQRLGDQCRAIVRNKLLHQNILSDIRHQVSTERSTLSGRNHIHQYNTIQRNTIEISQYTQQNTPRPAGLTRMKWTNEINETIIRLYLESSNLEKDLTGYRKKMHDKFVNQYPHLSFVSEQRLADQKRVIIHNKMLSVEKIEQIKEEVQLNILRTKNTTRNTLDNSNDRQDEVMDRIAEHTRPIAAENVTTSTYKYCFNDTYLEEDFKKHFEQFKNTNPTSRPHIRKQNTSRKLADIVQYINNHILPNYLNPDIDFNTLHTLIYVSAFTAAAYNGTKIAESRTKQVKRKPAWQQRLEDKIKDLRSNIARLTQYITGNRSHKIVQVVNKIREQYINHAQYEDQNNEPNHFLDTLKQKLNVTANRLRRYLNCTKRKTQNAQFQNNEKHFYRNLCTNQVNNDSTRHIPTSHDLREYWASIWENPVEHKKDATWLNNSSDNLVTEMPFKEVSETVLVQIINRTHNWKAPGTDQIHNYWYKKLTSTHPHIHKHINQFIQTPQLMPSFITYGKTYMLPKGSDTKNPANYRPITCLQTIYKIITACLSQLIYTHLNNYNILTEQQKGCRKQSQGCKEQLTIDSVVMTQAFKNKRNIYSMYVDYKKAFDSVPHSWLLETLHIYKIHPQIISFLKSSMQNWQTVLNLNHNNTSLSTEPVNIKRGIFQGDALSPLWFCMALNPLSELLNKSESGYKLTYNRSHCTLSHLMYMDDIKLYGSSKKDLYQLAAITEHFSNDIQMKFGIDKCKVHSVQRGKILNNTYTLQSGEHIESMTSQMSYKYLGFNQSNKIHHKQAKCKLTQQFKCRLNEILKTELNSRNTVKAINTYAIPVLSYSFGIIKWSQSDLIKLQRIIHTSLTKHRKHHPKSCIQRLTLPRREGGRGLIDITNLHNRQIQTLRRYFHIKADSSVMHKYTSNSDNKFTPLNLHDPITQHNEHIVNSEEKLDAWATKSLHGRHYADLNQPHVDKDESNAWLRSGQLFPETEAFMMAIQDQVINTANYRKHITKEIADRSDLCRHCKSSSETIQHITGACKMLVQTDYKHRHDQVASIIHQHLAHSYNFINRKQAYYKYNPQTVLEIIFLVRKANTSN

SEQ ID NO: 2903 - protein, 1367 aa, Achlyodes mithridates
MRLRSRLIPQAGTREGESRPGPSSPGSPSYSGGGNVSHTTVQSQPVAVDNTSSHNTTDPSSPLSFTQSLYKSPSSPDTLFESPPSSPRSYEQQPHSRSFTLSPRSVDVVQEATAKNPVPATGIIKRKRRQWTQDMNEFIWRTYLIGTELEKHTRGYLDYLHQEFTKKYPEMDASRQRLGDQYRAIHRNKLLNQTTLTNIRNQVIHQLQAADSQPNLQCSQISNQTQNSLSMTRMKWTDEINENILQFYYEASNLEQDMTAYRKKMYDKFTAHYPHFSHISEQRLADQRRVIIHNKMLSYDRIQEIRSKVELQLKLSEIPDEVQNISNHNSSRGNSTEKQAESEVVTHNIDENEDHEHINSKRRKIIHKNVEEQFVKVLDEFKNTDPISRPYIPKQKTSRYLALIVHYINKHILPKYLLPDIHFDKLHTLIYVAAYTAAKCNGTKFNPDKGKKQIARKPAWQKRLECKVEELRSQIARLKEFIRGNRSSKILAAVKNIKEKFKIHAQYENENSEPEHYLDTLIQKLNSTANRLRRYKNCTKRKIQNNHFHNNEKLFYRNLSQREGEIELRAKIPTQHELRQYWANIWENPVHHNPDTICMKSSNHSSIADMQFEQVTEDTLTRVITRSHNWKAPGTDHIHNYWYKKFTSTHPHLHNHINQFIKSPHLMPTYITHGKTFMVPKDGYTQDPAKYRPITCLQTIYKIITSCISEHIYTHVNKYNILAEQQKGCRKSSQGCKEQLTIDAIAMTQALRRKKSIHSMYIDYKKAFDSVPHSWLLQILNYYKVHPQITSFLSTSMKNWQTVLNLNHNSTSLTTEPIRIQRGIFQGDALSPLWFCLALNPLSELLNKTDMGYKLTYNSSHHTLSHLMYMDDIKLYASSKQELFHLADLTEKFSNDIKMEFGIDKCKIHSVNRGRTINTEYTLKSGELIEPLNQEVGYKYLGFHQSKKMHHKQIKTDLTKKFKHRLNIILKTELNSRNIFKAINTFAIPIITYSFGVIKWSLTDLAKLQRVIHTSLTKHRKHHPKSCIQRLTIPRREGGRGLIDLTNLYHKQIDRLRRYFHCKADTSQLHKYASDIDTKLTPLNLHDRNANHNEQVLSTRDKYKTWASKSLHGRHYADLEQPHVDKNASNAWLRYGQLFPETEAFMLAIQDQVVNTANYRKHITKEISQQHDLCRQCKGAPETIQHITGACKMLVQTDYKHRHDQVASIIHQHLAHICKFIDHKEPYYKYKPETVLVNEKYRLYWDRTILTDKTIHYNRPDITLHDKLNSTVYLIDIAIPNTHNLHSTYNEKITKYRELAIEIKKQWRVNIVHIIPIIVSSTGVIPNSLSKNLKVLNINSITNMTVILQKASILNTCRIVRKFLNMS

SEQ ID NO: 2904 - protein, 938 aa, Pyrgus malvae
MLIYVAAYTAAICNGFKVINDKRKQTAERKPAWQRRLERKVEKLRSHIARLKEFINGNRSSKIIATVTIVKNKYKLHANYEDENSEPSHYLDTLKQKLNATASRLRRYLNCTKRKSQNAQFYNSEKSFYRNLGTQYKDDSPTATVPNADSLRRYWASIWENPVQHNKDAEWIKNFATTTIPDMDYEQISLNTFVQIIKRTHSWKSPGTDHIHNYWYKKFTSTHLQILKHINFFIKSPHTMPTFVTQGKTYMIPKEVYTEDPAKYRPITCLQTIYKIITACLSEKIYAHLDNYSLLAEQQKGSRKFSQGCKEQLTIDAIAMTQALRRKRNLYSMYVDYKKAFDSVPHSWLIQTLNEYKIHPEITNFLSTTMQKWQTVLNIQHNGNTITTEPINIQRGIFQGDALSPLWFCLALNPLSNLLNKTNAGFKLTYDHSHHTLSHLMYMDDIKLYASSKQELFQLADLTENFSNDIQMQFGIDKCKIHSISRGKTLNTQYTLQTGEVVDSVSNEIGYKYLGFHQSKQIHHKQIKSDLTKKLKHRLNQILKTQLNSRNTFKAINTFAIPVVTYSFGVLKWSQTEIKKLQRIIHTSLTKHRKHHPKSCTQRLTIPRREGGRGLIDLLNLYHKQIDSLRKYFYFKADSSELHKYVTGIDKKFTPLNLQERNMQLNEKIISLQRKHETWASKSLHGRHYTDLQQPHVDKGASNEWLRYGQLFPETEAFMLAIQDQVVNTANYRKHITKEIMQQSDLCRQCKSASETIQHITGACKILVQTDYKHRHDQIASIIHQHLAHTCNFLESKVPYYKYKANVVLENRSHKIYWDRTILTDRTIHYNRPDITLHNKLNNTVYLIDIAVPNTHNLQTTLNEKMTKYRDLAIEIKKQWEVRTVHVVPIIISSTGVIPKGLYSSLKTLKINANISILLQKAAILNTCRIVRKFLGIT

SEQ ID NO: 2905 - protein, 977 aa, Eantis tosta
MTNHNKKQKTSRKLASIVHYINQYILPKYLLPDIEFCSLQTLIYVAAYTAAKCNGTKFQLNKEKQPKIRKPIWQKRLENKIEELRAHIARLKEFINGNRSSKVLATVQLVKKKYRTHAQYENENSEPNHYLDTLKQKLNSTANRLRRYKNCTKRKVQNTQFHNNEKIFYRNLSQEHNKLETARVPTQDELRQYWANIWENPVQHNSDTSWAENSHNTTIPDMHFEKITEDTFIRVIKRSHNWKAPGTDNIHNYWYKKFSCTHSHLQKHINLFIETPHLMPTYITHGKTFMLPKEGYTQDPANYRPITCLQTIYKIITACISEHINTHLNKYNLLAEQQKGCRKFSQGCKEQLTIDSIAMTQAFRQKKNIHSMYIDYKKAFDSVPHSWLLQILTQYKIHPYITNFLRISMTKWQTVLNLNHNNTSLTTEPIRIQRGIFQGDALSPLWFCLALNPLSEILNRTNMGYRLTYNSSHYTLSHLMYMDDIKLYASSKEELFHLADLTERFSNDIGMQFGINKCKIHSVNRGRTVSTEYTLQSGELIESLNQEVGYRYLGFYQSKQIHHRQIKLHLIKTFKHRLNKILKTELNSRNLFKAINTFAIPVITYSFGVIKWSLTDLTKLQRIINTSLTKHRKHHPKSCIQRLTIPRREGGRGLIDLVNLYHKQIDTLRRYFHYKAETSQLHKYTSDIDIKLTPLNLHDKNTQCNNQVITTQDKTKSWASKSLHGRHYADLTQPHVDKNASNAWLRYGQLFPETEAFMLAIQDQVVNTANYRKHITKEISQQSDLCRHCKSAPETIQHITGACKILVQTDYKHRHDQIACIIHQHLAHSYKFVAHKEAYYKYKPEIVLENKSHKLYWDRTILTDKTVHYNRPDITLHDKLNSTVYFIDIAVPNTHNLQSTITEKITKYRDLVIEIKKQWQVQTIHIIPIVISSTGVIPKTLFKSLKLLNIEPNISVILQKASILNTCRMVRKFLYIS

SEQ ID NO: 2906 - protein, 1234 aa, Eantis tosta
MNEFIWRTYLIGTELEKHTRGYLDYLHQEFTKKYPEMDASRQRLGDQYRAIHRNKLLNQTILTNIRNQVRHQLQAADSQHNFQLSQIANQTQNSLSVTRMTWTDEINENILQFYFEASNLEQDMTAYRKKMHDKFKAHYPHLSHISEQRLADQRRAIIHNKMLTSDRIQEIRNKVESQLRQIEISDEVQNISHHNSSRSKSTQKQAENEVTTHSNDGNEDQEDHTDSKKNQNIRKNVEEQFVKVLNDFKNTDPISRPYIPRQKTSRNLSFIVHYINKHILPKYLVPDIQFDRLHTLIYVAAYTAAKCNGTKFNPNKGKKQIIRKPAWQKRLESKVEGLRSHIARLKEFIRGNRSSKILAAVATVRKQFKIHAQYENENSEPEHYLDTLMQKLNSTANRLRRYKNCTKRKIQNSHFYNNEKVFYRNLNQHERESALTAKIPTQHELRQYWANIWENPVHHNPDTSCIKNSNHSTITDMQFEQVAEDTLLRVITRSHNWKAPGTDHIHNYWYKKFTCTHSHLQNHINQFIKSPHLMPTYITHGKTFMVPKEGYTQDPAKYRPITCLQTIYKIITSCISEHIYTHLNKYNILAEQQKGCRKFSQGCKEQLTIDAIAMTQALKRKKNIHSMYIDYKKAFDSVPHSWLLQILNHYKVHPQITSFLSTSMKKWQTVLTLNHNSTSLTTEPIRIQRGIFQGDALSPLWFCLALNPLSELLNKADMGYKLTYNSSHYTLSHLMYMDDIKLYASSKQELFHLADLTERFSNDIKMEFGIDKCKIHSVNRGHTNNIEYTLQSGELIEPLNQEVGYKYLGFHQSKTMHHKQIKADLTKKFKHRLSNILKTELNSRNIFKAINTFAIPIITYSFGVIKWSLTDLTKLQRVIHTSLTKHRKHHPKSCIQRLTIPRREGGRGLIDLTNLYYKQIDKLRRYFHCKADTSRLHKYASDIDTKLTPLNLNDRNTDYNEHVLSTRDKFKTWSSKSLHGRHYADLQQSHVDKNASNAWLRYGQLFPETEAFMLAIQDQVVNTANYRKHITKELFQQNDLCRQCKCAPETIQHITGACKMLVQTDYKHRHDQVASIIHQHLSHICKFKDHYEPYYKYKPETVLINKKHKLYWDRTILTDKTIHYNRPDITLHDKLNHTVYLIDIAVPNTHNLLSTYNEKITKYRELAIEIKKQWQVNKVHIIPILVSSTGVIPNSLSDNLKILNINSVTNTIVTLQKASILNTCRIVRKFLNIS

SEQ ID NO: 2907 - protein, 1322 aa, Ampittia dioscorides
MFKTHVINIFRTSQLTQSKTVVRHENTSSSSQSSPLSSSSTQSIFRSPSSSPFSFQSTSTTFSSMSVDVVQEADAINPAPTTDKTIRKRLRWTEDMNKFIWRTYLISTKLETQHRGYLDYLYPQFSMKYPDINVSRQRLGDQCRAIRRNKLLTQSQLDHIHHEVSLHLHNTLPQTPTHEIQSQVVLGASRMRWPMEINEHIIKIYYEVTNIEQDMTAYRKKLYEKFLEKFPHLHHITEQRIADQRRAIIYNKLLTVDKIQEIKKEVELQLKTTNNKTSQETQEQIDSFNNDNLPTQTHTNIYSGSQTIAENSVNISNHNEQRQHLDIEDEFNDNLKHFQGTDPVTRPYIPKQILTRKLTNVVNYINRTILPKNLNSDVDFNTLQTLIYVGAYTAATYNGSIIGNYEANRTSTKPQWQKRLEKKVEELRADIGRLTQFINGNSNRKISKAVEIIKEKHKSHAQFENQNHDLNHFLDTLKQKLNVKSSRLRRYIKCTERKVQNTQFSNNESKFYKQLNTKDQHHEITNGIPDSNDLKQFWINIWGNPVEHNKNAKWFRDLTHTDQIPEMQFENISINTFKQIITHTHNWKAPGTDHLHNYWYKKFTSTHTYIHKFINLFIQSPDAMPKYFTQGKTYMIPKGTDTKNPGNYRPITCLQTIYKITTACISESIKDHLEKFNILTEQQKGCRRFSQGCKEQLTIDSVAIQQAFRRKKDLHTMFIDYRKAFDSVPHSWLLQILHTYKIHPQLVLFLKTSMSHWQTVLNLNHNKTIITTEPIHIRRGIFQGDALSPLWFCLAFNPLSELLNKSQVGYKLTHKNSHYTLSHLMYMDDIKLYASSETELFKLADITQIFSNDINMQFGIDKCKINSVSKGQILDTSYHLESGEIIEAMGEHSTYKYLGFHQSRQIHHKTAKLNLTDKFKHRLNQILKTQLNSRNIIKAINTYAIPVLTYSFGIINWTPTDLHKIQRIINTSLTKERKHHPKSCVQRLTLPRSEGGRGIIDILNLNNKQIHLLRNFFHNKAQISDLHKLTVNIDDKCTPLNLHNTAKQRNEDQVSDQEKTYAWAKKSLHGKHQKDLNQSHVDKAESNAWLKSGKLFPETEAFMIAIQDQVINTANYRKHIIKDLANQSDLCRRCKGAPETIQHITGACKSLVQSDYKHRHDQIASIIHQHLAYAHKFIFKKQQYYKYKPLTVLANKTYNLYWDRTILTDKTIHYNRPDITLHDKINKTAYIIDIAIPNTHNLQTTISEKMTKYRDLAVELQTQWRVNKVHIVPIVLSSTGVIPKLLNNSLKLLNIPPHISRTLQKAAILNTCRIVRKFLSID

SEQ ID NO: 2908 - protein, 1346 aa, Zera sp.
MINKTPKNIKYNLRSLSRAHSSQSLQTHNAGSQVNTAAGSQTSPSLHSLSSSESLFESVNSSPPYFEKSSSTYSRSNSSPNSVDVAQEAIATNPAPTTGTSKRRKWTQEMNKFIWRIYLIATDLEKNIRGYLDYLHSEFTKTFPEMNASRQRLGDQCRAIVRNKLLHQNILDDIRHQVSTESLTLSSRNYTHENSRIHHNTNIISQHSQQSTPSSVGLTRMKWTDEINETIIKLYFESSNLEQDLTGYRKKMHDKFIIQYPHLSFISEQRIADQRRIIVHNKMLSEEKIEEIREEVQLQILRTKHTSRNILHNSEENEGEVIERIGHTANDFEENVCTIPENFYFKSKCLEQNFEKYFEQFKNSNPTSRPYIPKQNTSTKLFHIVQYINKQILPEYLNPVIDFNMFHTLIYVSAFTAATCNVMTRNLVTPETNQFKRKPGWQQKLEDKIKDLRANIARLIQYIRGSRSYKIVEAVNRVREQYKNHAQYEDQNNELNHFLDTLKQKLNVVANRLRRYVNCTKRKTQNSQFQNNEKNFYRRLSTTQGHNDSTRDTPTSDDLRKYWASIWEEPVEHNKDASWLKNSNINLVPDMPFEEVTESVLVQIVNRTHNWKTPGTDQIHNYWYKKLTSTHPYIHKHINHFIKSPNTMPLFITHGKTYMLPKASDTKNPANYRPITCLQTIYKIITACISHLIYSHLNQYNLLAEQQKGCRRQSQGCKEQLTIDSIVMSQALKQKRNIYSMYIDYKKAFDSVPHSWLLKSLHIYKIHPQLISFLQTSMRNWQTVLNLTHKNNLITTEPINIKRGIFQGDALSPLWFCLALNPLSELLNKSDAGYKLIYDRSHCKLSHLMYMDDIKIYGSNKKDLFKLAEITEHFSNDIQMKFGIDKCKIHSVQRGKTLNTSYTLKTGESIQYMNSQMTYKYLGFKQSNKIHHKQEKSNLTKQFKYRINQILKTELNSRNTIKAINTYAIPILSYSFGIIKWSQSDLKKLQRIINTSLTKYRKHHPKSCIQRLTLSRKEGGRGLVDITNLHNRQIQTLRSYFHSKADSSELHKYTAHSDNKFTPLNLHDRTTQRNEHIITTEQKLGTWAMKSLHGRHYADLNQPHVDKDESNAWLRSGQLFPETEAFMMAIQDQVINTANYRKHITKEIATGNDLCRHCKSSSETIQHITGACKMLVQTDYKHRHDQVASIIHQHLAHTYNFIHRKKPYYKYIPQTVLENRNHKLYWDRTILTDRTIHYNRPDITVHDKQNETVYLIEIAVPNTHNIQSTITEKMSKYRDLAVEIKKQWQVRTVHIVPIVISTTGVIPKPLKRNLASLHIHPHISYTLQKASILNTCRIVRKFLNIE

SEQ ID NO: 2909 - protein, 1341 aa, Pythonides amaryllis
MITRTPKNKKYNLRSLSRALGSKCLQTPNAGNQVNTETRSQISSSIHTSSTESIFQSLNSSPRSFEELSSTHSRSTNLSPRSVDVAQEAIAICSAPTTGTTKHKRRKWTEEMNKFIWRTYLIATDLEKNISGYLDYLHPEFTKQFPEMDASRQRLGDQCRAIVRNKLLHQNVLNDIKDQVSTEISMLHDRNFTQEHNTQHNIISTSQHALQSKVGLTRMKWTDEINETIIRIYYETSNLEQDLTGYRKKMHDKFIIQYPHLSFISEQRIADQRRAIVHNKMLSEGKIEKIREEVQLQIHRTKQTTRNILHNSEENENRVTERTGEHTTHVTAENAIIPVKHYFNDEDIDKEFQKHLEQFKNTHPTSRPHIPKQNTSRKFADIVQYINKHILPKFLLPDIDFNTLHTLIYVSAITAATCNGTKFSERQTTQVKTKPIWQQRLEEKVLDLRSNIARLTQYINGNRSYKIIEAVNIVREKYKNRAQYEDQNNKPHHFLDTLKQKLNVTANRLHRYVNCTKRKTQNAQFRNNEKNFYRRLSTPQENNNSTRPTPTSHELRQYWASIWEEPVEHNKEASWLQNCHNNLLTDMPFEEITESVLVQIINHTHNWKAPGTDQIHNYWYKKLTSTHPYIHKHINQFIQTPNIMPSFITHGKTYMLPKDSDSKNPANYRPITCLQTIYKIITACISQLIYSHLNKFNILAEQQKGCRRQSQGCKEQLTIDSIVMSQAFKHKRNIHTMYIDYKKAFDSVPHSWLLESLHIYKVHPQLISFLKTSMQNWQTVLNLKHDNISLTSEPINIKRGIFQGDALSPLWFCLALNPLSELLNNSETGYKLTYNRSHCTLSHLMYMDDIKLYGSSKKELFKLADITEKFSNDIQMKFGIDKCKIHSVQGGKTLNTSYTLKTGESIECMNNQIGYKYLGFDQSNKIHHKKTKYKLIKEFKHRLNQILKTNLNSRNTIKAINTFAVPVLSYSFGVIKWSQSDLLKLQRIINTNLTKHRKHHPKSCIQRLTLPRKEGGRGLVDIANIHNRQVQTLRRYFHSKADSSELHKYTSYSDYKFTPLNLHDKTTQRNENVTDPQKKLDTWAIKSLHGRHYADLNQPYVDKDESNAWLRSGQLFPETEAFMMAIQDQVINTANYRKHITKEIASGSDLCRHCKSSSETVQHITGACKMLVQTDYKHRHDQVASIIHQHLAQSFKFIHKKQPYYKYNPQTVLENKTHKLYWDRTILTDRTIHYNRPDITIHDKQNETVYLIDVAVPNTHNLQSTITEKMSKYRDLAVEIKKQWQVHTVHIVPIVISTTGVVPKSLKYNLNTLHIHPHISHILQKASILNTCRIVRKFLNI

SEQ ID NO: 2910 - protein, 1343 aa, Zera sp.
MITKTSKNYKYNLRSLSRVPGSRSLQTPDVGNQANTATGSQTSPSIHTSPSGSIFQSISSSPHSIEESSTTHSRSSHLSPRSIDVAQEAIATYSAPTIGTKHKRRKWTEEMNKFIWRTYLIATDLEKNVSGYLDYLHPEFNKKFPEMDATRQRLGDQCRAIIRNKLLHQNILNDIKHQVSTMLSSRNVTQEYQSRTIQHNIIGNSQHTTRMKWTDEINETIIRIYFESSNLEQDLTGYRKKMHDRFILQYPHLSFISEQRIADQRRAIVHNKMLSEEKVAKIREEVQLQIIQRKYTSPNTSHNPQDNEGGAIERIGEHTTPVAVGNETIGTSMQNECHYYFNGTFLEKEFEKYLEKFKNSNPTSRPYIRKQNATKKFCEIVKYIDKHILPKFLIPEIDFEMLHTLIYVSAFTAAACNGTKFGESTTKQIKRKPAWQQRLEDKIKQLRSDIARLTQYIRGNRNYKIVEAVHRVRQQYKNHAQYEDQNNEPYHFLDTLKQKLNVIANRLRRYVNCTNRKTQNAQFMNNEKDFYRNLCKTQEKNDSTMHMPTSHDLREYWASIWEEPVEHNKDATWLNSSYGTTVTEMPFEEISETVLIQIINRTHNWKAPGTDQIHNFWYKKLSSTHPYIHKHINQFIHTPHTMPLFITHGKTYLLPKDSDTKNPANYRPITCLQTIYKIITACLSQLIYSHLNKYNVLAEQQKGCRKQSQGCKEQLTIDSVVMSQAFKRKRNIYSMYIDYKKAFDSIPHSWLLETLHIYRIHPLIITFLKDSMQNWQTVLNLKHHNSLLTTDPINIKRGIFQGDALSPLWFCLALNPLSELLNKSKNGYKLTHNRSHCTLSHLMYMDDIKLYGSSKKELFELADITEQFSSDIKMKFGIDKCKIHSVQRGKTLNTNYTLKTGESIECINSQIAYKYLGFNQSNKIHHKQAKCNLIQQFKYRLNQILKTKLNSRNTIKAINTYAIPVLSYSFGIIKWSQSDLLKLQRIIHTNLTKHRKHHPKSCIQRLTLPRKEGGRGLIDVTNLHNRQIQTLRIFFHSKADSSELHKYISNSDNKLTPLNLHDTIRQRNEHVINPEEKIDTWAIKSLHGRHHADLNHPHVDKDESNAWLRSGQLFPETEAFMMAIQDQVINTANYRKHITKEIASGSDLCRHCKTSSETIQHITGACKMLVQTDYKHRHDQIASIIHQHLAHSFNFINRKQPYYKYKPHTVLENKTHKLYWDRTILTDRTIHYNRPDITVHDKQNEIVYLIDVAVPNTHNLQTTITEKITKYRDLAVEIKKQWQVQTVHIVPIVISSTGVVPKALRRNLNTLNIRHFIIHTLQKASILNTCRIVRKFLNIEHTF

SEQ ID NO: 2911 - protein, 1394 aa, Piruna pirus
MRLRSSNRVPQAGTSNGESRPELSGSGCPTYSGEGTVPLQLVHIMERDTESPLNMISSPCETRNPNLNNMRYNLRSRSGAQTKCVTLNDGELKRQDIINQHETSTRSTSPQSLFPSPASSPRSYECTVEQRSRSTTLSPMPADVVQEAIALNPAPTTGTKRKRRKWSEEINKFIWRSYLIATELETRTRGYLDYLHPQFIQKYPAMDVSRQRLGDQCRAIVRNKLLPQTVLDDIRTEVTLHLQSIHSGAHTHHHHTQTPNLSKPTRMIWSDDINEFIIRCYFEITNIEKDLTAYRKKLYDRFKEKFPHLLNISEQRIADQRRAIVHNKLLQTEKIEEIKREVQLKLQQTYTFDNRDSANRVNQSSHTSIIEEQENHEINVSNSQTYALQEEFMGQEVMPERQYHIEHKNKVLIEKEFQKVLEIFQNTDPIHRPFIPKQKTSRKLASIVDCINCHVLPKYLEPDIHFHSLQTLIYVGAYTAAICNGTKINCVQNINNKRIPAWQRRLRNKIEKLRAEIGKLTQFMKGNKSKRIIEAVDFIKEKYKQHAQYEDQNYELTQFLDTLKQKLNSSASRLRRYLKCTNRKTQNYQFFNNEKKFYKNLVKDNKTPSIVTTDTITADTLKNYWANIWEKPVEHNKDASWILKLSMATQIPQMHFDTITINTLTEVIQHTHNWKSPGTDQIHNYWYKKLTCTHIAILKHINSFIQTPHLMPKYLTHGKTYMLPKDTNTENPANYRPITCLQTLYKIITACIGKSIYTHLEKYNILAEQQKGCRKYSQGCKEQLTIDAVAMKQAIQNKRNMHSMYIDYRKAFDSVPHSWLLFVLDHYKIHPQIINFLQETMNNWQTVLNLNNNDTSLTTEPIRILRGIFQGDAFSPLWFCLAINPLSELLNKSQAGFRLTHNNTHHVLSHLMYMDDIKLYANNQTELFTLADLTQYFSNDIHMHFGIEKCKTHSISKGRVLNINYQLETGEIIEAMDANSSYKYLGFHQSKSILQKSAKNNLMKSFKYRLERIVKSHLNSRNIVKAINTFAIPVLTYSFGIIRWSQSNLKKIQRIINTSLTKQRKHHPKSCLQRLTIPRKEGGRGIIDIVNLHNRQIHTLRNFFYTKSQTSELHKYIARIDSKFTPLNLNDITLQPNEKLMNVQEKTTIWAQKALHGRHFADLSQPYVDKNESNAWLRKGELFPETEAFMLAIQDQVICTANYRKHITKELTNQSDLCRQCKRAPETIQHITGACPSLVQNDYKHRHDQVASIIHQHLAHLFKFIQAKQPYYKYKPQTVFENHTHKLYWDRTILTDKTIHYNRPDITVHDKQNKTAYIIDIAVPNTHNLQSTISEKLTKYRDLAIELRTQWQVLNVHLVPIFVSSTGVIPKLLNKNLKTLDIHPCQYATQYANF

SEQ ID NO: 2912 - protein, 961 aa, Pyrgus malvae
MLTEEKIEDIKRKVEVSITSLHENITYQEIEECRLLENEHACDDTEENRNDETTESRKEHHEFNEAHVTYIEEQFVKAFNRFKDTPPTDRPHIPKQKTSRKLANIVHNINKYILPKYLSSHIDFKTLHLLTYTSAYTTAACNNKKLDYHNNEPCKRKPAWQMRLENKVKELRAQIARLIQYMRGNRNWKIIATVDKVKEKYKIHAQYENENNIPNLYLDTLKQQLNKTASRLRRYLNCSRRKAQNAQFYNNEKNFYRKLKADQETNECITEIPTPDELRQYWANIWENPITHNKNTEWLKNINEKPKTEMQFNQIDASTLIQVIKRLHNWKAPGSDNIHNYWYKKFTCLHPYIHKYINQFIQSPNTMPQFITHGKTFMLPKDTDTKNPAKYRPITCLQTIYKIITACVAESIYLHLDQSNVLAEQQKGCKKYSQGCKEQLIIDSVVMTEALRKKKDIHTMYIDYRKAFDSVPHSWLLETLHLYKIHPQIINFLETSMKNWQTVLNLRYSNKTISTEPIIIKRGIFQGDALSPLWFCLALNPLSELLNKSEKGYKIADKKYTLSHLIYMDDIKLYGSCKEELFHLAGITETFSADIHMEFGIDKCKIHSVRLGRTVNTSYELQSGELIESINKEIGYKYLGFQQSNQIHYKQTKSTLTNHFRHRLNQILKTELNSRNLIKAINTFAVPILTYSFGVIKWSKSDLNKLQRNINTSLTKHRKHHPKSCIQRLTLPRREGGRGLIDLTNLHNSQISTLRKYFFSKSKTSTLHNHILDIDKKYTPLNLHDRTTQLNENIINSQEKLAAWACKSLHGRHYADLNQPHVDKKESNEWLRYGQLFPETEAFILAIQDQVINTANYRKHITKEFRISPETIQHITGACKVLVQNDYKHRHDQIASIIHQHLAHSCKFISRKEPYYKYKPQIVSENKYFKLYWDRTILTDRTIHFDRPDITLLDKQNKIEV

SEQ ID NO: 2913 - protein, 1398 aa, Pyrgus malvae
MRLRNRQVPQAGTQEGESRPGPSGLGCPSYSGVGNVPHMTTQAQPAVVNKRSSFTVHRSSSLSSSQSTTSLVNPSYSHKYNLRSLSRGQMASKSYSQDITSKHLQIHSPIRTSSPESLFVSPTSSPHSYEESVSSRSTSLSSRSVDVVQEATAMQPVPTTGTIKRRKWSDDMNKFIWRSYLIATDLEKRTRGYLDFVYQEFTKKYPEMEASRQRLGDQCRAVVRNKLLHQTVLDDIKHQVSLEYPPSTTNDTQHNSQLSRHTQQTLHSQGISRMKWSDEINESIIQFYFEASHLEQDMTAYRKKMHDKFTARYPHLSYITEQRLADQRRTIVHNKMLTEEKIEDIKRKVEVTITSLHENTTYQEIEECRPLENEHAYDDTQENRNDETTENRKEHHEFNEAHVTYIEEQFAKAFNRFKDTPPTDRPHIPKQKTSRKLANIVHNINKYILPKYLSSHIDFNTLHLLTYTSAYTTAACNNKELDYHNNEPCKRKAAWQMRLENKVKELRAQIARLIQYMRGNRNWKIIATVEKVKEKYKIHAQYENENNIPNLYLDTLKQQLNKTASRLRRYLNCSRRKAQNAQFYNNEKNFYRKLKADQETNECITEIPTPDELRQYWANIWENPITHNKNTEWQKNINEKPKTEMQFNQIDASTLIQVIKRLHNWKAPGTDNIHNYWYKKFTCLHPYIHKYINQFIQSPDTMPQFITHGKTFMLPKDTDTKNPAKYRPITCLQTIYKIITACVAESIYLHLDQSNVLAEQQKGCKKYSQGCKEQLIIDSVVMTETLRKKKDIHTMYIDYKKAFDSVPHSWLLETLHLYKIHPQIINFLETSMKNWQTVLNLRYSNKTISTEPIIIKRGIFQGDALSPLWFCLAINPLSELLNKSEKGYKVADKKYTLSHLMYMDDIKLYGSCKEELFHLAGITETFSAGIHMEFGIDKCKIHSVRLGRTVNTSYELQSGELIESINKEIGYKYLGFQQSNQIHYKQTKSTLTNHFRHRLNQILKTELNSRNLIKAINTFAVPILTYSFGVIKWSKSDLNKLQRNINTSLTKHRKHHPKSCIQRLTLPRREGGRGLIDLTNLHNSQISTLRKYFFSKSKTSTLHNHILDIDKKYTPLNLHDRTTQLNENIINSQEKLAAWACKSLHGRHYADLNQPHVDKKESNEWLRYGQLFPETEAFILAIQDQVINTANYRKHITKELSQKSDLCRQCKVSPETIQHITGACKVLVQNDYKHRHDQIASIIHQHLAHSCKFISRKEPYYKYKPQIVSENKYFKLYWDRTILTDRTIHFNRPDITLHDKQNKIAYLIDIAVPNTHNLQSAISEKLTKYRDLAIEIRKQWQVQTVNIVPVVISTTGVIPKTLLSSLKTLNIHPHTLHTLQKAAILNTCRIVRKFLNLE

SEQ ID NO: 2914 - protein, 1233 aa, Entheus sp.
MNKFIWRTYLIATDLEKNTKGYLDYLHPEFTLKYPEMNASRQRLGDQCRSIVRNKLLNQVTLNYIRQQVTLEYPLLSSNNLTLNSATQTTRMKWSNEINETIMRLYFETSNLEQDLTSYRKKMHSKFVAYYPHLSHITEQRLADQRRVIIYNKMLSTEKIEEIRKEVELQITQVETFNVQVHNTSLLCEETNVEVIDEQNSLNETYENTNEKQKEVATNHITIHNKNVDLKYLEKEFSKFLEQFENSNPTSRPYIPKQKTSRKLANIVQNINNHILPKYLSSDIDFNTLHTLIYVAAYTAATCNNTKFEHYQNRHYKKRPAWQIRLENKVKELRSYIARLLQYIKGNTSRKILLAVDMVRQKFKIHAQHERDNNEPQLFLDTLKQKLNITANRLRRYLNCTKRKTQNAQFCNNEKSFYRKLTTELGKNEAIERVPTQDNLKQYWSNIWENPVTHNKEAYWLKNINDPSISEMQFEKITENILKQVISRTHNWKAPGTDHIHNYWYKKLTCIHPYIHKHINNFIQTPNIVPKFITHGKTYMLPKDNNTENPAKCRPITCLQTIYKIITACISESIYNHLTKYNILAEQQKGCRKYSQDCKEQLTIDAIVMTQAFRRKKNIHSMYVDYKKAFDSVPHSWLLETLHHYKIHPQIINFLETTMKNWQTVLNLNFKNGSLTTAPIFIKRGIFHLPEGAQSISLSPLWFCMALNPLSKLLNESEIGYQLNYNGSYYKLSHLMYMDDIKLYGSSKEELFQLANLTEIFSNDINMYFGIDKCKVHSVNRGRTSDSNYTLQTGESIESMNKQVGYKYLGFQQSNQIHHKQIKYGLTKHFKSRLNQILKTELNSHNIVKAINTFAIPVLTYSFGVVKWSQSDLTKLQRIINTSLTKYRKHHPKSCTQRLTLPRSEGGRGLIDLTNLHNTQISTLRKYFHLKSDSSELHKYASGNDTKFTPLNLYDRTTQNNEHLTSSKTKLDAWASKALHGRHFADLNSQHVDKSESNAWLKYGHLFPETEAFMLAIQDQVINTANYRKYITKEVTQHTDLCRHCRSSPETIQHITGGCKMLVQTDYKHRHDQIASIIHQHLAYCHKFIPNKQPYYKYKPQVVLENKKHTLYWDRTILTDRTVHYNRPDITVHDKQNNIAYLIDIAVPNTHNLQSTISEKITKYRDLAIEIKKQWNVNTVHIIPIVISTTGVVPKTLITSLKTLNIHPHISHTLQKASILNTCRIVRKFLNMQ

SEQ ID NO: 2915 - protein, 1351 aa, Tiana niger
MNNKNKNIKHKYNLRSLSRAPDVSWSMQTFIGEATTVDSHVGSSTRTPSPESLYESLASTPRSYEEPSSTHSRSTTLSPRSIDVAQKTNVAYSVPTIGTVKNKRRKWTDDMNKFIWRTYLIASELEKRSRGYLDYLHQEFTRMYPEMDASRQRLGDQCRAIVRNKLLNQTILNDIRNQVSLEYPSFSSNNPTHNLTQYTQQQQGQQTAGTTKMKWSDEMNESILRFYFESSNLEKDLTGYRKKMHDKFIACYPHLFFITEQRLADQRRVIVNNKMVDIQRIQEIKKEVDLQQKNTKTSNNVCHLSYDQLLHENTDLRTDKTRHLDESYEDKNEESQIKETSGKETHYKNNEKNKYVEKQFKIALDRFQKSNPTLRPYISKQKTSRKLAYIVQNINQYILPKYLHPEIDFNSLHELIYVSAFTAATCNDTKFDYTQTYRHKRKPAWQTRLENKINTLRSHIARLIQYMKGNRSHKIRIAVETIREQFKTHAQYEVENREPHHFLDTLKQKLNTTANRLRRYLNCSRRKTQNAQFHNNEKHFYRKLTNKQDINKHAAKPPTPEALKEYWANIWENPVLHNREANWLKDVNDATLSDMHFEQISEDTFMRIINRTHNWKAPGTDQIHNYWYKKLTCIHPYILKHINQFIQTPDTLPTFITQGKTYMLPKDDDTENPAKYRPITCLQTIYKIITACISECIYSHLNKHNILAENQKGCRKFSQGCKEQLTIDTVAMTQAFRRKKNIHCMYIDYKKAFDSVPHSWLIDILHLYKIHPQLIKFLGTSMKNWQTELNYNHKNTTFSTESICIKRGIFQGDALSPLWFCLALNPLSELLNKSKIGYRITYNRSHCTLSHLMYMDDIKLYGSNRDELLRLADLTEIFSRDIQMQFGIDKCKIHSIDRDRILNTSFTLQTGETIESLDSQMGYKYLGFQQYNKIHHKETKSNITKQFKYRLNQIMKTELNSRNLIKAINTFAIPVLTYSFGIIKWSQSDLLRLQRLINTNLTKYRKHHPKSCIQRLTLPRNEGGRGIIDLTNLHNTQINTLRKYFQSKENISQLHKYILEADTKLTPLNLQDRTTQRNERIISSKEKFDVWENKTLHGRHFADLNQPHVDKRESNAWLKYGQLFPETEAFMLAIQDQVINTANYRKHITKENFQQSDLCRHCRSSPETIQHITGACKMLVQTDYKHRHDQIASIIHQHLAYYCNFIKKKEPYYKYKPETVLENDTYKLYWDRTILTDRTVHCNRPDITLHDRQNDTAYLIDIAVPNTNNLQRTISEKISKYRDLAVEIKKQWQVQHVHIVPIVISTTGVIPTTLISNLKTLHIKPHISQTLQKASILNTCRIVRKFLNISP

SEQ ID NO: 2916 - protein, 1345 aa, Ernsta delagoae
MQHNNKKHKYNLRSLSQVHNGTWSTQTHRGEATATDHQPGSSTRTPSPESLFGSIASSPRSYEEPSRTHSRSTTLSPRSTDVVQEADAIYPVPTAGIIINKRRRWTDEMNRFIWRTYLIATKLGKEPRGYLDYLHQEFTNKYPEMNASRQRLGDQCRAITRNKLLHESVLNDIRDQISSNYPQFHTNNLTLDSTQCHEQILHTQVSGMRRMRWTNEINESIIRFYFESSNLERDLTAYREKLHKKFINQYPHLKFITEQRLADQRRVIIANKMINDERIQEIRREIELQMQNIEIPNTPHGLPTSANVDLRNDATRTFNETHESDHEEEENSTSAAMQSFCEDNEEIKYVEKHFKIALDRFKNSNPTSRPHIPKQKTSRKLAKIIQNINRHILPKYLQENIDFNSLHTLIYVSAFTTAICNGTKFDQCKTDRKRKKPMWQKRLETKINILRSHIARLLQYMKGNRSHKVVTAVEIVRRDFKTHAQYENKNSELQHFLDTLKQKLSTTANRLQRYLNCTKRKTQNAQFYNNEKNFYRKLASNHEQDNDTANTPTPDELRQYWADIWENPVIHNRSAGWFKDIDSSSLCEMQFEKITESTLTHIISRTHNWKAPGTDQIHNFWYKKLTCTHLHILKHINQFIQTPTTLPTFITQGKTHMLPKDNDTSNPAKYRPITCLQTIYKIITACISESIYSHLHKYNILAEQQKGCRKYSQGCKEQLTIDSIVMTQALRRKKNINCMYIDYKKAFDSVPHSWLLDVLQFYKINPQLINFLETSMKNWQTELNYIHKNTTLTTKPISIKRGIFQGDALSPLWFCLALNPLSELLNKSNLGYKFSHNRSYYTLSHLMYMDDIKLYASNKDELFKLADLTEIFSLDIKMQFGVDKCKIHSNNSGRPLNNSFPLRTGETIEPLNSNIGYKYLGFHQSNQIHHKEAKSNLTQIFKYRLTKILKTELNSRNIIKAINTFAIPVLTYSFGIIKWSQSDLLKLQRLINTNLTKYRKHHPKSCTQRLTLSRAEGGRGLIDLTNLHNKQINTLRNFFHSKADNSQLHKHVAEADNKLTPLNLQDKNTQRNERIISSKEKLEAWKSKILHGRHFADLNEPHVDIKESNAWLRYGQLFPETEAFMLAIQDQVINTANYRKHITKEISQQSDSCRQCKSAPETIQHITGACKMLVQTDYKHRHDQVASIIHQHLAHHCKFINKKEPYYKYKPQTVLENNSFKLYWDRTILTDRTVHCNRPDITLHDKLNNLVYLIDIAVPNTNNLQRTISEKMSKYRDLAMEIRKQWKVQNVFTLPIVLSTTGVIPTTLLTNLKTLNINSHISQTLQKASILNTCRIVRKFLNIPY

SEQ ID NO: 2917 - protein, 1348 aa, Ernsta colotes
MQHINNKHKYNLRSLSQVHSSTWSMQTHRGEATVTDHQRGSSSRTPSPESLFGSIASSPRSYEEPSSPHSRSTTLSPRSTDVVQEADATNPVPTAGIVINKRRKWTDDMNKFIWRTYLIATELGKKPQGYLDYLHQEFTQKYPEMNASRQRLGDQCRAITRNKLLHESVLNDIKEKISSNHPQFYSNNLTLNSPQCIEQKSLTQLPGMKRMRWSNEINESILRFYFESSNLERDLTAYREKMHKKFINQYPHLTFITEQRLADQRRVIMVNKMINNDRIQEIRREVELEINNLEIVNAAQCLVSGLSLNENVDERNDINTLNETHESSHEEENNPMSSITQTYCKDSEDIKYVERQFEIALDQYKNSIPTSRPHIPKQKTSRNLAKIIHHINKHVLPKYLQQDIDFNSLHTLIYVSAFTTAICNGTKLDQCKIHRGRKKPLWQKRLEAKINTLRSHIARLLQYMKGNRSHKVVAAMETIRKEFKTHAQYENKNSEPQHFLDTLKQKLSTTANRLQRYLNCTKRKIQNTQFSSNERNFYRKLTSNQEQDTVAAHTPSPEVLRQYWANIWENPTTHNRDASWLKDIESSSVCEMQFEKITESTLLHIINRTHNWKAPGTDQIHNYWYKKLTCTHSHILRHINQFIQSPTTLPAFITQGKTYMLPKDSDTTDPAKYRPITCLQTIYKIITACISESIYSHLNKYNILAEQQKGCRKYSQGCKEQLTIDSIVMTQAFRRKKNINCMYIDYKKAFDSVPHSWLLQILHSYKIHPQLIQFLETSMKNWQTELNYTDKNITLTTEPINIKRGIFQGDALSPLWFCLALNPLSELLNKSNLGYKLTHNRSNYTLSHLMYMDDIKLYASNKNELFKLADLTEIFSRDIQMQFGIDKCKIYSNNRGRSLNTSFPLQTGETIETLNSDIGYKYLGFYQSNQIHHKVAKSNITKKFKHRLNKILKTELNSRNIIKAINTFAIPVLTYSFGIIKWSQSDLSKLQRLINTNLTKHRKHHPKSCTQRLTLSRREGGRGIIDLTNLHNMQINTLRKYFHSKSDTSQLHKQVSVVDSKYTPLNLQDRSIQRSERIVSAKEKLEAWKNKALHGRHFTDLNQPHVDKDESNAWLKSGHLFPETEAFMLAIQDQVINTANYRKHITKEISQQSDSCRQCKSAPETIQHITGACKMLVQTDYKHRHDQVASIIHQHLAHNCKFITTKEPYYKYKPQTVLENNSYKLYWDRTILTDRTVHCNRPDITLHDKLNNIAYLIDIAVPNTNNLQRTISEKMSKYRDLAMEVRKQWKVQNVHTLPIVLSTTGIIPTTLINNLKTLNIHSHISRTLQKASILNTCRIVRKFLNIPY

SEQ ID NO: 2918 - protein, 1162 aa, Ectomis asine
MSLHQSQNSFGISRMKWSDEINECVMRFYFEVTYLEKDMTAYRKKLHDKFMEQFPDLHHISEQRLADQKRVIVHNKLLSTEKIQEIKREVEMILQATHNLNRNNTQQHVAESARYNNNNSQVHQHNTSTNHTQIHTSILHEEQNEHQMTKSLGRHSEHEFSLCQYIEQEFVEGLKRFENTIPTTRPFIPKQKTSRRLALIVDCINRHILPKYLRYDIPYDSLQTLIYVGAYSAAICNGTKIEKNRNEHSIRKPSWQIRLETKIDRLRSEIGKLTQFIKGNRSKKVIRAVEIIKDKYKTHAKFEDLNVEPNHFLDTLKQKLNAASSRLHRYLNCTLRKSQNSQFSKNESKFYRNLVLVHDKEQTDVAANVPSPNTLKNYWTNIWENPVEHNKEARWLHKLTNTSEIHDMHFEQITENTLTQVIKRTHNWKSPGTDHIQNYWYKKFTCTHSLIHKYINQFIQSPDTMPTYITHGKTYMLHKNAETDNPANYRPITCLQTIYKIITACLSESINAHIEKYNILAEQQKGCRKFSHGCKEQLTIDAVVMKQAFLKKRNIYSMYIDYRKAFDSVPHSWLLHTLSYHKINPLIISFLETSMSNWQTILSLSNNGNNITTGPIRIKRGIFQGDALSPLWFCLAFNSLSELLNKSGAGFKLTYNNSHHTLSHLMYIDDIKLYASNKSSLYKLADITQEFSRDIHMEFGIDKCKIHSVNKGCIQNTNYTLDTGLQIESMNEKSTYKYLGFHQSKHIHHNKAKTDLINKFKFRLNRLLTTQLNSRNLIKAINTFAIPVLTYSFGVIAWTQSDLKKLQRIINTSLTRHRKHHPKSCTQRLTLPRREGGRGLIDIVNLHNNQIHTLRQFFHTKASASDLHKYTVNIDSKFTPLNLHDTTAQPNEKLISAQEKTDEWARKALHGRHLADLSQIYVDKSESNAWLKYGELFPETEAFMLAIQDQVINTANYKKHILKEVAQTDLCRHCKGAPETIQRITGACKALVQTDYKHRHDQIASIIHQHLAHACKFIQKKQPYYKYKPQVVFENAKHILYWDRTILTDKTIHYNRPDITLHDKLNSTAYIIDIAVPNTHNVQSTISEKISKYRDLAIELKTQWKVHNVHIVPIVISSTGVIPKHLSKSLKSLNIHLYVSRTLQKAAILNTCRIVRKFLNIY

SEQ ID NO: 2919 - protein, 1205 aa, Heliopetes ericetorum
MNASRQRLGDQCRAIVRNKLLHQTILDNIKNQVSLEYSFSNPHDPTINTPQQTQQNTLNKSGMRMKWSDEINETIIRLYFEATYLEHDLTAYRKKMHEKFIFLYPHLSFITEQRLADQRRAIVCNKMLKIERIEEIRKEVNLHLIQKQLLINTQNEENTKQIEQIDNEDRERTECLEFINDTFENNNDEKQNEERLMTKYNNNLNRKYIEDQFRTAFEWFKNTDPTKRPYIPKQKSSKKLARIVQTINQNILPKYLHSDLNFDSFHTLIYVSAYTGAKCNDTKFDYSNVGSKQRPKSKPAWQERLERSINELRSNIARLLQYMKGNRSYKILAAVDIIRKKYKIHAQHESENREPNLYLDTLKQKLNATANRLRRYLSCTKRKTQNAKFQNNEKNFYRKLGSDKQDTNPKVRIPSPDTLRQYWANIWENPVIHNSSAAWLDQLKDPSITDMKFEEITVSTLARVINRTHNWKSPGTDQIHNYWYKKLTSVHAYIHKFINKLIHAPLTMPAFITQGRTFMLPKDNDTENPAKYRPITCLQTIYKILTACISECLYLHFQKFNILAEEQKGCRKHSQGCKEQLTIDAIVMNQAFKRKKNIHSMYIDYKKAFDSVPHSWLLEVLHYYKIHPQLIKFLEISMKNWQTILNINLQNMSLVTAPICIRRGIFQGDALSPLLFCAALNPLSELLKRSGVGYKVTYGDSHYTLSHLMYMDDIKIYASSKDGLFELADLTETFSNDIQMQFGIDKCKVHSVVRGRTHNSSYTLQSGETIDSICKQLGYKYLGFQQSNQIHHKHTKSSLIKQFKHRLNQILKTELNSRNITKAINTFAIPVLTYSFGVIKWSKSDLLRLQRVINTSLTKFRKHHPKSCIQRLTLPRREGGRGLVDLTNLHNKQIITLRKYFHIRSNTSKLHRYVSENDNKLTPLNLLDKTTQNNEHITTSTDKLGIWASKALHGRHYADLHQSHVDKNESNAWLRSGYLFPETEAFMLAIQDQVINTANYQKYITNTIQHNDLCRQCRSSSETIQHITGACKMLVQTDYKHRHDQIAAIIHQHLAHTCKFIPCKKPYYKYKPQVVFENSTYKLYWDRTILTDRTIHFNRPDITLHDKKNDTAYLIDIAVPNTHNLQSTFSEKMSKYKDLAVELRKQWRVQNVLIVPIVISTTGVIPKTLGNSLKTLNIQSYISHILQKAAILNTCRIVRKFLNIS

SEQ ID NO: 2920 - protein, 1346 aa, Pholisora mejicanus
MQNKNKKHKYNLRSHSRVHEASRNMQTYLYEATEADNETGSFTRTPSPESLFGSLASSPRSYEEPSITHSRSTVLSPRSLDVVQEASATYPVPTTGNVKNKRQKWTSDMNKFIWRTYLIATKLEKQTRGYLDYLHQEFTKIYPEINASRQRLGDQCRAIVRNKLLNQSILNDIREQVSLEYSSFDTNNITHNTTQLHTQQPYQSKTTGTTRMKWSDEINESIIRIYLETTNLEQDLTAYRKKMHTQFINQYPHLNFITEQRLADQRRVIVGNNMVSIEKIQQIRNEVEFKMKNLEASNIVHNLSISQQIDEVVDLETDEIGVLNTCEYDIEQNEQTPIKNNSCKENKDIKYIEKQFEMTLDRFKNSQPTLRPYVPKQKTSRKLAKIVHNINQHILPKYLKPEIDFISLHTLIYVSAFTAAICNGTKFNRSQTNRYKRKPLWQTRLEDRIKTLRSHIARLTQYIQGNRSHKVVTAVDTIRKEFRTHAQYEDKNTKPQHFLDTLKQKLNTTSNRLRRYLNCTKRKIQNSQFNNNEKFFYRNLTSNEEHHNYMANTPPPEILREYWANIWENPVTHNRDASWLNDLNNTVLPDMQFEQITESTLLQIINRTHNWKAPGTDQIHNYWYKKLTCTHPYILKHINQFIQVPDSLPTFITQGKTHMLPKDDGTLDPSKYRPITCLQTIYKIITACISESIYSHLNQNNVLAEQQKGCRKYSQGCKEQLTIDAITMTQAFRRKKNIHSMYVDYKKAFDSVPHSWLLDILHHYKIHPQIIKFLESSMKNWQTKLNYTHKDITLTTESISIKRGIFQGDALSPLWFCLALNPLSELLNKSNLGYKVSHDRSYCTLSHLMYMDDIKLYSSNKDDLFRLADLTEIFSRDIRMEFGINKCKIQSIDRGRIHKTTFTLQTGETIEALNSEVGYKYLGFHQSNQIHHKIAKSDLTKQFKYRLNRILKTELNSRNLIKAINTYAVPVLTYSFGIIKWSQSDLTKLQRLINTNLTKYRKHHPKSCIQRLTIPRREGGRGIADLTNLHNTQINTLRKYFHSKAGSSQLHKQISEVDSKFTPLNLQDKTTQRNEHIISPKEKEDRWRSKALHGRHLEDLNQPHVDKSESNAWLRSGQLFPETEAFMLAIQDQVINTANYRKYITKENSQLSDLCRQCKSSPETIQHITGACKMLVQTDYKHRHDQIASIIHQHLAHQCKFISRKEPYYKYKPQSVLENNAYKLYWDRTILTDRTVYYNRPDITLHDKHTDIAYLIDIAAPNTNNLQRTVSEKMSKYRDLAVEIRKQWKVQNVHILPIVLSSTGVIPKSLISNLKILNINPYTSQTLQKASILNTCRIVRKFLNLP

SEQ ID NO: 2921 - protein, 884 aa, Hesperopsis alpheus
MKGNRSHKILAAVDTIRKEYKTHAQYEDRNTKPQHFLDTLKQKLNTASNRLRRYLNCTKRKTQNAQFNNNEKNFYRKLIPNRENNNSAANAPPPEILREYWANIWENPVTHNRDASWLKDINESSLSDMQFQEITESTLIQIIKRTHSWKSPGTDQIHNYWYKKLTCTHPYILRHINQFIQVPDTLPTFITQGKTYMLPKNSDTLDPSKYRPITCLQTIYKIITACISESIYNHLNTYSILAEEQKGCRKYSQGCKEQLTIDAIAMTQAFRRKKNIHSIYVEYKKAFDSVPDSWLLDILHFYKIHPQLIQFLEATMKNWQTKLNYTHESTTLTTETIYIKRGIFQGDALSPLWFCMALNPLSKLLNTSNLGYKVSHNRSKYTLSHLMYMDDIKLYGSSKDELFRLADITETFSRDIQMQFGIEKCKIHSVNRGQILNTSYKLQTGETIEPLNSEIGYKYLGLHQSNQIHHKTIKSNLTKQFKYRLNQILKTELNSRNLIKAINTFAIPVLTYSFGIIKWSKSDLLKLQRLINTHLTKYRKHHPKSCLQRLTLPRREGGRGLVDLTNLHNTQINALRKYFHSKANSSLIHKHISECDLKFTPLNLQDKTTQHNERITSQKEKIDKWKSKALHGRHLTDLNQSYVDKDESNAWLRSGQLFPETEAFMLAIQDQVINTANYRKHITKEMSQQSDLCRQCKSSPETIQHITSACKMLVQTDYKHRHDQIASIIHQHLAHHCKFISRKEPYYKYTPQSVLENNAYKLYWDRTILTDRTVHYNRPDITLHDKYNDIAYLIDIAVPNTNNVQRTISEKMTKYRDLAVEVRKQWKVQNVHILPIVLSSTGVIPKSLIGNLKILNMNTYKSQILQKAAILNTCRIVRKFLNIQ

SEQ ID NO: 2922 - protein, 1331 aa, Achlyodes mithridates
MNNTPHKNFRYNLRSLSRVSQSMRTLNGPHNSVSVTADHRTGSSLSSSSSESLFESPISSLYEEPLSSHSRCTTLSPRSIDVVQEASATYPAPTIGTLKTKRRKWTEEMNKFIWRTYLIATDLEKNTKGYLDYLHTEFTKIYPEMEASRQRLGDQCRAIIRNKLLNQSELNDIKRQVALEQPVSTSHNLTLKPGPHTHNLTLKPGPHTTRMRWSNEVNEVILRLYYEASNLEQDLTAYRTKMYRKFINTYPHLSFITEQRLADQRRVIVNNKMVTTERIEEIKEEVELQIRIGNVNIDTLNTTHDTQNYTTEIGGETTIDAIDKSFHFITHVNCDIQKENVNSRHIEEQFKAILGQFQNSNPTSRPYIPKQRTSRKLAVIVNNINNLILPKYLSSDIDFMSLHTLIYVAAYTAATCNNSRFPSIQNTNFNRKPFWQIRLENKVKELRSHIARLIQYIKGNRNRKILQSIDIIRKKYTVHPQLFLDTLKQMLSTTASRLRRYLNCTKRKAQNAQFHNNEKSFYRKLTTDSQKSADMVLVPTQEELRDYWANIWENPVTHNKEANWLKNANNSSISEMQFEEITQNIVKQVINRTHNWKAPGSDHIHNYWYKKLTCTHPYIHKFINKVIKTPNTMPTFVTEGKTYMLPKDTDTKNPAKYRPITCLQTIYKIITGCVSESIYFHLNKYNILTEQQKGCRKQSQGCKEQLTIDAIVMTQAHKLKRNIHTMYIDYKKAFDSVPHSWLLETLIYYKIHPLIITFLETTMNNWQTVLNLNCKDTLITTEPIHIKRGIFQGDTLSPLWFCLALNPLSALLNQSEIGYRLTYNGSHCKVSHLMYMDDIKLYGSNKDELFKLADLTEMFSNDVQMQFGIDKCKIHSVHRGRTLNSNYTLQTGDIIESINQQIGYKYLGFHQSKQIHHKHTKAILTKHFKCRLNQLLKSELNSRNITKAINTFAIPVLTYSFGIINWSQSDLTRLQRIINISLTKHRKHHPKSCIQRLTLPRREGGRGLVDLTNLHNTQIRTLRTYFHFKSDSSELHKYVSNADIKFTPLNLHDQATQHNERIISSKEKLDKWAGKALHGRHYSDLNEQYVDKTASNAWLKNGELFPETEAFMLAIQDQVISTANYRKYITKEISHKSDLCRRCKSSPETIQHITGACKALVQTDYKHRHDQVASIIHQHLAHTCNFIPNKKPYYKYKPQVVLENKTHKLYWDRTLLTDKTVHFNRPDITVHDKKHHTAYLIDIAIPNTHNLQSTISEKISKYRDLAIEIRKQWKIKTVHVVPIVISSTGIIPKTLTDSLKILNIHPLISNTLQKASILNTCRIVRKFLNLQ

SEQ ID NO: 2923 - protein, 1125 aa, Udranomia orcinus
MRIYYESTDLEQDITAYRKKMHIKFIAQYPHLSFITEQRLADQRRVIVNNRMISVERIQEIRKEVELQLKHTETMHTTQNTHPIQENEESLTEVVNEPNQLNETNDSRNLENQDESVVNNRFVNDKNVNLNYVENMFNRFLDQFKDSNPVSRPHIPKQKVSRKLVNLIYTVNRHILPKYLISEIDFNTLHTLIYVAAYTIASCNNTISEGLQVRRHKTKPAWQMRLENRVSELRSHIARLLQYIKGNRSPKITRAVDLIREKFKLHAQFECENNQPNLYLDTLKQKLNTTANRLRRYLNCTKRKAQNAQFNNNEKYFYRKLTDLEQMEPMRLPAQDTLREYWANLWENPVTHNSNACWLKNLNDTHITEMTFEQITEIELVQIINRTHNWKAPGTDKIHNYWYKKLTCTHPYIHTHINQFIQAPETMPSFITHGKTYMLPKDMDTENPAKYRPITCLQTIYKIITACISESIYSHLNKYNILAEQQKGCRKYSQGCKEQLTIDAIVMTQAHKKKKNIHSMYIDYRKAFDSVPHSWLLETLYHYKIHPLIINFLESAMQNWQTILNLNFKNTSLTTEPIRIRRGIFQGDALSPLWFCMALNPLSELLNESEIGYSLTFNGSYCKLSHLMYMDDIKLYGSSKEELFTLANLAETFSGDIKMQFGIDKCKIHSINRGRTCDTNYTLQTGETIEAINKQVGYKYLGFHQSNQIHHKETKVNLIKHFKRRLNQILKTELNSRNTVKAINTFAIPVLTYSFGVIKWSKSELIKLQRIINTSLTKHRKHHPKSCIQRLTLPRREGGRGLIDLTNLHNTQIHTLRRYFHSKSDTSKLHKYVTEADTKFSPLNLHDRTTQHNENIVNSKEKLAAWANKALHGRHFADLNQPHVDRMESNSWLRYGQLFPETEAFMMAIQDQVISTANYRKHITKETLHQSDLCRHCKSASETIQHITGACKTLVQTDYKHRHDQIASIIHQHLAHYYKFIHTKEPYYKYKPQVVLENKVQKLYWDRTILTDRTVYYNRPDITVHNKQNDTVYLIDIAVPNTHNIQSTVSEKLSKYRDLAIEIKKQWKVKTVHIVPIVISSTGVIPKTLIGSLKTLNIHPRILHTLQKASILNTCRIVRKFLNMD

SEQ ID NO: 2924 - protein, 1324 aa, Nerula fibrena
MESTEAHIIPSQVITSSYLQTSNPTRTSTPDSLFDSLASSPRSYEEPSSSRSSTVSPRSVDVVQEAAAIHPVSTTGINKRRKWTFDMNKFIWRTYLIATELEKCTRGYLDYLHQEFSQMYPEMDASRQRLGDQCRAIVRNKLLNQTILDQIRHQVSIDYPTFSCHSHTPNLNQHTIQRDEVPNTLGMMRIRWSNNVNEAIMRIYFETSNLENDLTAYRKKMHDKFKEQYPHLSFITEQRLADQRRAIVHNKMITTTRIEEIRKEVELSMRRLQTTTIPENILHVSIQNENRELENLSIHDNVRETCYEENQNIGVSDKTVYNDKVNHIYIEKEFEVIFERFKNSDPTSRPHIIKQKCSRKLTSIVQIINRHILPKYLTPDIDFSKLHTLIYVAAFTATACNDVKFGHNRSRSYKRKPMWQIRLESKISELRSHIARLTQYIRGNRSPKILMAVDTVKRIYKIHSQYEHENNKPQHFLDTLKQKLNITANRLRRYNNCTKRKTQNSQFHNNEKSFYRKLMTDQGQKEHTMMRTPTSDALRQYWANIWENPVTHNENASLVNDRDDSIPEMEYEQLSESILVQVINRTHNWKAPGTDQIHNYWYKKLTCTHPHIYKHINQFIQTPTTMPSFITHGKTHMLPKDTDTENPAKYRPITCLQTIYKIITACVSESIYSHLNKNNILAEQQKGCRKYSQGCKEQLTIDAIVMTQAYKRKRNIHTMFIDYRKAFDSVPHSWLIEILHHYKIHPQIIKFLETSMNNWQTILNVYYKNTSLTTEPIHIKRGIFQGDALSPLWFCLALNPLSELLNRSKIGYKLTYNRSHCTLSHLMYMDDIKLYGSSKEELFRLADLTESFSNDIKMQFGIDKCKINSVYRGRALNTTYILQTGETIESINQEIGYKYLGFHQSNQIHHKLTKNSVTNQFKCRLNQILKTELNSRNIIKAINTFAIPLLTYSFGVIKWSQSDLLKLQRIINTNLTKNRKHHPKSCLQRLTLPRREGGRGLIDLTNLHNTQVNTLRKYFHFQAGKSKLHKYVTDADINYTPLNLHDRNTQRSERITTSKEKLHAWASKTLHGRHFADLNQAHVDKTESNAWIRYGQLFPETEAFMLAIQDQVVNTANYRKYISKEISQQSDSCRQCKSSPETIQHITGACKMLVQTDYRHRHDQIASIIHQHLAHSCKFITCKEPYYKYKPQIVLESKTHKLYWDRTILTDRTIHHNRPDITLHDKRSNTAYLIDIAVPNTHNLQSTVSEKMSKYKDLSIEIKKQWQLQNVYIVPIVLSTTGVIPKILINSLKTLNIQSHITHTLQKASILNTCRIVRKFLNIS

SEQ ID NO: 2925 - protein, 1344 aa, Gindanes brontinus
MITTPKNIKYNLRSLSRAPGARNLQTHVASDQTNTVAGSQTSRSVSSSPECIFESISSSSRSFEESTSTHSRSTNLSPRSVDVAQKAIATYSAPTIGTTKHKRRKWTEEMNKFIWRTYLIATNLEKNITGYLNYLHPEFNKKFPEMDASRQRLGDQCRAIIRNKLLDQNILNDIRTQVSAESSMSSGRTQEYFSRTIQHNTTGISQKTTPGSVGLARMKWTDDINETIIRLYFESSNLEQDLTGYRRKMHDKFIIHYPHLSFISEQRIADQRRAIVHNKMLSEEKIEKIREEVQLLIQKTRHTSRNTLHNLEENEGGVIERTGEHIILAGSANVTTTRNKYNFDSKYIEKEFIKYLEQFKNSNPTARPYIPKQNTSRKFSDIVQYINKHILPKYLIPDIDFNALHTLIYVSAFTAAACNGTKFCDTRHQTKQLKRKPGWQQRLEDKIKDLRSNIARLTQYIRGNRSHQIVETVNRVRVQFKNHAQHEDQNKEPNHFLDTLKQKLHVTANRLRRYVNCTKRKTQNAQFQNNEKNFYRKLTTTQGYNGPTKDTPTPHDLRTYWASIWEQPVEHNKNASWLTNYNENLVSDMPFQEITESVLVQIVNRTHNWKAPGTDQIHNYWYKKLTSTHPYIHKHINQFIQTPNIMPSFITHGKTYMLPKDAESKNPANYRPITCLQTIYKIITACISHLIYSYLNQYNVLAEQQKGCKRQSQGCKEQLTIDSIVMAQAFKQKRNIHSMYIDYQKAFDSVPHSWLLKTLHIYKIHPQLILFLETSMQNWQTVLNLNNENNLLTTEPINIKRGIFQGDALSPLWFCLALNPLSELLNKSKAGYKLTYNRSHCTLSHLMYMDDIKLYGSSKKELFKLAEITEQFSNDIQMKFGIDKCKIHSVQRGKTLNTPYTLKNGDFIECMNSQMAYKYLGFNQSKTIHHKQAKFNLTEQFKNRLNQILKTQLNSRNTIKAINTYAIPVLSYSFGIIKWSQSDLMKLQRIINTNLTKHRKHHPKSCVQRLTLPRKEGGRGLVDIRNLHSRQVQTLRRYFHSKSDSSELHKYTSNSDHKFTPLNLHDRLTQRNEHVVNSEKKLDTWAVKSLHGRHYADLNQPHVDKDESNAWLRSGQLFPETEAFMMAIQDQVINTANYRKHITKETANGSDLCRHCKSSSETIQHITGACKMLVQTDYKHRHDQVASIIHQHIAHSYNFIHRKQPYYKYNPQTVLENKTHKLYWDRTILTDRTIHYNRPDITIHNKQNDTVYLIDIAVPNTHNLQSTTTEKMSKYRDLAVEIKKQWQVHTVHIVPIVISTTGVVPKSLKHNLNTLQIHPHITHILQKASILNTCRIVRKFLNIE

SEQ ID NO: 2926 - protein, 1035 aa, Ectomis pervivax
MSHTQTPHTHTSFLHEEENEHEIRSNSARHLEHEISICQYLEEQFKEGLKQFKNTNPTTRPFIPKQKTSRRFALIVDCINRHILPKYLASDTPFDSLQILIYVGAFTAAICNGTKLGKNTNQHLIHKPTWQIRLETKIERLRSEIGKLTQFIRGNRSKKVIHAIEIIKDKYKTHAKFEDLNVEPNHFLDTLKQKLNAVSSRLRRYLNCTLRKSQNSQFSNNESKFYRNLVHDKERTDVVANIPSPNALKDYWTNIWENPVEHNKEASWFYNLTKTSEILDMPFEQITENTLTKVIKRTQNWKSPGTDHIHNYWYKKFTCIHSLIHKYINQFIQLPDTMPKYITHGKTYMLHKDAEIDNPANYRPITCLQTIYKIITACLSETIYAHLEKYNILAEQQKGCRKYSHGCKEQLTIDAVVMKQAFQKKRNIHSMYIDYRKAFDSVPHSWLIHILTYYKINPLIISFLETSMSNWQTVLNLSNNGNNVTTEPIRIQRGIFQGDALSPLWFCLAFNPLSELLNKSGAGFKLTYNNSYHILSHLMYMDDIKLYASSKTGLYKLADITQEFSRDIHMKFGIDKCKIHSVNKGRIQNTNYSLYTGQQIEAMNEKSTYKYLGFHQSKYIHHNKAKDDLINKFKFRLNRVLNTQLNSRNLIKAINTFAIPVLTYSFGVIAWTQSDLKKVQRIINTSLTKHRKHHPKSCTQRLTLPRREGGRGLIDIVNLHNSQIHNLRQFFHTKASVSDLHRYTANVDSKLTPLNLHDTTTQPNEKLINAQEKTDEWARKALHGRHLADLCQTHVDKNESNAWLKCGELFPETEAFMLAIQDQVINTANYKKHILKEVVQTDLCRHCKGAPETIQHITGACKALVQTDYKHRHDQIASIVHQHLAHACKFIQKKQPYYKYKPQVVFENTKHKLYWDRTILTDKTIHYNRPDITLHDKLNSSAYIIDIAVPNTHNIQSTISEKISKYRDLAIELKTQWKVHNVHIVPIVISSTGVIPKHLNKSLKLLNIHLYVSRTLQKAAILNTCRIVRKFLNIV

SEQ ID NO: 2927 - protein, 1362 aa, Telemiades fides
MKNSRKPQTHFYNLRSSSARTQTTNMLSYTGEKSSRQAFTEQNSVSTTESQTGTSRRSTSSESLFPSFASSPRSYEDPNQCRSRSTTLSPMSVDVVQEANAIHSVPTADNFKRKRRRWTEDMNKFIWRTYLTVTELEKHTRGYLDYLHPQFMQKYPEMDTSRQRLGDQCRAIVRNKLLSQAVLNDIKNQVSIQLQSTSPQTPTQYSQIVHQAQNSSSLRRMKWTDDINECIMRFYFEVTDIERDLTIYRKKLHEKFKERFPHLHHISEQRVADQRRAIVYNKLLPDVKIQEIKREVEVQLQNSRTLNINNNNNTQQDTEELTYSTNDVSNEQQNITITHHTQPYTWATHEEQNEQEVRMSVARYMEHESSMCQSLEKEFIERLQQFENTNPTTRPFIPKQKTSRRLALAVDCINRHIFPKYLTSDIPFEYLQTLIYVAAFTAAICNGTKFENNTTRISMRKPTWQLRLENKIERLRAEIGKVTQFTKGNRSKKVINAYEIIKEKYKTHARFEDLNFEPYHFLDTLKQKLNAASSRLRRYLKCTKRKIQNSQFSNNESKFYRNLVKDNQQTNSNINTPSSNTLKHYWANIWENPVEHNKEATWLQRLTLASEIPNMVFEQVTAPTFTEVIKSTQNWKSPGTDHIHNYWYKKFTCTHSLILKYINQFIQSPNTMPTYITHGKTYMLHKGADTINPANYRPITCLQTIYKIITACVSNCISAHLEKYNILAEQQKGCRKYSQGCREQLTIDAVLMKQAMRKKRNIHSMYIDYKKAFDSVPHSWLLHVLIHYKIHPRIITFLEASMSNWQTVLNLSYNAENITTEPIRIQRGIFQGDALSPLWFCLAFNPLSELLNKSQAGFKLTSDNSYHILSHLMYMDDIKLYASSKKGLYKLADVTQTFSNDIHMEFGIDKCKIHSVNKGCIQNIDYYLETGQQIEAMDENSTYKYLGFRQSNQIHHKSAKDNLTTKFKFRLNRILNTQLNSRNIIKAINTYAIPILTYSFGIISWTQTDLKKLQRVINTSLTKYRKHHPKSCTQRLTLPRRQGGRGLIDIANLHNRQIHTLRQFFHSKAAKSDLHKHIVDIDSKFTPLNLHDTSTQVNEKLENVQEKIEAWARKSLHGRHYADLSQSHVDKIESNAWLKRGELFPETEAFMLAIQDQVINTANYKKYISKELANKSYLCRQCKAAPETIQHITGACKALVQTDYKHRHDQIASIIHQHLAYTYKFVQKKHPYYKYKAQTVFENTSHKLYWDRTILTDRTIHCNRPDITLHDKLNSIAYIIDIAVPNTHNLQSTISEKMSKYRDLAIELKTQWRVQTVYIVPIVLSCTGVIPNVLCKSLKTLNIHSLVTHLNLPQILKYYGLV

SEQ ID NO: 2928 - protein, 1354 aa, Ectomis asine
MKESRKQQKHYYNLRSISGARKQTIERNLICTAEIHTRTYRRSTSSESLFPSLASSPRSYEDPIPNQSRSTTLSPMSADVVQEANAIHPVPTAATTKRKRRRWTEDMNKFIWRTYLTVTGLETNIRGYLDHLHPQFIQKYPDMDISRQRLGDQCRAIVRNKLLSQVVLDDIKNQVSIQLQSTSYQNSTPLFPILPQLQNSSGSTRMKWTDSMNESIMRFYFEVTDVEKDMTIYRKKLHEKFTEQFPHLHHISEQRLADQRRTIVRNKLLSVVKIQEIKREVEDKLQNARTLSINIQPYTQNTLNYNTNNNLQEHTNQYHTNAYHTQIHSDTAHEEQNEQEVSINVGRNTEHEISMCMYIDEEFKEILKRFENTDPITRPFIPKQKSSRRLALVVDCINRHILPKHLTADVPFDALQTIIYVAAFTAATCNGTNFRKYTNTTPNRKPTWQVRLELKRERLRSEIGKLTQFIKGNRSRKVIHAFDTIKEKYKTHAQFEEFNSEPNHFLDTLKQKLNTVSSRLHRYLNCKKRRSQNSQFLNNESKFYRHLVDNKAQVEVNRNIPPSNTLQRYWANIWENPVVHNKTASWLQNLTMANEVPVMLFEQIELNTLTQVIKRTQNWKSPGTDHIHNYWYKKFTYIHSFIHKYINQFIQCPHTMPAYITYGKTYMMHKNAETENPANYRPITCLQTIYKIITACISESIYAHLDKYNILTEEQKGCRKYSHGCKEQLTIDAVVMKQAFQKKRNIHSMYIDYRKAFDSVPHSWLIHTLKHYKIHPQIINFLEISMSKWQTVLNLSNKIDNITTEPIRIQRGIFQGDALSPLWFCLAFNPLSELLNISRAGFKLTYNNSHHNLSHLMYMDDIKLYASSKKGLYELADITQTFSKDIHMEFGIDKCKIHSVNKGCIQNTNYYLETGQKIESMDANSSYKYLGFHQSKQIHQNTAKANLTKTFKFRLNRILNTQLNSRNLIKAINTFAIPILTYSFGIIAWTQSDLKKLQRIVNTSLTKHRKHHPKSCTQRLTLPRREGGRGLIDIVNLHNTQIHTLRNFFHNKAPVSDLHKYIVSIDTKFTPLNLHDNNIQPNEILVSPHEKIGSWARKSLHGRHYADLSQTHVDKNESNAWLQRGELFPETEAFMLAIQDQVINTANYKKYITKELAHQSDLCRQCKGASETIQHITGACKALVQTDYKHRHDQIASIIHQHIAYTCNFIQRKQPYYKYKPPIVFENTSYKLYWDRTILTDKTIHYNRPDITLHDKLNSVAYIIDIAVPNTHNLQSTISEKMSKYRDLAIELKSQWKVKTVHIVPIVLSSTGVIPKLLYKSLKSLNIHAYISRTLQKAAILNTCRIVRKFLNID

SEQ ID NO: 2929 - protein, 1354 aa, Tagiades litigiosa
MRLRSTCTLPQAGTRNGESRPEATTSGSPTYSGGGTVSLAPCCKNKTTKSRYNLRSQSQKDPIEPNHQTETSSRSTSPESLFPSIASSPRSYEGEIQCLSRATTVSPISVDVAQEANATQPAPTTLNVKLKRRKWTEDMNKFIWRTYLIATNLEKQTRGYLDHLHNEFSKKYPEMDVSRQRLGDQCRAIIRNKLLHHTILEDIKNQVTKENRTLSQNNTLDTQQHTGRMRWTDEMNETIMRFYFESSDLERDLTAYRKKMHDKFKIHYPNLTHITEQRLADQRRVIVNNKMLTVEKIQDIRRQVELAFKHTNTYTTNTTQDNNIHQTLHSEDEETSIGDEAEHLSGEKNSNKTKQNNVKNNINSKNIKLQFSEILSKFKDTDPICRPYIPKQKTSKKLAIIVNIINKQVLPTYLLPDIDFYSLHTLIYVAAYTAAICNNSKMSSGENNQFKKDPAWQRRLKSKIEELRSYIARLTQFINGNRSKKILVAVDIIKRKFKVHAQYEQENSEPALYLDTLKQKLAITANRLRRYVNCTKRKIQNAEFHNNEKSFYRKLTINNKDSGTVAPLPTAEVLQQYWAGIWENPIQHNRRSGWLKDLNDISFPEMEFEDVTENLLTHIINRTHNWKAPGTDHIHNYWYKKLTCTHPYIHKHINKFIHIPNKMPKFITHGKTYMLPKDTDTENPAKYRPITCLQTIYKIITACISESINAHLNKYNILAEQQKGCRKYSQGCKEQLTIDSIVMTQALKRKKNINTMYIDYRKAFDSVPHSWLLKILQHYKIHPQLIKFLKISMQNWQTILNIRNNNTSITTKPIRIKRGIFQGDSLSPLWFCIALNPLSELLNKSQAGYKIMYKGSHHILSHLMYMDDIKLYGGSQDQLFQLVDLTERFSNDIGMQFGIDKCKIHSLSQGHSENTNYILQTGELIESIDTQIGYKYLGFSQSSQIHHKLTKSNLITQFKNRLNQILKTELNSRNIIKAINTFAVPVLTYSFGVIKWSKTDLIKLQRVINTNLTKYRKHHPKSCMQRMTLSRREGGRGLLDLTNLHNKQINTLRKYFHLKADTSQLHTYISDVDINFTPLNLHDRTTQHDRPVIDSQQKFDAWASKALHGRHYSDLNLPYVDKIESNAWLKQGQLFPETEAFMLAIQDQVINTANYQKHITKTKSLESDLCRQCKSASETIQHITGACKTLAQTDYKHRHDQVASIIHQHLAHICKFIRGKVPYYKYTPETVLDNYQYKLYWDRTILTDRTVHYNRPDITLHDKQNNIAYLIDIAVPNTHNLQSTITEKMSKYRDLKIEVEKQWHVHTVHIVPIVISSTGVIPKALFNSLKILNIPSHISHTLQKASILNTCRIV

SEQ ID NO: 2930 - protein, 1337 aa, Orses cynisca
METRRKSKLIGPLPGGDRRGTPGADAGCHSMQTVSGEELNRRAPSGSPEYVTANQTDSNCRTNHKLPARYNLRSRQQTQLNVRPIQTQQQTEVDTRPTSPESLFSSLSSSPCSYAEQLQNRSRSTTSTPMSVDVVQEADAINLAPTTGKIIRTRRRWTEEMNKFIWRTYLIATELEKNPRGYLDYLHPQFTQKYPEMDVSRQRLGDQCRAIVRSKLLHQDVLDTIRLEVSILLQSTGSQTYTHQTQSTNSVGTTRMKWSNDMNEFIIRSYFEVTEAENEITAYRTKLHKKFQEKYPHLEHISEQRVADQRRVIIHNKLLSVDRIKEIKNEVELLIQQTSTQHTTTIHDTIDEYIYTDTYDHQETDTDTNTTNIQHLPQECQENNVTDIEHKNRVHIENLFYTFLERFKNTNPVTRPFIPKQKTSRKLFEGLNYINKHILPKHLEPDIEFDHLQTLIYVTAFTTATYNGTNIDDYAVKGPKSKPAWQKRLERKIEQLRSDIGRLTQFIIGNTSKKVIKAVDRIKEKHKLHAQFEDKNYDLNQFLDTLKQKLNVTASRLRRYLKCTKRKTQNNQFSNNESKFYKNFLNDKDQPAVVTETPTSEELKLFWGNIWANSVEHNKDAHWFTELSDTNHIHEMHFEQINEDTITQVIKRTHNWKSPGTDHIHNFWYKKLTSTHKHIHKHINAFIQSPCTMPKYFTYGKTYMLPKNSDTKNPANYRPITCLQTIYKIITASISESIKIHLSKYNILAEQQKGCRKYSHGCKEQLTIDAVVMKQALHKKRNIYSMYIDYKKAFDSVPHSWLLHILHHYKIHPHLITFLETSMTNWQTVLNVTNSNITTTTEPIRIQRGIFQGDALSPLWFCLAFNPLSEILNKSQAGFKLIHKDSHHVLSHLMYMDDIKLYASNKKELFKLADLTQTFSKDINMQFGIDKCKIHSVNKGRILNTSYQLESGDFIEAMDEHSSYKYLGFHQSRQIHQKTTKANLIKKFRHRLGQILKTQLNSRNTVKAINTFAVPILTYSFGIISWSQTDLRKLQRIINTSLTKHRKHHPKSCIQRLTLPRREGGRGLIDILNLHNNQIHILRKFFHTKSQTSDLHKYTVDIDIKLTPLNLHDRETQRNEQLVGTQEKNATWAQKSLHGRHYADLSQPHVDKNESNAWIRHGELFPETEAFMLAIQDQVICTANYKKHITKELALQSDLCRRCKGASETIQHITGACKSLVQNDYKHRHDQVASIIHQYLAHSYKFIEKKQPYYKYKPQSVLENKTHKLYWDRTILTDKTTHFNRPDMTVHDKQNMTAYIIDIAVPNTHNLQTTISEKLSKYRDLAIELQTQWKVHT

SEQ ID NO: 2931 - protein, 1441 aa, Nymphidium onaeum
METRSKVKRLGPLPEGDRRGTPGAGAGCLSMRTVSDEELSRRALVGSESESTTAESQNHLSSLSCLPYITSQSSPISSTDIHTFPHSNSNYKNKITSCSYNLRSRAHGDNLSKKNRIANDTLNKSSASLSSSPSSLFNSIESPVSSICSWSHLISPPQTPMSENVEQVANAKDPVPINDTNNTRKKWNAEMNEFIWRNYLHLTTLETNTNGYLPLLHQKFIAQYPNMNVTRQRIGDQRRAIVRRKLIPQHTKNSIYEEVQKELQQQNVNPSVDTYANANLKRLKWTNKHNETIMRLYYQITQLETNKSAYRKQLHQSFIQIYPELSHVTEQRIADQRRTIIARKFIPEETLKKLKEDVALELQVTENYVFTNQVETSEGEILANNMSENLLNTNNTLNNPDTESFMLTTSSTETSGERNDQVDQLFTSALSLFLNTDPTSRSFIPRLKPSKSLYNIIEYINQILIPENIDEHTDFLKLHCVLYCAAWTAAKANGAKICDPEIGKEIDVPHKQKPKWQLRLEKKVMNLRKMIGRITAYLKGNHNQKLSKYVQDIAEQYKTHSTYDEPNLLLDQVFDTLKQKLNVASSRLKRYRNCTLRKKQNMKFNINEKSFYRSLKNPKEHMSATNDTPALPTSEELHQFWSNVWQGTDTYNPENQCIIEEDQRYKNLPEMQFNSITNEIFQSVIYKLQNWKAPGTDNIHNFWYKKFTNIHYFLLKHINNFITNPSTIPEFIMTGITFMISKDQNDTSNPAKYRPITCLQSIYKIITSSIAQCISKHIECNNILTEQQKGCKKFSQGCKEQLIIDSTVLGEVQKNNLELYSVYIDYKKAYDSVPHAWLIQILEMYKIHPNLTNFFKNTMDKWSTRLKLVTQQTSTETQAIQIKRGLFQGDTLSPLWFCLALNPLSNHLNSLNNGYYFKVDSGNNNTIINHLLYMDDIKLYTSSESELDDLINKTYSFSQDIGMEFGIEKCKINCIRYGKCHQYSHTIESGEQIAPIDVNNPYKYLGYPQSRNIHHKDIKNNLKQQFQKRLNMILKTQLNSKNITKAINTFAIPVLTYSFGIIKWTRTELIQLQRTIRVTLTKHRKHHPKSCMQRLTLPRSEGGRGVIDITSLHNKQILNLRKYFRTKYHTSALHKAVVNADLHLTPLNLSDPEQQPNEIITTKQNFIEEWAKKSLHGRHRHDLCQANVDKSASNAWLSRGELFPETEGFMVAIQDQVVETRNYQKHILKLNNITSDHCRQCNGPSETIQHITGACSSIVQTDYKHRHDQVANIIHQKLALKYNLLKHTSNTHTTQKESEYVPYYKYIPSAVLENSQYKLYFDRSILTDRTVHHNRPDIVLTEKQHKRTYLIDIAIPNTNNLQKTISEKLRKYIELKEEIKKTWNMNEVVIVPIVISTTGVIPKQLFSSLNTLNLPSFTYLQLQKAAILNTCRIVRKFLTLS

SEQ ID NO: 2932 - protein, 1457 aa, Nymphidium onaeum
METRSKARKRLGPLPGGDRRGTPGAGAGCLSIRTASDEELSRRALVGFKSESTTAETQIHVSSAESSSLTSPLIPSSNPSTTFNPISLSHTLGNKRKNLSQSYNLRSYSQQVQRSKSCETNKLHLEDRENSNSTILNKQHILSSPPSSPFRSFESPPSSNNSWTLNISSSSSSLPEDVVQATIIANAAPTNGIKNTRQKWTFEMNEFILRTYLYITSLETNTQGHLPLLHQKFTERFPNMKASRQRIGDQRRAIMRRKLLPQHTIDDIYREIQIELSQNNTNAIQLSSNITTISNLKRLKWNKIHNETIMKLYFRITQLETNKSAYRKQLHRSFIQIFPELSHISQQRIADQRRVIITKQFISRERLDIIKREIAAEFEMENVNVQTRMETQDTEISLSQLSSHVSSDIRDLQNNTLAEPQLQTTNYQERNEELDQLFNLAFDYYRDIAPISRHFIPKQKPSKYLQTTIEYINNVLIPENVNQNPNFSKLHCILYCAAWTAAKANGAKIFIPPIENEHITTAYKGKPKWQTRLERKILNLRKMIGRLTAYVGGNHNQRLTTYIQSISAQYQIHSSYDQPNSQVEQVLDTLKQKLSVASSRLKRYSNCTLRKKQNAKFHHNEKQFYRSLKHSEIEHTTNSTAIPTKEELYQFWAQIWQTPTRHNTENQFIIEESERVRNLTEMEFECITEDVLCNVIRKLQNWKAPGSDNIHNFWYKKFTNTHFQLLNHVNKFILNPTTVPKFVMTGVTYMISKDQNDSSNPSKYRPITCLQSIYKIITSCITQCIYKHIETHNILTEQQKGCKKFSQGSKEQLIIDSTILGEVQHNNSELYSVYIDYQKAYDSVPHSWLIKSLELYKIHPYIVNFLKNIMDFWTTKLKLQTSYGNIETEPIKIKRGIFQGDTLSPIWFCLALNPLSSHLNSIKIGYQFKSHKDNEPAVVNHLLYMDDIKLYSNTESDLDSLINKTYIFSLDICMDFGIEKCKTNCTKKGRHYQYSYALDSGEFITSLDPNNPYKYLGYQQSQSIHHKDIKKSLKEKFQQRLNKILKTQLNSKNITKAINTFAVPVLTYSFGVIKWSKTELIQLQRTIRVTLTKHRKHHPKSCIQRLVLPREEGGRGLIDIPNLHNKQILNLRTYFKNKCDASFIHRAVVCADSQYTPLNLSIIDHQNNETIVTRQHVIEEWAKKVLHGRHRHDLCQSNVDRSASNTWLKLGKLFPETEGFMVAIQDQVVETKNYQRFIMKLNIASDKCRQCNGPSETIQHITGACSSIAQNDYKHRHDQVANIIHQKLAHKHNLLKQVQRASNQTPNRHENKHLPYYKYVPEAVLENSRHRLYFDRSILTDRTVHHNRPDIVWIDKQNKHTYLIDIAIPNTNNLQKTITEKLRKYIELREEIKKTWNMTGVTIVPIVISTTGVIPKQLFIAISTLGLPTSTYINLQKAVILNTCRIVRKFLQIETNH

SEQ ID NO: 2933 - protein, 1439 aa, Apodemia walkeri
MAATRNRKIPQVGTDAYREGESHPELTNSGSSTYSGGSNVSQPFTCKYNLRSKIARDESTKHTTHQPSPKSPSHKHLKMLEDAAQESSDTNLAPTANKTCNSQEKAHYNERSNSIAEDRITQVELHTFSLSSSFSSFESSVSPTNSSLLQTSLSTSFASDDVVQEAFAEQIAPISDMKKTRKKWTPEMNTFIVRTYLYITSLERNIQGYLPLLHQKFTNQFPNMIVTRQRIGDQRRAIIQKKLLSQDIIDSIYQEVQKELQNNETNIDVPLKTYTDLHKKRIKWNNIHNETIMRLYYQITHLETNKTAYRKQLHQSFIQIFPEMSNLTEQRIADQRRAIIVKKYISADKLNKIRHEVITELARNTHADEVTQESLERITPPEVNIIPQETHQSNELETCQATSIADINCQNRNEKLDELFTLAINYYKNSNPVYRAFIPRQKPSKSFYNIVNYINNILIPENLNENTNFFELHCILYCGAWTAAKANGAKIFIPPTETQYIHTKQHNPKWQTRLEKKILNLRRMIGRITAYIKGNHSQKLTKYVQSISTQHQTHSNYDLPNLQVEQVLDTLKQKLSVASSRLKRYRSCTLRKEQDSKFFQNEKLFYRSLRKPENIETNNPPTPTNKELHQFWAKIWQEPAIHNDENQFIKEENERHRNLKEMEFECVTNDIFSHVIRKLQNWKAPGTDKIHNFWYKKFTNTHYLLLKHINNFIMDPSRIPEFIMTGVTYMISKDPHDTGNPAKYRPITCLQNVYKIITSCITQYIYQHIEQNNILTEQQKGCRKFSQGCKEQLIIDSIILEEVQATKSELYSVYIDYKKAYDSVPHSWLVNSLELYKIHPNIVNFLKNIMCHWTTKLHLYTSNGTLETEPIHIKRGIFQGDTLSPLWFCLALNPLSSHLNSLNTGYHFKTTTNSNFTSINHLLYMDDIKLYADKEINLDCLINKTYQFSQDICMEFGIEKCKINCIKRGKCHQYTYELDSGEKITSINSVNPYKYLGYNQSRNIHHKNIKQNLKEQFQNRVKTILKTQLNSKNITKAINTYAIPILTYSFGVIKWTRTELTQLQRMIRVLLTKHRKHHPKSCIQRLILPRIEGGRGVVDIPNLHNKQILNLKAYFRSKYNLSLIHQAVINVDHKFTPLNLSNAERQVNEMILSNQQLIEEWENKTLHGRHRHDLTQDNVDKNASNAWLKHGHLFPETEGFMIAIQDQVIETKNYQKHIMKLRNAGTDKCRQCNGASETIQHITGACSSLAQNDYKHRHDQVANIIHQKLAIKYTLLNTDPQSSRLPLNMAKNSHVPYYKYVPPAVLENSQYKLYFDRSILTDRTVHHNRPDIVLTDKLNKKTYLIDIAIPNTNNIQKTINEKLRKYVELREEIKKLWDMSEVIIVPIVISATGVIPKQLFNSLNTLGLPKFTYLNMQKAVILNTCRIVRKFLQRGITNQ

SEQ ID NO: 2934 - protein, 1253 aa, Apodemia walkeri
MNTFILRTYLHISSLDTDKQGYLPLLHQKFIEKYPDMNVTRQRIGDQRRAIVQKKLLAQDIIDTIYQEVQKEMQDQNIHAELASEKAANLHSKRTKWKEEHNVTIMRLYYRITQLETNKTAYRKQLHQSFIQIFPEFSHVTEQRIADQRRAIITKEFISTNNLNKIREEISVELAGNTDCTEAETQETESLTHEIGPEDTCNTRDILEFNESETSQAQTINTGCRDRNEKLDQLFSMAINYFKDTDPVSRYFIPKQKPSKLLYNIIDYINSTLLPENLNKNLTFVDLHRILYCAAWTAAKANGAKIFIPPTENTHRFTKKLKPKWQIRLEKKIMNLRKMIGRVTAYTKGNRSQKLTNYFQNISAQYQTHSSYDQTNFQPEQVLDTLKQKLSVASSRLKRYCNCTLRKEQNLKFYQNEKNFYRSLTKTQCDVNSNAPMPTDQEMYQFWGRIWQESVEHNDENEFIKEERKRYSHLKEMDFECISSDVFSNVIRKLHNWKAPGTDYIHNFWYKKFTNIHKLLLSCINNFIMEPLTIPDFIMTGITYMISKDQTDTSNPAKYRPITCLQSIYKIITSCLTQYVYQHTEQNNILTEQQKGCRKFSQGCKEQLIIDSTILGEVKKANSELYSVYIDYKKAYDSVPHSWLIKCLQLYKIHPNIVTFLETIMRHWTTKLYMYTPNSILDTESIQIKRGIFQGDTLSPLWFCLALNPLSSHLNSINIGYHFKSSIASSFTTINHLLYMDDIKLYANSENNLDCLINKTFRFSRDICMDFGIEKCKINITKSGKHHQYSYELESGELIKSLDYDNPYKYLGYSQSRDIHHKDTKQKLKQQFKDRVNTILKTQLNSRNMTKAINTYAIPVLTYSFGIIKWSRTELIQLQRMIRVLMTKHRKHHPKSCIQRLTLPRIEGGRGVIDILNLHNKQILNLRTYFRTKYELSALHRAVIKADYNHTPLNLSNPEKQNNEVIHTNQQFIQIWESKSLHGRHRHDLSQENVDKNASNTWLKQGNLFPETEGFMIAIQDQVMETKNYQKYIMKLSNITTDQCRQCRGPSETIQHITGACSALAQNDYKHRHDQVANIIHQKLSHKYNLLTNKPQSPNTISNQTKNNHLPYYKYIPPAVLENLQHKLYFDRSILTDRTIHHNRPDIVLIDKINKTTYLIDIAIPNTNNLQKTINEKLRKYVELREELKKIWNMAEVIIVPIVLSTTGLIPKQLFHSLNSLGLPKYTYVGLQKAVILNTCRIVRKFFHVGVNH

SEQ ID NO: 2935 - protein, 1432 aa, Emesis diogenia
MAATRNYEVPQVGTNAFREGESRPESRSMYSGGSNVSQPSTPRYNLRSKTLRGKTSDLIKKQSSSKSPTNHFSMLENVSQDSFYTSLGPTTNKTSKTKRYTRSNKDSQCINTESITSVELPTLLSSSQSPFNSFEQSVSSITSNIPYTSHSTSYTSDDVVQEAFAEHIAPISDGKRTRKKWTLEMNIFILRTYLHITAIESNKKGYLTLLHQKFIQQFPNMIVTRQRIGDQRRAIIQKKLLSQDIIDSIYQEVQIELQNENTNDKAISSKSTDFNKKRIKWDNTHNETIMRLYYHITHLETNKTVYRKQLHQSFIQIFPEMSHLKEQRIADQRRAIIVNKYIPADKLNQIKEEIAMELARSAHTREVAEESLVPETAPETYWSYNKISESNELETSQPTNVANTNRRNRNDKLDKLFQQALNYYKNTDPVLRSSIPKQKPSKSFYNIINYINNVIIHENLNESTNFLDLHCILYCAAWAAAKANGAIFFIPPTETQYRYKKQPNSEWQKKMETKILNLRKMIGRVTAYIKGNHNRKLSKYVQSITSRHQIHASYDQPNLHLELVLDTLKQKLSVTSSRFKRYRSCTLRKEQNSKFFQNEKLFYRSLREPEKIELLSAPMPTDKELYQFWSKIWQEPTMHNNHNEFIMEENERYGSIKEMEFESITNDIFDRVIHKLQNWKAPGTDKIHNFWYKKFTNIHFFLLNHINNFIMHPLGIPEFIMKGVTYMIPKDSHDTGNPAKYRPITCLQSIYKIITSCITQYVYQHIEQNNILTEQQKGCKKFSQGCKEQLIIDSIILGEVQATKSELYSAYIDYKKAYDSVSHSWLIHSLEVYKIHPNIINFLKNVMCNWTTKIHIYTPNGTLETEAIHIKRGIFQGDTLSPLWFCLALNPLSSHLNSINLGYHIKSAVNSNPTSINHLLYMDDIKIYADTETDIDCLINKIYQFSQDICMEFGIEKCKINCIKRGKCHQYTYELESGEQITSINSINPYKYLGYNQSRNIHHKDIKQNLKKQFQTRVEIILKTQLIAKNIVKAINSYAIPVLTYSFGIIKWSRTELIQLQRMIRVLLTKYRKHHPKSCIQRLILPRIEGGRGIVDIPNLHNKQILNLRTYFRTKYNLSSIHQAVVNADHKLTPLNLSSIEKQINEITLTNQQLIQKWEQKTLHGRHRYDITQDNIDKNASNAWLIYGDLFPETEGFMIAIQDQVIETKNYQKFIMKLKNAETDKCRRCNGASETIQHITGACSALAQNDYKHRHDQVANIIHQKLSYKYNLPNTVLHSPNLELNVSKNNHVPYYKYIPPAVVENAHYKLYFDRSILTDRTVHHNRPDIVLIDKPNKKTYLIDIAIPNTNNLQKTINEKLRKYIELREEIKKIWNMTEVIIVPIVISATGVIPKQLFYSLNSIALPKLTYLNIQKAVILNTCRIVRKFLQQN

SEQ ID NO: 2936 - protein, 1429 aa, Apodemia duryi
MAATRKRSKGIPQAGTNAYCEGESRPELSSSGNSMYSGGSNVSPPFTSKYNLRSTSTSGRISKFTQQSSVKSSSHRLIPMLEDVVQESSSYTNPVPTTSKTCKRAISITPNELHILSPSSLSPYNSFESPVSSSNSYTLQRSFSTLFTSDDVVQEATAENIAPITDRKAGRKKWTPEMNKFIWRTYLHITSLEKDKRGYLPLLHQKFTEKFPDMKVTRQRIGDQRIAIIQKKLLPQNTIDTIYQVVQKELQNKSIHVEPASEKTVNLHQKRIKWKEEHNITIMRLYYRITQLETNKTAYRKELHQTFIQVFPELSHVTEQRIADQRRAIIVKKYIPLNSLNKIKEEVAMELAGNINTTEVETQETESLYETPSEGRWTTHDIHEYNEPETSQPQAVNIQYRDRNGKLDQFFLMAINYFKDTDPGSRPFIPKQKPSKQFYNIIYYINNILILENLNKNHTFLDLHYIIYCAAWTAAKANGARISIPPTENTYRFTKKLNPKWQIRLEKKILNLRRMIGRVTAFVKGNRNQKITTYVQSISKQYQTHSSYDQPNFQPEQVLDTLKQKLSVASSRLKRYCNCTLRKEQNLKFYQNEKQFYRSLRTSQSNEASQSLTPTDQEMYQFRGSIWQESVIHNDENEFIKEERERYRHLKEMDFAYITSDVFHNVMRKLHNWKAPGTDNIHNFWYKKFTNTHDLLLSHINEFILEPHKIPSFVMRGITYMISKDQTDSGNPAKYRPITCLQSIYKIITSCLTQYVYQHIEQNNILTEQQKGCRKSSRGCKEQLVIDSTILGEVQKSNSKLYSVYIDYKKAYDSVPHSWLIKSLELYKVHPNIVTFLKTIMCHWTTKLYLYTPNTTIETESIQIKRGIFQGDTLSPLWFCLALNPLSSHLNSINEGYLFKSTIHSNLTTINHLLYMDDLKLYANSENDLDCLINKTSHFSQDICMEFGIEKCKINCIKSGKHIQYSYELESGDQITSLNYDNPYKYLGYNQSRNIHHKDIKQKLKQQFKDRVNTILRTQLDSKNMTKAINTYAIPILTYSFGVIKWSRTELIQLQRMIRVLLTKHRKHHPKSCVQRLTLPRIEGGRGVIDILNLHNKQITNLRTYFRTKCNSSVIHRAVINADHHYTPLNLSNPEKQHNENTQSNQQLIQVWESKTLHGRHRHDLSQENVDKNASNTWLKQGYLFPETEGFMIAIQDQVIETKNYQKYIIKLSNIATDQCRQCKGPSETIQHITGACSALAQNDYKHRHDQAGNIIHQKLSHKYNLLTNVLQSSDGIFKLSKSNYVPYYKYSPPAVVENSKYKLYFDRSILTDRTIHHNRPDIVLVDKINKKSYLIDIAIPNTNNLQKTINEKLRKYVELREEIKKIWNMTEVVIVPIVLSTTGVIPKQLFYSLNLLDLPKHTYVNLQKAVILNTCRIVRKFFQAGTSQ

SEQ ID NO: 2937 - protein, 1148 aa, Thisbe lycorias
MTLYYRITQLETNKSAYRKQLHQSFIEIFPQMSFVSEQRIADQRRTIVVKNLLPNDKLESIKEAVAIELQAAENTTHITSIEISEVETHSFNPPEIYPRNSSCNDNYVNNQIESIPVPQPLTTDRNDKLDHLFRTTLDFFKNTDPISRSFIPKQKCSKSLQSIIEYINEILIPEHINENTDFINLHCILYCAAWTAAKANGAKISYQTAKSNFYNKPKARWQVRLEKKILNLRKMIGRVTAYINGNNSQKISNFVQSISAQYQTHSTYDEPNLNVEHVLDTLKQKLNVASSRLKRYLTCTLRKEQNAKFIKNEKIFYRSLRNPATEMRNTTGDTPDLPTKEILHQFWSGIWEVSATHDQDNQYISEEKDRCEDLPEMLFNTITDDIFQKVIKKLQNWKAPGIDNIHNFWLKKFTNSHYYLLSHINNFIANPSSVPEFITTGITYMIPKDHNNTRDPAKYRPITCLQSIYKIITSCISHYIYKHIENNNIITEQQKGCRKFSQGCKEQLIIDSVILEEVKCNNYDLCSVYIDYKKAYDSVPHSWLVKVLELYKIHPNIIIFLKNIMEKWSTSLKLLTHNKIVETDKISIKRGIFQGDTLSPIWFCLALNPLSSHLNSIDAGYRFKLNSESEVTIINHLLYMDDIKLYANNESELDSLIGKTHTFSQDICMEFGIEKCKINCVRKGKCHQYTYDLESGEQITPIDSNNPYKYLGYQQSQNIHHKDIKNNLKLQFQNRLNMILKTQLNSKNLTKAINTYAIPVLTYSFGIIKWTRIELNQLQRTIQVTLTRHRKHHPKSCMQRLTLPRIEGGRGVIDIPNLHNKQILNLRTYFKTKYDVSLLHKAVVDADLHFTPLNLAKLEQHDNQTICIRYHLIEEWAKKSLHGRHRQDLCQAVVDKCASNAWLRCGELFPETEGFMMAIQDQVIETKNYQKYIMKLNSVTTDKCRQCNGPSETIQHITGACSSIAQTDYKHRHDQVACIIHQKLALKHNLISKEPQSPSQIKTKHIPYYKYTPSTVLENTQYKLYFDRSILTDRTVHHNRPDIVLIDKHHKQTFLIDIAIPNTNNLQKTIAEKLRKYIELREEIKKTWNMNEVTIIPIVLSTTGVIPKQLFHSLHLLKLPAFIYLNLQKAVILNTCRIVRKFLQQKLD

SEQ ID NO: 2938 - protein, 1474 aa, Melanis pixe
MRLRSRIVPQAGTNGESRPEFPGSGSPSYSGEGNVTHRSNNRTLGAGAGCISMRAVSDEALSRRALVGSTTETTTAESQAHISSTSSTRSPHQNSETNLFLSREEYINSEDTFSITSNTYKGNCDNTYNLRSRSRIGNNQLREYREHKILDGDTSDLSPLSSPFRSFESPSSSTKTFTQFTSPSISSISDDVVQEARAEIIAPITDTNKKARKKWSFEMNEFILRTYLHITSLETNTHGHLPILHQKFIERYPQMNITRQRIGDQRRTIVRNKLLPQHIIDKIYRDVQTELQHTHSILLDTNTTVNTKRLRWTNEHNETIMKLYYQITNLEKNKSAYRKQLHQSFTQIFPELAHVTEQRIADQRRTIVTKKLITNERLDIIKNEVEQQFCETEHILNTNQIEFQSQDSETHVLTNISEIPPNTCNNLNLINESPSLTQTNSIITNSIKRNEKLDQLFTLALNYFKDTNPIARNYIPKQKPSKSLHITIQYINNILIPENVDNNTSFLNLHCILYCAAWTAAKANGAKIFIPSGIEKELGRITKAKPKWQIRLETKILNLRKMIGRVTAYIQGNNSRRLHKNVLNIFSQHQTHSTYDEPNLQLELVLDTLKQKLSVASSRLKRYCNCTLRKEQNSTFHHNEKSFYRSLKKDSIEQVEGVTRNERVFPSSDELYRFWSCIWEEPTKYNPENPLIREAEEQYHNLSEMEFNCIDSELFHTVILRLHNWKSPGMDYIQNFWYKKFTKIHPFLLIHINNFIENPTKIPRFVTAGVTYMISKDQNDTSNAAKYRPITCLQSIYKIITSCIAHLIYKHIENNSILTEQQKGCKKFSQGCKEQLIIDSVILGEVKSHNSELHSVYIDYKKAYDSVPHSYLIKVLELYKIHQNIIDFLQNIMKNWTTKLQLHTPNGNVETDIIQIKRGIFQGDTLSPLWFCLALNPLSSHLNAIRTGFNFKANDTGEATILNHLLYMDDIKLYANNAQDLDNLIDKTYTFSKDICMEFGIEKCKLNCIKKGKCHQYSYDLQSGEQITAIDSHNPYKYLGYQQSQNIHHKEIKSSLKHQFQNRLNSILKTQLNSKNMTKAINTYAIPVLTYSFGIIKWSSTELTQLQRKVRVTLTKHRKHHPKSCVQRIILPRSEGGRGIIDIQNLHNKQIANLRAYFWRKQNISILHKSVIMADSRHTPLNLSDSNKQNNTIILTKQHVIDDWAKKSLHGRHRNDLCQVDVDKHASNAWLKRGELFPETEGFMLAIQDQVIETKNYQKHIMKLKNITTDKCRQCNGPSETIQHITGACSTIVQSDYKHRHDQVTNIIHQILSHKHNLINDGPQSCNQVKKKHLPYYKYKPSAVLENSHHKIYFDRSILTDRTIHHNRPDIVLINKQSKQTFLIDIAIPNTNNIQKTISEKLRKYIELREEIKKTWNMNEVTIVPIVLSSTGIIPKQLFKSLDVLGLPALTYLNLQKAVILNTCRIVRKFLQTN

SEQ ID NO: 2939 - protein, 1445 aa, Sarota myrtea
METRSKRKRIGPLPGGDRRGASGADAGCLSMRTVSDEELSRRALVGSTSEFTTAESPTHSLSPSLPIKQIPSTSCTSHIIYHSSPPMSNNKANICYSSYNLRSRSQQTQVKNPSEAANIETPDRSHTMSSLSSLSPFRSFDSPPSTNSWVSHISPTLSSMSDDVVQLANAECIAPITGTKNTRKKWTSEMNEFILRNYLHLTSLESNIPGHLPHLHQKFTEQFPNMQVTRQRIGDQRRAIMRKKLLSQDTIDIISREVQTELQPRGTDTMSSNRNINSQLKRFKWNKDHNETIMRLYYRITRLETNKSAYRKQLHQAFIQEFPELSHVTEQRIADQRRIIITKGYIHKDRLNTIREDIAIELQSDEDTIRSENTAMQEADVLTLDPSSDICSAASAVNDNFETQTMTRLQVSVTTHDTERNEKLDHLFFTALNYYKDIDPIARHFIPKQKPSKSLYTIIDYINKTLIPENINENMEFVQLHCILYCASWTAAKANGAKIFIPTLEKQCTPVMKFKPKWQVRLENKILKLRKMIGRITAFIKGNNNEKLTKYVTNISAQNQIHANYDQPNTRVEEVLDTLKQKLSVASSRLKRYCNCTRRKEQNSKFKQNEKLFYRSLTNADNKQLNNSPIPTSEELYQFWARIWQQPVEHNSGSELIKEESERYENLTEMRFECITEDIFNNVIHKLQNWKAPGTDKIHNFWYKKFTTIHCLLLNHINNFILNPSGIPEFIMRGVTFMIPKDQLDTGNPAKYRPITCLQSIYKIVTACITQLVYLHIEKNNILTEQQKGCRKFSRGCKEQLIIDSVILGEAQKSNSDLFSVYIDYKKAYDSVPHSWLIKCLNLYKIHPYIVNFLKNIMEQWTTKLQLHTSTGSVETESIQIKRGIFQGDTFSPLWFCLALNPLSNHLNTLSNGYHFKPSRHNESSTINHLLYMDDIKLYANAEIDLDYLINKTHNFSQDICMEFGIEKCKINCVKKGKCYQYIHELESGEQITSLDINNPYKYLGYHQSRNIHHKEIKSSLKQQFQNRLNSILKTQLNSKNMTKAINAYAIPVLTYSFGIIKWSRTELNQLQRKIRVTLTKHRKHHPKSCIQRFSLPRIEGGRGIIDIPNLHNKQISNLRTYFRTKHDSALHRTVTQTDLHYTPLNLSVTEKQNNEVTISKQHLIEEWTKKALHGRHRQDLCQTGVDKNASNAWLKRGELFPETEGFMVAIQDQVMETKNYQRYIMKLSNMTSDKCRQCNGPSETIQHITGACSSIAQTDYKHRHDQVANIIHQLLSHKHNLLNEVSQESNQTLKHPKNYRQPYYKYTPAVVSENSQYKLYFDRSILTDRTVHHNRPDIVLIDKQNKHTYLIDVAIPNTNNLQKTISEKLRKYVELREEIKKSWNMTGVTIVPIVLSTTGVIPKQLFNSLSALGLSSLTYLNLQKAVILNTCRIVRKFLQLNTNL

SEQ ID NO: 2940 - protein, 1029 aa, Drosophila saltans
MSHVGESMNSAPRITALTATNSTPTANSLGAQHEPGTAVNPASQIPCMVCGRLFKTSRGLGVHMSHRHKDELDTARRRVDVNLRWSEEEAYLLARKELELEASGNLRYPNKKLAEYFNHRSSEAIKCYRKRGEYKAKLEQLRGQVAHAPEALEPNTTQRRPSSIERRDQVSTTDAPPIMIPQQSNCEILRILQGYRPVVCNPRWRAEVLQSIIDSAPDLGRETTLQRLSIYLLEIFPKPKQVELSRPPRRPRNRRQLRRQQYAAVQRNWDKHNGRCIKSLLDGADESVLPNREIMEPYWREVISQPSTCSCDKAMFHLEHSPEKVWSAITAHDLRVNKVKLSSSPGPDGISPKTARSIPTGIMLRIMNLILWCGNIPQPIRLARTVFIPKTVTANRPQDFRPITVSSVLVRQLNAILASRLTSSVNWYPRQRGFLPTDGCADNATMVDLILREHHKRWKSCYIATLDVSKAFDSVSHQAVYNTLTAYGAPKDFIDYLRKLYEGGGTTLNGEGWRSEEFVPARGVKQDDPLSPILFNLIIDRLLRSFPDRVGAKVGNAITNAAAFADDLVLFAETPMGLQKLLDITVDFLSSVGLTLNADKCFTVSIKGQAKQKCTVVERRSFCVGSRECPSLKRTEEWKYLGVRFNADGRARFDPADDFGPKLLRLSRATLKPQQKLFALRTVLIPQLYHKLNLGSVTIGVLRKLDRLVRSTVRRWLDLPLDVSVAFFHAPHTCGGLGIPSLRWTAPMLRLKRLSNIKWPHLEQSDVASSFIDDEMQRARDRLLAGIGRLLTRAEIDSYWANRLHMSVDGSGLREAGHFRQQHGWVCQPTRLVTGKEYLNGIKLGRHELGRRCRAGCDDPETTNHILQQCYRTHGRWIVRHNGVVNALKRGLERKGYVVHVEPSLQCETGLNKPDLVAIRQNHAYVIDAQVVTDGLSLDDAHQCKVERYDRQDVRTELRRNFGVTGNIEFHSATLNWRGIWSGQSVKRLIAKDLLITGDSNIISVRVVKGGLLCFKQFMHYCGYSRAWT

SEQ ID NO: 2941 - protein, 1042 aa, Drosophila saltans
MSHVGESMNSAPRITALTATNSTPTANSLGAQHEPGTAVNPASQVPCMVCGRLFKTSRGLGVHMSHRHKDELDTARRRVDVNLRWSEEEAYLLARKELELEASGNLRYPNKKLAEFFNHRSSEAIKCYRKRGEYKAKLEQLRGQVAHAPEALEPNTTQRRPSSIERRDRVSTTDAPPIMIPQQSNCEILRILQGYRPVVCNPRWRAEVLQSIIDSAPDLGRETTLQRLSIYLLEIFPKPKQVELSRPPRRPRNRRQLRRQQYAAVQRNWDKHNGRCIKSLLDGADESVLPNREIMEPYWREVMSQPSTCSCDNAMFHLEHSLEKVWSAITAHDLRVNKVKLSSSPGPDGISPKTARSIPTGIMLRIMNLILWCGNIPQPIRLARTVFIPKTVTANRPQDFRPITVSSVLVRQLNAILASRLTSSVNWDPRQRGFLPTDGCADNATMVDLILREHHKRWKSCYIATLDVSKAFDSVSHQAVYNTLTAYGAPKDFIDYLRKLYEGGGTTLNGEGWRSEEFVPARGVKQGDPLSPILFNLIIDRLLRSFPDRVGAKVGNAITNAAAFADDLVLFAETPMGLQKLLDITVDFLSSVGLTLNADKCFTVSIKGQAKQKCTVVERRSFCVGSRECPSLKRTEEWKYLGIRFNADGRARFDPADDFGPKLLRLSRAPLKPQQKLFALRTVLIPQLYHKLTLGSVTIGVLRKLDRLVRSTVRRWLDLPLDVSVAFFHAPHTCGGLGIPSLRWTAPMLRLKRLSNIKWPHLEQSEVASSFIDDEMQRARDRLLAGIGRLLTRAEIDSYWANRLHMSVDGSGLREAGHFRQQHGWVCQPTRLVTGKEYLNGIKLRINALPSKSRTTRGRHELGRRCRAGCDAPETTNHILQQCYRTHGRRIVRHNGVVNALKRGLERKGYVVHVEPSLQCETELNKPDLVAIRQNHAYVIDAQVVTDGLSLDDAHQRKVERYDRQDVRTELRRIFGVTGNIEFHSATLNWRGIWSGQSVKRLIAKDLLITGDSNIISVRVVKGGLLCFKQFMHYCGYSRAWT

SEQ ID NO: 2942 - protein, 1039 aa, Drosophila persimilis
MQNTTPRIINTNSLTNQIPTVSSLGAQSEHSAQVNPNSGYQCTICESSFRSKSGLGVHMSRRHKDEFDQLRLRTDRKAQWSEEELSMMARKEIELAANGERYLNKKLAEVFTNRSVDAIKKCRQRERYKTKIEQLKGQAVPLPEALESETIQRRPSIRERDPLVTPPNTLGTTPTELSNSEILAVLQGYPPVVCNDQWRVEVLQSIVDGAQASGKEITLQRLSTYLMEVFPSQNDRPIQTRPPRRPRNRRQGRRQQYALTQRNWDKHKGRCIKAILDGTEGTATMPSQGIMGSYWRQVMTQTSPTYSGTNTTFRTEHPLEGVWSPITLGDLRVHRVSLTKSPGPDGITPRTVRSIPSGVMLRIMNLILWCGKLPVSIRQARTIFIPKVGNASRPQDFRPITVQSVMVRILNAILASRLTSSVDWDPRQRGFLPTDGCADNTTIVDLILRDHHKRCKSLYIATLDISKAFDSVSHAAVSATLTAYGAPKEFVDYVQNSYEVSGTTLNGDGWRSEEFIPARGVRQGDPLSPIIFNLIVDQLLRSYPNEIGATIGDHTTNAAAFADDIVLFAETRLGLQTMLDTTVDFLSSVGLTLNSDKCFTVGIKGQPKQKCTVVIPETFRIGSRSCPALKRTDEWKYLGITFTAQGRTRYSPADDLGPKLLRLTRSPLKPQQKLFALRTVLIPQLYHKLTLGSVMIGVLRKCDILVRSTVRKWLGLPLDVSTAFFHAPHTYGGLGIPSVRWVAPMLRMKRLSNIKWAHLAQSEAASSFLTDELNKARGRTLAGLNELTSRTEIETYWANRLYMSVDGRGLREAGLFRPQHGWVCQPTRLLTGQDYRNSIKLRINALPSRSRTTRGRNELERQCRAGCDAPETTNHILQNCYRTHGRRVARHNCVVNNLKRILEEKGHTVHVEPSLQLETSVSKPDLVCIRDNHACVIDAQIITDGLFLDDVHHRKVEKYKRPEVISALRREFGVSGNVEVLSATLNWRGIWSNQSVRRLIAKGLISSGDSNVISARVVTGGLYCFRQFMYLAGYTRDWT

SEQ ID NO: 2943 - protein, 981 aa, Drosophila persimilis
MSRRHKDEFDQLRLRTDRKAQWSEEELSMMARKEIELAANGERYLNKKLAEVFTNRSVDAIKKCRQRERYKTKIEQLKGQAVPLPEALESETIQRRPSIRERDLLVTPPNTLGTTPTELSNSEILAVLQGYPPVVCNDQWRVEVLQSIVDGAQASGKEITLQRLSTYLMEVFPSQNDRPIQTRPPRRPRNRRQGRRQQYALTQRNWDKHKGRCIKAILDGTEGTATMPSQGIMGSYWRQVMTQTSPTYSGTNTTFRTEHPLEGVWSPITLGDLRVHRVSLTKSPGPDGITPRTVRSIPSGVMLRIMNLILWCGKLPVSIRQARTIFIPKVGNASRPQDFRPITVQSVMVRILNAILASRLTSSVDWDPRQRGFLPTDGCADNTTIVDLILRDHHKRCKSLYIATLDISKAFDSVSHAAVSATLTAYGAPKEFVDYVQNSYEVCGTTLNGDGWRSEEFIPARGVRQGDPLSPIIFNLIVDQLLRSYPNEIGATIGDHTTNAAAFADDIVLFAETRLGLQTMLDTTVDFLSSVGLTLNSDKCFTVGIKGQPKQKCTVVIPETFRIGSRSCPALKRTDEWKYLGITFTAQGRTRYSPADDLGPKLLRLTRSPLKPQQKLFALRTVLIPQLYHKLTLGSVMIGVLRKCDILVRSTVRKWLGLPLDVSTAFFHAPHTYGGLGIPSVRWVAPMLRMKRLSNIKWAHLAQSEAASSFLTDELNKARGRTLAGLNELTSRTEIETYWANRLYMSVDGRGLREAGLFRPQHGWVCQPTRLLTGQDYRNSIKLRINALPSRSRTTRGRNELERQCRAGCDAPETTNHILQNCYRTHGRRVARHNCVVNNLKRILEEKGHTVHVEPSLQLETSVSKPDLVCIRDNHACVIDAQIITDGLFLDDVHHRKVEKYKRPEVISALRREFGVSGNVEVLSATLNWRGIWSNQSVRRLIAKGLISSGDSNVISARVVTGGLYCFRQFMYLAGYTRDWT

SEQ ID NO: 2944 - protein, 1039 aa, Drosophila persimilis
MQNTTPRIINTNSLTNQIPTVSSLGAQSEHSAQVNPNSGYQCTICESSFRSKSGLGVHMSRRHKDEFDQLRLRTDRKAQWSEEELSMMARKEIELAANGERYLNKKLAEVFTNRSVDAIKKCRQRERYKTKIEQLKGQAVPLPEALESENIQRRPSIRERDLLVTPPNTLGTTPTELSNSEILAVLQGYPPVVCNDQWRVEVLQSIVDGAQASGKEITLQRLSTYLMEVFPSQNDRPIQTRPPRRPRNRRQGRRQQYALTQRNWDKHKGRCIKAILDGTEGTATMPSQGIMGSYWRQVMTQTSPTYSGTNTTFRTEHPLEGVWSPITLGDLRVHRVSLTKSPGPDGITPRTVRSIPSGVMLRIMNLILWCGKLPVSIRQARTIFIPKVGNASRPQDFRPITVQSVMVRILNAILASRLTSSVDWDPRQRGFLPTDGCADNTTIVDLILRDHHKRCKSLYIATLDISKAFDSVSHAAVSATLTAYGAPKEFVDYVQNSYEVCGTTLNGDGWRSEEFIPARGVRQGDPLSPIIFNLIVDQLLRSYPNEIGATIGDHTTNAAAFADDIVLFAETRLGLQTMLDTTVDFLSSVGLTLNSDKCFTVGIKGQPKQKCTVVIPETFRIGSRSCPALKRTDEWKYLGITFTAQGRTRYSPADDLGPKLLRLTRSPLKPQQKLFALRTVLIPQLYHKLTLGSVMIGVLRKCDILVRSTVRKWLGLPLDVSTAFFHAPHTYGGLGIPSVRWVAPMLRMKRLSNIKWAHLAQSEAASSFLTDELNKARGRTLAGLNELTSRTEIETYWANRLYMSVDGRGLREAGLFRPQHGWVCQPTRLLTGQDYRNSIKLRINALPSRSRTTRGRNELERQCRAGCDAPETTNHILQNCYRTHGRRVARHNCVVNNLKRILEEKGHTVHVEPSLQLETSVSKPDLVCIRDNHACVIDAQIITDGLFLDDVHHRKVEKYKRPEVISALRREFGVSGNVEVLSATLNWRGIWSNQSVRRLIAKGLISSGDSNVISARVVTGGLYCFRQFMYLAGYTRDWT

SEQ ID NO: 2945 - protein, 813 aa, Drosophila persimilis
MEVFPSQNDRPIQTRPPRRPRNRRQGRRQQYALTQRNWDKHKGRCIKAILDGTEGTATMPSQGIMGSYWRQVMTQTSPTYSGTNTTFRTEHPLEGVWSPITLGDLRVHRVSLTKSPGPDGITPRTVRSIPSGVMLRIMNLILWCGKLPVSIRQARTIFIPKVGNASRPQDFRPITVQSVMVRILNAILASRLTSSVDWDPRQRGFLPTDGCADNTTIVDLILRDHHKRCKSLYIATLDISKAFDSVSHAAVSATLTAYGAPKEFVDYVQNSYEVCGTTLNGDGWRSEEFIPARGVRQGDPLSPIIFNLIVDQLLRSYPNEIGATIGDHTTNAAAFADDIVLFAETRLGLQTMLDTTVDFLSSVGLTLNSDKCFTVGIKGQPKQKCTVVIPETFRIGSRSCPALKRTDEWKYLGITFTAQGRTRYSPADDLGPKLLRLTRSPLKPQQKLFALRTVLIPQLYHKLTLGSVMIGVLRKCDILVRSTVRKWLGLPLDVSTAFFHAPHTYGGLGIPSVRWVAPMLRMKRLSNIKWAHLAQSEAASSFLTDELNKARGRTLAGLNELTSRTEIETYWANRLYMSVDGRGLREAGLFRPQHGWVCQPTRLLTGQDYRNSIKLRINALPSRSRTTRGRNELERQCRAGCDAPETTNHILQNCYRTHGRRVARHNCVVNNLKRILEEKGHTVHVEPSLQLETSVSKPDLVCIRDNHACVIDAQIITDGLFLDDVHHRKVEKYKRPEVISALRREFGVSGNVEVLSATLNWRGIWSNQSVRRLIAKGLISSGDSNVISARVVTGGLYCFRQFMYLAGYTRDWT

SEQ ID NO: 2946 - protein, 1044 aa, Drosophila tristis
MIGANVVNFEPRILLINSLTTQIPTVSSLGAQSEHSAEVNQTRGYQCTICGQSCRTKGGLGVHMSSRHKDEFDILRLRTDKKAQWNAEELSMMARKEIELVANGERFLNKKLAEVFTHRSVDAIKKCRQREKYKTTIEQLLGTAAHFPEALESETIQRRPSISERDLPVPPSETLGNTPTELSNREILAALQGYPRVVCNDQWRVEVLQSIVDGAQTSGKETTLLRLSTYLLEIFPQQNDRPIHARPLRRPRNRRQGRRQQYAQTQRNWDKHKGRCIKAILDGTEETATMPNQNIMVSYWRQVMTQPSPTYSGTNTQFRMEQPLERVWSPITLRDLRLHKVSLAKSPGPDGISPSTVRNIPSGIMLRIMNLILWCGKLPIPIRQARTIFIPKKVRASRPQDFRPITVPSVIVRILNAILASRLTLSVDWDPRQRGFLPTDGCADNTTIVDLILRDHHKRCKSCYIATLDISKAFDSVSHAAVINTLTAYGAPKDFVDYVQNSYEVCGTTLNGDGWRSEEFIPARGVKQGDPLSPIIFNMIIDRLLRSFPNEIGATVGNAITNAAAFADDLVLFAETPMGLQKLLDTTVDFLSSVGLTLNSEKCFTIGIKGQPKQKCTVVIPQSFCIGSRPCPALKRSDEWKYLGIHFTAEGRTRYSPAEDLGPKLLRLTRSPLKPQQKLFALRTVLIPQLYHKLTLGSVMIGVLRKCDILVRSFIRKWLGLPMDVSTAFFHAPHTCGGLGVPSVRYLAPMLRMKRLSGIKWPHLVQSEAASSFLEDELNKARGRTLAGEIELTSRTAIETYWADKLYMSVDGSGLREARLFRPQHGWVFQPTRLLTGKDYRNGIKLRINALPSRSRTTRGRHDLARQCRAGCDAPETNNHILQNCYRTHGKRVARHNCVVNNLKRILEEKGHTVHVEPNLQGESAVSKPDLVAIRQNHAFVIDAQIVTDGLSLDQAHLRKVERYKRPDVITAVRRDFNVSGAVEVLSATLNWRGIWSNQSVKGLITNNLLATSDSNVISARVVIGGLYCFRQFMYLAGYSRDWT

SEQ ID NO: 2947 - protein, 1039 aa, Drosophila persimilis
MQNTTPRIINTNSLTNQIPTVSSLGAQSEHSAQVNPNSGYQCTICESSFRSKSGLGVHMSRRHKDEFDQLRLRTDRKAQWSEEELSMMARKEIELAANGERYLNKKLAEVFTNRSVDAIKKCRQRERYKTKIEQLKGQAVPLPEALESETIQRRPSIRERDLLVTPPNTLGTTPTELSNSEILAVLQGYPPVVCNDQWRVEVLQSIVDGAQASGKEITLQRLSTYLMEVFPSQNDRPIQTRPPRRPRNRRQGRRQQYALTQRNWDKHKGRCIKAILDGTEGTATMPSQGIMGSYWRQVMTQTSPTYSGTNTTFRTEHPLEGVWSPITLGDLRVHRVSLTKSPGPDGITPRTVRSIPSGVMLRIMNLILWCGKLPVSIRQARTIFIPKVGNASRPQDFRPITVQSVMVRILNAILASRLTSSVDWDPRQRGFLPTDGCADNTTIVDLILRDHHKRCKSLYIATLDISKAFDSVSHAAVSATLTAYGAPKEFVDYVQNSYEVCGTTLNGDGWRSEEFIPARGVRQGDPLSPIIFNLIIDQLLRSYPNEIGATIGDHTTNAAAFADDIVLFAETRLGLQTMLDTTVDFLSSVGLTLNSDKCFTVGIKGQPKQKCTVVIPETFRIGSRSCPALKRTDEWKYLGITFTAQGRTRYSPADDLGPKLLRLTRSPLKPQQKLFALRTVLIPQLYHKLTLGSVMIGVLRKCDILVRSTVRKWLGLPLDVSTAFFHAPHTYGGLGIPSVRWVAPMLRMKRLSIIKWAHLAQSEAASSFLTDELNKARGRTLAGLNELTSRTEIETYWANRLYMSVDGRGLREAGLFRPQHGWVCQPTRLLTGQDYRNSIKLRINALPSRSRTTRGRNELERQCRAGCDAPETTNHILQNCYRTHGRRVARHNCVVNNLKRILEEKGHTVHVEPSLQLETSVSKPDLVCIRDNHACVIDAQIITDGLFLDDVHHRKVEKYKRPEVISALRREFGVSGNVEVLSATLNWRGIWSNQSVRRLIAKGLISSGDSNVISARVVTGGLYCFRQFMYLAGYTRDWT

SEQ ID NO: 2948 - protein, 1039 aa, Drosophila persimilis
MQNTTPRIINTNSLTNQIPTASSLGAQSEHSAQVNPNSGYQCTICESSFRSKSGLGVHMSRRHKDEFDQLRLRTDRKAQWSEEELSMMARKEIELAANGERYLNKKLAEVFTNRSVDAIKKCRQRERYKTKIEQLKGQAVPLPEALESETIQRRPSIRERDLLVTPPNTLGTTPTELSNSEILAVLQGYPPVVCNDQWRVEVLQSIVDGAQASGKEITLQRLSTYLMEVFPSQNDRPIQTRPPRRPRNRRQGRRQQYALTQRNWDKHKGRCIKAILDGTEGTATMPSQGIMGSYWRQVMTQTSPTYSGTNTTFRTEHPLEGVWSPITLGDLRVHRVSLTKSPGPDGITPRTVRSIPSGVMLRIMNLILWCGKLPVSIRQARTIFIPKVGNASRPQDFRPITVQSVMVRILNAILASRLTSSVDWDPRQRGFLPTDGCADNTTIVDLILRDHHKRCKSLYIATLDISKAFDSVSHAAVSATLTAYGAPKEFVDYVQNSYEVCGTTLNGDGWRSEEFIPARGVRQGDPLSPIIFNLIVDQLLRSYPNEIGATIGDHTTNAAAFADDIVLFAETRLGLQTMLDTTVDFLSSVGLTLNSDKCFTVGIKGQPKQKCTVVIPETFRIGSRSCPALKRTDEWKYLGITFTAQGRTRYSPADDLGPKLLRLTRSPLKPQQKLFALRTVLIPQLYHKLTLGSVMIGVLRKCDILVRSTVRKWLGLPLDVSTAFFHAPHTYGGLGIPSVRWVAPMLRMKRLSNIKWAHLAQSEAASSFLTDELNKARGRTLAGLNELTSRTEIETYWANRLYMSVDGRGLREAGLFRPQHGWVCQPTRLLTGQDYRNSIKLRINALPSRSRTTRGRNELERQCRAGCDAPETTNHILQNCYRTHGRRVARHNCVVNNLKRILEEKGHTVHVEPSLQLETSVSKPDLVCIRDNHACVIDAQIITDGLFLDDVHHRKVEKYKRPEVISALRREFGVSGNVEVLSATLNWRGIWSNQSVRRLIAKGLISSGDSNVISARVVTGGLYCFRQFMYLAGYTRDWT

SEQ ID NO: 2949 - protein, 1039 aa, Drosophila persimilis
MQNTTPRIINTNSLTNQIPTVSSLGAQSEHSAQVNPNSGYQCTICESSFRSKSGLGVHMSRRHKDEFDQLRLRTDRKAQWSEEELSMMARKEIELAANGERYLNKKLAEVFTNRSVDAIKKCRQRERYKTKIEQLKGQAVPLPEALESETIQRRPSIRERDLLVTPPNTLGTTPTELSNSEILAVLQGYPPVVCNDQWRVEVLQSIVDGAQASGKEITLQRLSTYLMEVFPSQNDRPIQTRPPRRPRNRRQGRRQQYALTQRNWDKHKGRCIKAILDGTEGTATMPSQGIMGSYWRQVMTQTSPTYSGTNTTFRTEHPLEGVWSPITLGDLRVHRVSLTKSPGPDGITPRTVRSIPSGVMLRIMNLILWCGKLPVSIRQARTIFIPKVGNASRPQDFRPITVQSVMVRILNAILASRLTSSVDWDPRQRGFLPTDGCADNTTIVDLILRDHHKRCKSLYIATLDISKAFDSVSHAAVSATLTAYGAPKEFVDYVQNSYEVCGTTLNGDGWRSEEFIPARGVRQGDPLSPIIFNLIVDQLLRSYPNEIGATIGDHTTNAAAFADDIVLFAETRLGLQTMLDTTVDFLSSVGLTLNSDKCFTVGIKGQPKQKCTVVIPETFRIGSRSCPALKRTDEWKYLGITFTAQGRTRYSPADDLGPKLLRLTRSPLKPQQKLFALRTVLIPQLYHKLTLGSVMIGVLRKCDILVRSTVRKWLGLPLDVSTAFFHAPHTYGGLGIPSVRWVAPMLRMKRLSNIKWAHLAQSEAASSFLTDELNKARGRTLAGLNELTSRTEIETYWANRLYMSVDGRGLREAGLFRPQHGWVCQPTRLLTGQDYRNSIKLRINALPSRSRTTRGRNELERQCRAGCDAPETTNHILQNCYRTHGRRVARHNCVVNNLKRILEEKGHTVHVEPSLQLETSVSKPDLVCIRDNHACVIDAQIITDGLFLDDVHHRKVEKYKRPEVISALRREFGVSGNVEVLSATLNWRGIWSNQSVRRLIAKGLISSGDSNVISARVVTGGLYCFRQFMYLAGYTRDWT

SEQ ID NO: 2950 - protein, 973 aa, Drosophila pseudoobscura
MQNTTPRIINTNSLTNQIPTVSSLGAQSEHSAQVNPNSGYQCTICESSFRSKSGLGVHMSRRHKDEFDQLRLRTDRKAQWSEEELSMMARKEIELAANGERYLNKKLAEVFTNRSVDAIKKCRQRERYKTKIEQLKGQAVPLPEALESETIQRRPSIRERDLLVTPPNTLGTTPTELSNREILAVLQGYPPVVCNDQWRVEVLQSIVDGAQASGKEITLQRLSTYLMEVFPSQNDRPIQTRPPRRPRNRRQGRRQQYALTQRNWDKHKGRCIKAILDGTEGTATMPSQGIMGSYWRQVMTQTSPTYSGTNTTFRTEHPLEGVWSPITLGDLRVHRVSLTKSPGPDGITPRTVRSIPSGVMLRIMNLILWCGKLPVSIRQARTIFIPKGGNASRPQDFRPITVQSVMVRILNAILASRLTSSVDWDPRQRGFLPTDGCADNTTIVDLILRDHHKRCKSLYIATLDISKAFDSVSHAAVSATLTAYGAPKEFVDYVQNSYEVCGATLNGDGWRSEEFIPARGVRQGDPLSPIIFNLIIDQLLRSYPNEIGATIGDHTTNAAAFADDIVLFAETRLGLQTMLDTTVDFLSSVGLTLNSDKCFTVGIKGQPKQKCTVVIPETFRIGSRSCPALKRTDEWKYLGITFTAQGRTRYSPADDLGPKLLRLTRSPLKPQQKLFALRTVLIPQLYHKLTLGSVMIGVLRKCDILVRSTVRKWLGLPLDVSTAFFHAPHIYGGLGIPSVRWVAPMLRMKRLSNIKWAHLAQSEAASSFLTDELNKARGRTLAGLNELTSRTEIETYWANRLYMSVDGRGLREAGLFRPQHGWVCQPTRLLTGQDYRNVIKLRINALPSRSRTTRGRNELERQCRLSHACVIDAQIITDGLFLDDVHHRKVEKYKRPEVISALRREFGVSGNVEVLSATLNWRGIWSNQSVRRLIAKGLISSGDSNVISARVVTGGLYCFRQFMYLAGYTRDWT

SEQ ID NO: 2951 - protein, 1039 aa, Drosophila pseudoobscura
MQNTTPRIINTNSLTNQIPTVSSLGAQSEHSALVNPNSGYQCTICESSFRSKSGLGVHMSRRHKDEFDQLRLRTDRKAQWSEEELSMMARKEIELAANGERYLNKKLAEVFTNRSVDAIKKCRQRERYKTKIEQLKGQAVPLPEALESETIQRRPSIRERDLLVTPPNTLGTTPTELSNREILAVLQGYPPVVCNDQWRVEVLQSIVDGAQASGKEITLQRLSTYLMEVFPSQNDRPIQTRPPRRPRNRRQGRRQQYALTQRNWDKHKGRCIKAILDGTEGTATMPSQGIMGSYWRQVMTQTSPTYSGTNTTFRTEHPLEGVWSPITLGDLRVHRVSLTKSPGPDGITPRTVRSIPSGVMLRIMNLILWCGKLPVSIRQARTIFIPKVGNASRPQDFRPITVQSVMVRILNAILASRLTSSVDWDPRQRGFLPTDGCADNTTIVDLILRDHHKRCKSLYIATLDISKAFDSVSHAAVSATLTAYGAPKEFVDYVQNSYEVCGTTLNGDGWRSEEFIPARGVRQGDPLSPIIFNLIIDQLLRSYPNEIGATIGDHTTNAAAFADDIVLFAETRLGLQTMLDTTVDFLSSVGLTLNSDKCFTVGIKGQPKQKCTVVIPETFRIGSRSCPALKRTDEWKYLGITFTAQGRTRYSPADDLGPKLLRLTRSPLKPQQKLFALRTVLIPQLYHKLTLGSVMIGVLRKCDILVRSTVRKWLGLPLDVSTAFFHAPHIYGGLGIPSVRWVAPMLRMKRLSNIKWAHLAQSEAASSFLTDELNKARGRTLAGLNELTSRSEIETYWANRLYMSVDGRGLREAGLFRPQHGWVCQPTRLLTGQDYRNGIKLRINALPSRSRTTRGRNELERQCRAGCDAPETTNHILQNCYRTHGRRVARHNCVVNNLKRILEEKGHTVHVEPSLQLETSVSKPDLVCIRDNHACVIDAQIITDGLFLDDVHHRKVEKYKRPEVISALRREFGVSGNVEVLSATLNWRGIWSNQSVRRLIAKGLISSGDSNVISARVVTGGLYCFRQFMYLAGYTRDWT

SEQ ID NO: 2952 - protein, 981 aa, Drosophila pseudoobscura
MSRRHKDEFDQLRLRTDRKAQWSEEELSMMARKEIELAANGERYLNKKLAEVFTNRSVDAIKKCRQRERYKTKIEQLKGQAVPLPEALESETIQRRPSIRERDLLVTPPNTLGTTPTELSNREILAVLQGYPPVVCNDQWRVEVLQSIVDGAQASGKETTLQRLSTYLMEVFPSQNDRPIQTRPPRRPRNRRQGRRQQYALTQRNWDKHKGRCIKAILDGTEGTATMPSQGIMGSYWRQVMTQTSPTYSGTNTTFRTEHPLEGVWSPITLGDLRVHRVSLTKSPGPDGITPRTVRSIPSGVMLRIMNLILWCGKLPVSIRQARTIFIPKVGNASRPQDFRPITVQSVMVRILNAILASRLTSSVDWDPRQRGFLPTDGCADNTTIVDLILRDHHKRCKSLYIATLDISKAFDSVSHAAVSATLTAYGAPKEFVDYVQNSYEVCGTTLNGDGWRSEEFIPARGVRQGDPLSPIIFNLIIDQLLRSYPNEIGATIGDHTTNAAAFADDIVLFAETRLGLQTMLDTTVDFLSSVGLTLNSDKCFTVGIKGQPKQKCTVVIPETFRIGSRSCPALKRTDEWKYLGITFTAQGRTRYSPADDLGPKLLRLTRSPLKPQQKLFALRTVLIPQLYHKLTLGSVMIGVLRKCDILVRSTVRKWLGLPLDVSTAFFHAPHIYGGLGIPSVRWVAPMLRMKRLSNIKWAHLAQSEAASSFLTDELNKARGRTLAGLNELTSRSEIETYWANRLYMSVDGRGLREAGLFRPQHGWVCQPTRLLTGQDYRNGIKLRINALPSRSRTTRGRNELERQCRAGCDAPETTNHILQNCYRTHGRRVARHNCVVNNLKRILEEKGHTVHVEPSLQLETSVSKPDLVCIRDNHACVIDAQIITDGLFLDDVHHRKVEKYKRPEVISALRREFGVSGNVEVLSATLNWRGIWSNQSVRRLIAKGLISSGDSNVISARVVTGGLYCFRQFMYLAGYTRDWT

SEQ ID NO: 2953 - protein, 1039 aa, Drosophila pseudoobscura
MQNTTPRIINTNSLTNQIPTVSSLGAQSEHSAQVNPNSGYQCTICESSFRSKSGLGVHMSRRHKDEFDQLRLRTDRKAQWSEEELSMMARKEIELAANGERYLNKKLAEVFTNRSVDAIKKCRQRERYKTKIEQLKGQAVPLPEALESETIQRRPSIRERDLLVTPPNTLGTTPTELSNREILAVLQGYPPVVCNDQWRVEVLQSIVDGAQASGKETTLQRLSTYLMEVFPSQNDRPIQTRPPRRPRNRRQGRRQQYALTQRNWDKHKGRCIKAILDGTEGTATMPSQGIMGSYWRQVMTQTSPTYSGTNTTFRTEHPLEGVWSPITLGDLRVHRVSLTKSPGPDGITPRTVRSIPSGVMLRIMNLILWCGKLPVSIRQARTIFIPKVGNASRPQDFRPITVQSVMVRILNAILASRLTSSVDWDPRQRGFLPTDGCADNTTIVDLILRDHHKRCKSLYIATLDISKAFDSVSHAAVSATLTAFGAPKEFVDYVQNSYEVCGTTLNGDGWRSEEFIPARGVRQGDPLSPIIFNLIIDQLLRSYPNEIGATIGDHTTNAAAFADDIVLFAETRLGLQTMLDTTVDFLSSVGLTLNSDKCFTVGIKGQPKQKCTVVIPETFRIGSRSCPALKRTDEWKYLGITFTAQGRTRYSPADDLGPKLLRLTRSPLKPQQKLFALRTVLIPQLYHKLTLGSVMIGVLRKCDILVRSTVRKWLGLPLDVSTAFFHAPHIYGGLGIPSVRWVAPMLRMKRLSNIKWAHLAQSEAASSFLTDELNKARGRTLAGLNELTSRSEIETYWANRLYMSVDGRGLREAGLFRPQHGWVCQPTRLLTGQDYRNGIKLRINALPSRSRTTRGRNELERQCRAGCDAPETTNHILQNCYRTHGRRVARHNCVVNNLKRILEEKGHTVHVEPSLQLETSVSKPDLVCIRDNHACVIDAQIITDGLFLDDVHHRKVEKYKRPEVISALRREFGVSGNVEVLSATLNWRGIWSNQSVRRLIAKGLISSGDSNVISARVVTGGLYCFRQFMYLAGYTRDWT

SEQ ID NO: 2954 - protein, 1039 aa, Drosophila lowei
MENIMPRIINTNSLTNQIPTVSSLGAQSEHSAQVNPNSGYQCTICESSFRSKSGLGVHMSRRHKDEFDQLRLRTDRKAQWSEEELSMMARKEIELAANGERYLNKKLAEVFTNRSVDAIKKCRQRERYKTKIEQLKGQAVPLPEALESETIQRRPSIRERDLLVTPPNTLGTTPTELSNREILAVLQGYPPVVCNDQWRVEVLQSIVDGAQASGKEITLQRLSTYLMEIFPSQNDRPIQTRSPRRPRNRRQGRRQQYALTQRNWDKHKGRCIKAILDGTEGTATMPSQSIMGSYWRQVMTQTSPTYSGTNTTFRTEHPLERVWSPITLGDLRVHKVSLTKSPGPDGITPRTVRSIPSGIMLRIMNLILWCGKLPVSIRQARTIFIPKVANASQPQDFRPITVQSVMVRILNAILASRLTSSVDWDPRQRGFLPTDGCADNTTIVDLILRDHHKRCKSLYIATLDISKAFDSVSHAAVSATLTAYGAPKEFVDYVQNSYEVCGTTLNGDGWRSEEFIPARGVRQGDPLSPIIFNMIIDRLLRSYRNEIGATIGNHITNAAAFADDIVLFAETRLGLQTMLDTTVDFLSSVGLTLNSDKCFTVGIKGQPKQKCTVVIPETFRIGSRSCLALKRTDEWKYLGITFTAQGRTRYSPAEDLGPKLLRLTRSPLKPQQKLFALRTVLIPQLYHKLTLGSLMIGVLRKCDILVRSTVRKWLGLPLDVSTAFFHAPHVFGGLGIPSVRWVAPMLRMKRLSNIKWAHLAQSEAASSFLTDELNKARGRTLAGLNELTSRTEIETYWANRLHMSVDGRGLREAGLFRPQHGWVCQPTRLLTGQDYRNGIKLRINALPSRSRTTRGRNELERQCRAGCDAPETTNHILQNCYRTHGRRVARHNCVVNNLKRILEEKGHTVHVEPSLQLETSVSKPDLVCIRDNHACVIDAQIITDGLFLDDVHHRKVEKYKRPEVISALRREFGVSGNVEVLSATLNWRGIWSNQSVRRLIAKGLISSGDSNVISARVVTGGLYCFRQFMYLAGYTRDWT

SEQ ID NO: 2955 - protein, 1052 aa, Drosophila athabasca
MPRIPSQDSLTNQIPTVIRLGAQSELSVQVNPVEGYQCTICGMSYRSKSGLGVHMSRRHKNEFDELRLRVDVKAQWSEEELSMMARKEIELAANGERFLNKKLAEIFINRSVDAIKKCRQRERYKTKIEQLRVEAVPLPEALDSETIQRRPSIGERDLLVTQSDSLGTTPTELSNWEILAALQGYRPVVCDDQWRVEALQSIVDGAEASGKEITLQRLSNYLLEIFPLPNERPIQARPLRRPRNRRQGRRQQYALTQRNWDKHKGRCIKAILDGTDETATMPHQNIMVPYWRQVMTEQSPRYSGSDTAFRTEHSHERVRSNRTPRDLEQRPIYSDSNPTFRIEHPREGGRSNITPRDRESQRVSMTFRMEHPLEGVWSPITPKDLKVHKVSMTKSPGPDGISPKTVRSIPTGIMLRIMNLILWCGKLPVSIRRARTVFIPKTGRASRPQDFRPITVPSVMVRLLNAILAARLTSSVNWDPRQRGFLPTDGCADNTTIVDLILRDHHKRCKSCYIATLDISKAFDSVSHAAVYNTLTAYGAPKEFVDYVRNWYEVCGTTLNGEGWRSDEFIPVRGVKQGDPLSPIIFNMIIDQLLRSFPKDIGATVGDAKTNAAAFADDIVLFAETRLGLQTLLDTTVNFLSSVGLTLNPDKCFTVGIKGQPKQKCTVVEPRPFSIGSRSCPALKRTDEWKYLGINFTADGRVKYSPAEDLGPKLLRLTRAPLKPQQKLFALRTVLIPQLYHKLTLGSVMIGVLRKCDILVRSVVRKWLGLPLDVSTAFFHAPHIYGGLGIPSVRWVAPMLRMKRLSSIQWPHLEQSEVASSFLIDELNKARGRSLAGENELTTRLEIDTYWANKLYMSVDGSGLRDARHFRPQHGWVHQPTRLLTGKDYRNGIMLRINALPSRSRTTRGREELERQCRAGCDAPETTNHILQNCYRTHGKRVARHNCVVNNLKRILEEKGHTVYVEPSLQCGTSVSKPDLVAIRHDRTFVIDAQIVTDGLSLDHADDRKVQRYKRPEVIAAVQRDFGVSGNVEVLSATLNWRGIWSNQMLED

SEQ ID NO: 2956 - protein, 1093 aa, Drosophila athabasca
MPRIPSQDSLTNQIPTVIRLGAQSELSVQVNPVEGYQCTICGMSYRSKSGLGVHMSRRHKNEFDELRLRVDVKAQWSEEELSMMARKEIELAANGERFLNKKLAEIFINRSVDAIKKCRQRERYKTKIEQLRVEAVPLPEALDSETIQRRPSIGERDLLVTQSDSLGTTPTELSNWEILAALQGYRPVVCDDQWRVEALQSIVDGAEASGKEITLQRLSNYLLEIFPLPNERPIQARPLRRPRNRRQGRRQQYALTQRNWDKHKGRCIKAILDGTDETATMPHQNIMVPYWRQVMTEQSPRYSGSDTAFRTEHSHERVRSNRTPRDLEQRPIYSDSNPTFRIEHPREGGRSNITPRDRESQRVSMTFRMEHPLEGVWSPITPKDLKVHKVSMTKSPGPDGISPKTVRSIPTGIMLRIMNLILWCGKLPVSIRRARTVFIPKTGRASRPQDFRPITVPSVMVRLLNAILAARLTSSVNWDPRQRGFLPTDGCADNTTIVDLILRDHHKRCKSCYIATLDISKAFDSVSHAAVYNTLTAYGAPKEFVDYVRNWYEVCGTTLNGEGWRSDEFIPVRGVKQGDPLSPIIFNMIIDQLLRSFPKDIGATVGDAKTNAAAFADDIVLFAETRLGLQTLLDTTVNFLSSVGLTLNPDKCFTVGIKGQPKQKCTVVEPRPFSIGSRSCPALKRTDEWKYLGINFTADGRVKYSPAEDLGPKLLRLTRAPLKPQQKLFALRTVLIPQLYHKLTLGSVMIGVLRKCDILVRSVVRKWLGLPLDVSTAFFHAPHIYGGLGIPSVRWVAPMLRMKRLSSIQWPHLEQSEVASSFLIDELNKARGRSLAGENELTTRLEIDTYWANKLYMSVDGSGLRDARHFRPQHGWVHQPTRLLTGKDYRNGIMLRINALPSRSRTTRGREELERQCRAGCDAPETTNHILQNCYRTHGKRVARHNCVVNNLKRILEEKGHTVYVEPSLQCGTSVSKPDLVAIRHDRTFVIDAQIVTDGLSLDHADDRKVQRYKRPEVIAAVQRDFGVSGNVEVLSATLNWRGIWSNQSVRRLIAKGLITSGDSNVISARVVTGGIYCFRQFMYLAGYTRDWT

SEQ ID NO: 2957 - protein, 1093 aa, Drosophila athabasca
MPRIPSQDSLTNQIPTVIRLGAQSEPSVQVNPVEGYQCTICGMSYRSKSGLGVHMSRRHKNEFDELRLRVDVKAQWSEEELSMMARKEIELAANGERFLNKKLAEIFINRSVDAIKKCRQRERYKTKIEQLRVEAVPLPEALDSETIQRRPSIGERDLLVTQSDSLGTTPTELSNWEILAALQGYRPVVCDDQWRVEALQSIVDGAEASGKEITLQRLSNYLLEIFPLPNERPIQARPLRRPRNGRQGRRQQYALTQRNWDKHKGRCIKAILDGTDETATMPHQNIMVPYWRQVMTEQSPRYSGSDTAFRTEHSHERVRSNRTPRDLEQSPRYSDSNPTFRIEHPREGGRSNITPRDRESQRVSMTFRMEHPLEGVWSPITPKDLKVHKVSMTKSPGPDGISPKTVRSIPTGIMLRIMNLILWCGKLPVSIRRARTVFIPKTGRASRPQDFRPITVPSVMVRLLNAILAARLTSSVNWDPRQRGFLPTDGCADNTTIVDLILRDHHKRCKSCYIATLDISKAFDSVSHAAVYNTLTAYGAPKEFVDYVRNWYEVCGTTLNGEGWRSDEFIPVRGVKQGDPLSPIIFNMIIDQLLRSFPKDIGATVGDAKTNAAAFADDIVLFAETRLGLQTLLDTTVNFLSSVGLTLNPDKCFTVGIKGQPKQKCTVVEPRPFSIGSRSCPALKRTDEWKYLGINFTADGRVKYSPAEDLGPKLLRLTRAPLNPQQKLFALRTVLIPQLYHKLTLGSVMIGVLRKCDILVRSVVRKWLGLPLDVSTAFFHAPHIYGGLGIPSVRWVAPMLRMKRLSSIQWPHLEQSEVASSFLIDELNKARGRSLAGENELTTRLEIDTYWANKLYMSVDGSGLRDARHFRPQHGWVHQPTRLLTGKDYRNGIMLRINALPSRSRTTRGREELERQCRAGCDAPETTNHILQNCYRTHGKRVARHNCVVNNLKRILEEKGHTVYVEPSLQCDTSVSKPDLVAIRHDRTFVIDAQIVTDGLSLDHADDRKVQRYKRPEVIASVQRDFGVSGNVEVLSATLNWRGIWSNQSVRRLIAKGLITSGDSNVISARVVTGGIYCFRQFMYLAGYTRDWT

SEQ ID NO: 2958 - protein, 1093 aa, Drosophila athabasca
MPRIPSQDSLTNQIPTVIRLGAQSELSVQVNPVEGYQCTICGKSYRSKSGLGVHMSRRHKNEFDELRLRVDVKAQWSEEELSMMARKEIELAANGERFLNKKLAEIFINRSVDAIKKCRQRERYKTKIEQLRVEAVPLPEALDSKTIQRRPSIGERDLLVTHSDSLGTTPTELSNWEILAALQGYRPVVCDDQWRVEALQSIVDGAEASGKEITLQRLSNYLLEIFPLPNERPIQARPLRRPRNRRQGRRQQYALTQRNWDKHKGRCIKAILDGTDETATMPHQNIMVPYWRQVMTEQSPRYSGSDTAFRTEHSHERVRSNRTPRDLEQRPIYSDSNPTFRIEHPREGGRSNITPRDRESQRVSMTFRMEHPLEGVWSPITPKDLKVHKVSMTKSPGPDGISPKTVRSIPTGIMLRIMNLILWCGKLPVSIRRARTVFIPKTGRASRPQDFRPITVPSVMVRLLNAILAARLTSSVNWDPRQRGFLPTDGCADNTTIVDLILRDHHKRCKSCYIATLDISKAFDSVSHAAVYNTLTAYGAPKEFVDYVRNWYEVCGTTLNGEGWRSDEFIPVRGVKQGDPLSPIIFNMIIDQLLRSFPKDIGATVGDAKTNAAAFADDIVLFAETRLGLQTLLDTTVNFLSSVGLTLNPDKCFTVGIKGQPKQKCTVVEPRPFSIGSRSCPALKRTDEWKYLGINFTADGRVKYSPAEDLGPKLLRLTRAPLKPQQKLFALRTVLIPQLYHKLTLGSVMIGVLRKCDILVRSVVRKWLGLPLDVSTAFFHAPHIYGGLGIPSVRWVAPMLRMKRLSSIQWPHLEQSEVASSFLIDELNKARGRSLAGENELTTRLEIDTYWANKLYMSVDGSGLRDARHFRPQHGWVHQPTRLLTGKDYRNGIMLRINALPSRSRTTRGREELERQCRAGCDAPETTNHILQNCYRTHGKRVARHNCVVNNLKRILEEKGHTVYVEPSLQCGTSVSKPDLVAIRHDRTFVIDAQIVTDGLSLDHADDRKVQRYKRPEVIAAVQRDFGVSGNVEVLSATLNWRGIWSNQSVRRLIAKGLITSGDSNVISARVVTGGIYCFRQFMYLAGYTRDWT

SEQ ID NO: 2959 - protein, 1092 aa, Drosophila azteca
MPRIPSQDSLTNQIPTVIRLGAQSEHSVQVNPVEGYQCTICGTSYRSKSGLGVHMSRRHKNEFDELRLRVDVKAQWSEEELSMMARKEIELAANGERFLNKKLAEIFTNRSVDAIKKCRQRERYKTKIEQLRVEAVPLPEALDPETIQRRPSIGERDLLVTPPNSLGTTPTELSNWEILAALQGYRPVVCDNQWRVEALQSIVDGAEASGKEITLQRLSNYLLEIFPLPNERPIHARPPRRPRNGRQGRRQQYALTQRNWDKHKGRCIKAILDGTDETAIMPHQSIMVPYWRQVMTEQSPRYSGSDTPFHMEHPHERVRSIITQRDLEQSQSNMGDPTFRMEHPLDGGRSRRTPRDFEQHRVSTPFRMEHPLEGVWSPITPRDLKLHKVSMTKSPGPDGITPKTVRNIPTGIMLRIMNLILWCGKLPVSIRQARTVFIPKTGRASQPQDFRPITVPSVMVRLLNAILAARLTSSVNWDPRQRGFLPTDGCADNTTIVDLILRDHHKRCKSCYIATLDISKAFDSVSHAAVLNTLTAYGAPKEFVDYVQNSYEVCGTTLNGEGWRSDEFIPVRGVKQGDPLSPIIFNLIIDKLLRSFPKEIGATVGNAITNAAAFADDMVLFAETRLGLQTLLDTTVNYLSSVGLTLNPDKCFTVGIKGQPKQKCTVVEQRPFSIGSRPCPALKRTDEWKYLGINFTADGRVKYSPAEDLGPKLLRLTRAPLKPQQKLFALRTVLIPQLYHKLTLGNVMIGVLRKCDILVRSVVRKWLGLPLDVSTAFFHAPHIYGGLGIPSVRWVAPMLRMKRLSSIKWPHLEQSEVASSFLIDELNKARGRSLAGENELTTRLEIDTYWANKLYMSVDGSGLRDARLFRPQHGWVHQPTRLLTGKEYRNGIMLRINALPSRSRTTRGREELERQCRAGCDAPETTNHILQNCYRTHGRRVARHNCVVNNLKRILEEKGHTVYVEPSLQCDTSVNKPDLVAIRHDHTFVIDAQIVTDGLSLDQADDRKVQRYKRPEVIAAVERDFGVSGTVEVLSATLNWRGIWSNKSVRRLIAKGIISSGDSNVISARVVTGGIYCFRQFMYLAGYTRDWT

SEQ ID NO: 2960 - protein, 981 aa, Drosophila obscura
MSSRHKDEFDILRLRTDKKAQWNAEELSMMARKEIELVANGERFLNKKLAEVFTHRSVDAIKKCRQREKYKTTIEQLLGTAAHFPEALESETIQRRPSISERDLPVPPSETLGNTPAELSNREILAALQGYPRVVCNDQWRVEVLQSIVDGAQTSGKETTLQRLSTYLLEIFPQQNDRPIHARPLRRPRNRRQGRRQQYAQTQRNWDKHKGRCIKAILDGTEETATMPNQNIMVSYWRQVMTQPSPTYSGTNTQFRMEQPLERVWSPITLRDLRLHKVSLAKSPGPDGISPSTVRNIPSGIMLRIMNLILWCGKLPIPIRQARTIFIPKKVRASRPQDFRPITVPSVIVRILNAILASRLTLSVDWDPRQRGFLPTDGCADNTTIVDLILRDHHKRCKSCYIATLDISKAFDSVSHAAVINTLTAYGAPKDFVDYVQNSYEVCGTTLNGDGWRSEEFIPARGVKQGDPLSPIIFNMIIDRLLRSFPNEIGATVGNAITNAAAFADDLVLFAETPMGLQKLLDTTVDFLSSVGLTLNSEKCFTIGIKGQPKQKCTVVIPQSFCIGSRPCPALKRSDEWKYLGIHFTAEGRTRYSPAEDLGPKLLRLTRSPLKPQQKLFALRTVLIPQLYHKLTLGSVMIGVLRKCDILVRSFIRKWLGLPMDVSTAFFHAPHTCGGLGVPSVRYLAPMLRMKRLSGIKWPHLVQSEAASSFLEDELNKARGRTLAGEIELTSRTAIETYWANKLYMSVDGSGLREARLFRPQHGWVFQPTRLLTGKDYRNGIKLRINALPSRSRTTRGRHDLDRQCRAGCDAPETNNHILQNCYRTHGKRVARHNCVVNNLKRILEEKGHTVHVEPNLQGESAVSKPDLVAIRQNHAFVIDAQIVTDGLSLDQAHLRKVERYKRPDVIAAVRRDFNVSGAVEVLSATLNWRGIWSNQSVKGLITNNLLATGDSNVISARVVIGGLYCFRQFMYLAGYSRDWT

SEQ ID NO: 2961 - protein, 1092 aa, Drosophila azteca
MPRIPSQDSLTNQIPTVIRLGAQSEHSVQVNPVEGYQCTICGTSYRSKSGLGVHMSRRHKNEFDELRLRVDVKAQWSEEELSMMARKEIELAANGERFLNKKLAEIFTNRSVDAIKKCRQRERYKTKIEQLRVEAVPLPEALDPETIQRRPSIGERDLLVTPPNSLGTTPTELSNWEILAALQGYRPVVCDDQWRVEALQSIVDGAEASGKEITLQRLSNYLLEIFPLPNERPIHARPPRRPRNGRQGRRQQYALTQRNWDKHKGRCIKAILDGTDETAMMPHQSIMVPYWRQVMTEQSPRYSGSDTPFHMEHPHERVRSIITQRDLEQSQSNMGDPTFRMEHPPDGGRSRRTPRDFEQHRVSTPFRMEHPLEGVWSPITPRDLKLHKVSMTKSPGPDGITPKTVRNIPTGIMLRIMNLILWCGKLPVSIRQARTVFIPKTGRASRPQDFRPITVPSVMVRLLNAILAARLTSSVNWDPRQRGFLPTDGCADNTTIVDLILRDHHKRCKSCYIATLDISKAFDSVSHAAVLNTLTAYGAPKEFVDYVQNSYEVCGTTLNGEGWRSDEFIPVRGVKQGDPLSPIIFNLIIDKLLRSFPKEIGATVGNAITNAAAFADDMVLFAETRLGLQTLLDTTVNYLSSVGLTLNPDKCFTVGIKGQPKQKCTVVEQRPFSIGSRPCPALKRTDEWKYLGINFTADGRVKYSPAEDLGPKLLRLTRAPLKPQQKLFALRTVLIPQLYHKLTLGNVMIGVLRKCDILVRSVVRKWLGLPLDVSTAFFHAPHIYGGLGIPSVRWVAPMLRMKRLSSIKWPHLEQSEVASSFLIDELNKARGRSLAGENELTTRLEIDTYWANKLYMSVDGSGLRDARLFRPQHGWVHQPTRLLTGKEYRNGIMLRINALPSRSRTTRGREELERQCRAGCDAPETTNHILQNCYRTHGRRVARHNCVVNNLKRILEEKGHTVYVEPSLQCDTSVNKPDLVAIRHDHTFVIDAQIVTDGLSLDQADDRKVQRYKRPEVIAAVERDFGVSGTVEVLSATLNWRGIWSNKSVRRLIAKGIISSGDSNVISARVVTGGIYCFRQFMYLAGYTRDWT

SEQ ID NO: 2962 - protein, 1056 aa, Drosophila azteca
MTLLRSLTWSTMSGLGVHMSRRHKNEFDELRLRVDVKAQWSEEELSMMARKEIELAANGERFLNKKLAEIFTNRSVDAIKKCRQRERYKTKIEQLRVEAVPLPEALDPETIQRRPSIGERDLLVTPPNSLGTTPTELSNWEILAALQGYRPVVCDDQWRVEALQSIVDGAEASGKEITLQRLSNYLLEIFPLPNERPIHARPPRRPRNGRQGRRQQYALTQRNWDKHKGRCIKAILDGTDETAMMPHQSIMVPYWRQVMTEQSPRYSGSDTPFHMEHPHERVRSIITQRDLEQSQSNMGDPTFRMEHPPDGGRSRRTPRDFEQHRVSTPFRMEHPLEGVWSPITPRDLKLHKVSMTKSPGPDGITPKTVRNIPTGIMLRIMNLILWCGKLPVSIRQARTVFIPKTGRASRPQDFRPITVPSVMVRLLNAILAARLTSSVNWDPRQRGFLPTDGCADNTTIVDLILRDHHKRCKSCYIATLDISKAFDSVSHAAVLNTLTAYGAPKEFVDYVQNSYEVCGTTLNGEGWRSDEFIPVRGVKQGDPLSPIIFNLIIDKLLRSFPKEIGATVGNAITNAAAFADDMVLFAETRLGLQTLLDTTVNYLSSVGLTLNPDKCFTVGIKGQPKQKCTVVEQRPFSIGSRPCPALKRTDEWKYLGINFTADGRVKYSPAEDLGPKLLRLTRAPLKPQQKLFALRTVLIPQLYHKLTLGNVMIGVLRKCDILVRSVVRKWLGLPLDVSTAFFHAPHIYGGLGIPSVRWVAPMLRMKRLSSIKWPHLEQSEVASSFLIDELNKARGRSLAGENELTTRLEIDTYWANKLYMSVDGSGLRDARLFRPQHGWVHQPTRLLTGKEYRNGIMLRINALPSRSRTTRGREELERQCRAGCDAPETTNHILQNCYRTHGRRVARHNCVVNNLKRILEEKGHTVYVEPSLQCDTSVNKPDLVAIRHDHTFVIDAQIVTDGLSLDQADDRKVQRYKRPEVIAAVERDFGVSGTVEVLSATLNWRGIWSNKSVRRLIAKGIISSGDSNVISARVVTGGIYCFRQFMYLAGYTRDWT

SEQ ID NO: 2963 - protein, 813 aa, Drosophila azteca
MMPHQSIMVPYWRQVMTEQSPRYSGSDTPFHMEHPHERVRSIITQRDLEQSQSNMGDPTFRMEHPPDGGRSRRTPRDFEQHRVSTPFRMEHPLEGVWSPITPRDLKLHKVSMTKSPGPDGITPKTVRNIPTGIMLRIMNLILWCGKLPVSIRQARTVFIPKTGRASRPQDFRPITVPSVMVRLLNAILAARLTSSVNWDPRQRGFLPTDGCADNTTIVDLILRDHHKRCKSCYIATLDISKAFDSVSHAAVLNTLTAYGAPKEFVDYVQNSYEVCGTTLNGEGWRSDEFIPVRGVKQGDPLSPIIFNLIIDKLLRSFPKEIGATVGNAITNAAAFADDMVLFAETRLGLQTLLDTTVNYLSSVGLTLNPDKCFTVGIKGQPKQKCTVVEQRPFSIGSRPCPALKRTDEWKYLGINFTADGRVKYSPAEDLGPKLLRLTRAPLKPQQKLFALRTVLIPQLYHKLTLGNVMIGVLRKCDILVRSVVRKWLGLPLDVSTAFFHAPHIYGGLGIPSVRWVAPMLRMKRLSSIKWPHLEQSEVASSFLIDELNKARGRSLAGENELTTRLEIDTYWANKLYMSVDGSGLRDARLFRPQHGWVHQPTRLLTGKEYRNGIMLRINALPSRSRTTRGREELERQCRAGCDAPETTNHILQNCYRTHGRRVARHNCVVNNLKRILEEKGHTVYVEPSLQCDTSVNKPDLVAIRHDHTFVIDAQIVTDGLSLDQADDRKVQRYKRPEVIAAVERDFGVSGTVEVLSATLNWRGIWSNKSVRRLIAKGIISSGDSNVISARVVTGGIYCFRQFMYLAGYTRDWT

SEQ ID NO: 2964 - protein, 1092 aa, Drosophila azteca
MPRIPSQDSLTNQIPTVIRLGAQSEHSVQVNPVEGYQCTICGTSYRSKSGLGVHMSRRHKNEFDELRLRVDVKAQWSEEELSMMARKEIELAANGERFLNKKLAEIFTNRSDDAIKKCRQRERYKTKIEQLRVEAVPLPEALDPETIQRRPSIGERDLLVTPPNSLGTTPTELSNWEILAALQGYRPVVCDDQWRVEVLQSIVDGAEASGKEITLQRLSNYLLEIFPLPNERPIHARPPRRPRNGRQGRRQQYALTQRNWDKHKGRCIKAILDGTDETAIMPHQSIMVPYWRQVMTEQSPRYSGSDTPFHMEHPHERVRSIITQRDLEQSQSNMGDPTFRMEHPPDGGRSRRTPRDFEQHRVSTPFRMEHPLEGVWSPITPRDLKLHKVSMTKSPGPDGITPKTVRNIPTGIMLRIMNLILWCGKLPVSIRQARTVFIPKTGRASRPQDFRPITVPSVMVRLLNAILAARLTSSVNWDPRQRGFLPTDGCADNTTIVDLILRDHHKRCKSCYIATLDISKAFDSVSHAAVLNTLTAYGAPKEFVDYDQNSYEVCGTTLNGEGWRSDEFIPVRGVKQGDPLSPIIFNLIIDKLLRSFPKEIGATVGNAITNAAAFADDMVLFAETRLGLQTLLDTTVNYLSSVGLTLNPDKCFTVGIKGQPKQKCTVVEQRPFSIGSRPCPALKRTDEWKYLGINFTADGRVKYSPAEDLGPKLLRLTRAPLKPQQKLFALRTVLIPQLYHKLTLGNVMIGVLRKCDILVRSVVRKWLGLPLDVSTAFFHASHIYGGLGIPSVRWVAPMLRMKRLSSIKWPHLEQSEVASSFLIDELNKARGRSLAGENELTTRLEIDTYWANKLYMSVDGSGLRDARLFRPQHGWVHQPTRLLTGKEYRNGIMLRINALPSRSRTTRGREELERQCRAGCDAPETTNHILQNCYRTHGRRVARHNCVVNNLKRILEEKGHTVYVEPSLQCDTSVNKPDLVAIRHDHTFVIDAQIVTDGLSLDQADDRKVQRYKRPEVIAAVERDFGVSGTVEVLSATLNWRGIWSNKSVRRLIAKGIISSGDSNVISARVVTGGIYCFRQFMYLAGYTRDWT

SEQ ID NO: 2965 - protein, 979 aa, Drosophila kurseongensis
MRCRHPDELDAIRRRVDIKARWSEEEKMMMARKEVELTANGVKHINKQLAVTFTNRSVEAIKKLRQRGDYKEKIEQIRGQSALVPEVANITIRRRPSNSEQNQRVSTSESSPITPQEQSNSEILRTLRGYSPVVCSSEWRAQELQTIIDRAQLEGKETTLQSLSAYLQGIFPVQGARRTLTRPTRRPRNRRESRRQQYAVIQRNWDKHKGRCIKSLLEETDESVMPSREFMEPYWREVMSQPSPSSCDSIVTQMDHSLEGVWSAVTKRDLRASRVALSSSPGPDGITPKSAREVPSGIMLRIMNLILWCGKLPHSIRLARTIFIPKMATAKRPQDFRPISVPSVLVRQLNAILATRLASSVNWDPSQRGFLPTDGCADNATIVDLVLRSSHKSFSSCYIANLDVSKAFDSLSHAAIVNTLKAYGAPKGFVDYVQHSYEVGGTSLCGEGWCSEEFVPARGVKQGDPLSPILFNLVIDRLLRAFPKEIGAKVGTAMTNAAAFADDLVLFAETRLGLQTLLDKTVDFLATVGLRLNADKCFTVGIKGQPKQKCTVLDPQSFRVGLNGCPALKRTDEWKYLGIKFNASGRVKCNPAEDVGPKLQRLSEAPLKPQQKLFALRTVLIPQLYHKLTLGSVTIGALRKFDKLIRFYVRKWLSLPPDVPIAFVHAPPKSGGLGIPSLRWFAPMLRLRRLSNIKWPHFDQSEVASSFIEGEKQRARVRLLAEQNEMLSRSAIEKFWADRLYMSVDGNGLREAGHYGPQHGWVSQPTRLLTGKEYVDGIKLRINALPTKSRTTRGRYELDRQCRAGCDAPETTNHIMQKCYRSHGRRVARHNCVVNRIKRGLEERGCVVIVEPSLQGESGLRKPDLVVVRPNHIDVIDIQVTTDGHSLDDAHQRKIQKYDTPDIRTELRRRFVGTYDTEFHSATINWRGIWSGKSVKRLIAKGLLSKYDSHIISIQVMRGSLSCFRQFMYLSGYSRDYVA

SEQ ID NO: 2966 - protein, 1028 aa, Drosophila mauritiana
MNLHNLMTTRPSVDTFPEDQYEPNAAATLSRVPCTVCGRSFNSKRGLGVHMRSRHPDELDEERRRVEIKARWSEEEKWMMARKEVELTANGHKHINKQLAVYFANRSVEAIKKLRQRGDYKEKIEQIRGQSARVPEVANLTIRRRPSRSEQNHQVTTSETTPITPFEQSNREILRTLRGYSPVECHSKWRAQELQTIIDRAELEGKETTLQCLSLYLLGIFPAQGVRHTLTRPPRRPRNRRESRRQQYAVTQRNWDKHKGRCIKSLLNGTDESVMPSQEVMVPYWREVMTQPSPSSCSGEVIQMDHSLERVWSAITEHDLRASRISLSSSPGPDGITPKTAREVPSGIMLRIMNLILWCGNLPHSIRLARTVFIPKTVTAKRPQDFRPISVPSVLVRQLNAILATRLNSSINWDPRQRGFLPTDGCADNATIVDLVLRHSHKHFRSCYIANLDVSKAFDSLSHASIYDTLRAYGAPKGFVDYVQNTYEGGGTSLNGDGWSSEEFVPARGVKQGDPLSPILFNLVMDRLLRNLPSEIGARVGNAITNAAAFADDLVLFAETRMGLQVLLDRTLDFLSLVGLKLNADKCFTVGIKGQPKQKCTVLEAQSFYVGSREIPSLKRTDEWKYLGINFTATGRVRCNPAEDIGPKLQRLTKAPLKPQQRMFALRTVLIPQLYHKLALGSVAIGVLRKTDKLIRYYVRRWLNLPLDVPIAFIHAPPKSGGLGIPSLRWVAPMLRLRRLSNIKWPHLTQNEVASSFLEAEKQRARDRLFAEQHELLSRPAIEKYWANKLYLSVDGSGLREAGHWGPQHGWVNQPTRLLTGKEYIDGIRLRINALPTKSRTTRGRHELERQCRAGCDAPETTNHIMQKCYRSHGRRVARHNCVVNRIKRGLEERGCAVIVEPSLQCESGLNKPDLVALRQNHIDVIDIQIVTDGHSMDDAHQRKINRYDRPDIRTELRRRFEAAGDIEFHSATLNWRGIWSGQSVKRLIAKGLLSKYDSHIISVQVMRGSLGCFKQFMYLSGFSRDWT

SEQ ID NO: 2967 - protein, 754 aa, Drosophila mauritiana
MPSQEVMVPYWREVMTQPSPSSCSGEVIQMDHSLERVWSAITEHDLRASRISLSSSPGPDGITPKTAREVPSGIMLRIMNLILWCGNLPHSIRLARTVFIPKTVTAKRPQDFRPISVPSVLVRQLNAILATRLNSSINWDPRQRGFLPTDGCADNATIVDLVLRHSHKHFRSCYIANLDVSKAFDSLSHASIYDTLRAYGAPKGFVDYVQNTYEGGGTSLNGDGWSSEEFVPARGVKQGDPLSPILFNLVMDRLLRNLPSEIGARVGNAITNAAAFADDLVLFAETRMGLQVLLDRTLDFLSLVGLKLNADKCFTVGIKGQPKQKCTVLEAQSFYVGSREIPSLKRTDEWKYLGINFTATGRVRCNPAEDIGPKLQRLTKAPLKPQQRMFALRTVLIPQLYHKLALGSVAIGVLRKTDKLIRYYVRRWLNLPLDVPIAFIHAPPKSGGLGIPSLRWVAPMLRLRRLSNIKWPHLTQNEVASSFLEAEKQRARDRLFAEQHELLSRPAIEKYWANKLYLSVDGSGLREAGHWGPQHGWVNQPTRLLTGKEYIDGIRLRINDLPTKSRTTRARHELERQCRAGCDAPETTNHIMQKCYRSHGRRVARHNCVVNRIKRGLEERGCAVIVEPSLQCESGLNKPDLVALRQNHIDVIDIQIVTDGHSMDDAHQRKINRYDRPDIRTELRRRFEAAGDIEFHSATLNWRGIWSGQSVKRLIAKGLLSKYDSHIISVQVMRGSLGCFKQFMYLSGFSRDWT

SEQ ID NO: 2968 - protein, 1028 aa, Drosophila mauritiana
MNLHNLMTTRPSVDTFPEDQYEPNAAATLSRVPCTVCGRSFNSKRGLGVHMRSRHPDELDEERRRVEIKARWSEEEKWMMARKEVELTANGHKHINKQLAVYFANRSVEAIKKLRQRGDYKEKIEQIRGQSARVPEVANLTIRRRPSRSEQNHQVTTSETTPITPFEQSNREILRTLRGYSPEECHSKWRAQELQTIIDRAELEGKETTLQCLSLYLLGIFPAQGVRHTLTRPPRRPRNRRESRRQQYAVTQRNWDKHKGRCIKSLLNGTDESVMPSQEVMVPYWREVMTQPSPSSCSGEVIQMDHSLERVWSAITEHDLRASRISLSSSPGPDGITPKTAREVPSGIMLRIMNLILWCGNLPHSIRLARTVFIPKTVTAKRPQDFRPISVPSVLVRQLNAILATRLNSSINWDPRQRGFLPTDGCADNATIVDLVLRHSHKHFRSCYIANLDVSKAFDSLSHASIYDTLRAYGAPKGFVDYVQNTYEGGGTSLNGDGWSSEEFVPARGVKQGDPLSPILFNLVMDRLLRNLPSEIGARVGNAITNAAAFADDLVLFAETRMGLQVLLDRTLDFLSLVGLKLNADKCFTVGIKGQPKQKCTVLEAQSFYVGSREIPSLKRTDEWKYLGINFTATGRVRCNPAEDIGPKLQRLTKAPLKPQQRMFALRTVLIPQLYHKLALGSVAIGVLRKTDKLIRYYVRRWLNLPLDVPIAFIHAPPKSGGLGIPSLRWVAPMLRLRRLSNIKWPHLTQNEVASSFLEAEKQRARDRLFAEQHELLSRPAIEKYWANKLYLSVDGSGLREAGHWGPQHGWVNQPTRLLTGKEYIDGIRLRINALPTKSRTTRGRHELERQCRAGCDAPETTNHIMQKCYRSHGRRVARHNCVVNRIKRGLEERGCAVIVEPSLQCESGLNKPDLVALRQNHIDVIDIQIVTDGHSMDDAHQRKINRYDRPDIRTELRRRFEAAGDIEFHSATLNWRGIWSGQSVKRLIAKGLLSKYDSHIISVQVMRGSLGCFKQFMYLSGFSRDWT

SEQ ID NO: 2969 - protein, 1028 aa, Drosophila mauritiana
MNLHNLMTTRPSVDTFPEDQYEPNAAATLSRVPCTVCGRSFNSKRGLGVHMRSRHPDELDEVRRRVEIKARWSEEEKWMMARKEVELTANGHKHINKQLAVYFANRSVEAIKKLRQRGDYKEKIEQIRGQSARVPEVANLTIRRRPSRSEQNHQVTTSETTPITPFEQSNREILRTLRGYSPVECHSKWRAQELQTIIDRAELEGKETTLQCLSLYLLGIFPAQGVRHTLTRPPRRPRNRRESRRQQYAVTQRNWDKHKGRCIKSLLNGTDESVMPSQEVMVPYWREVMTQPSPSSCSGEVIQMDHSLERVWSAITEHDLRASRISLSSSPGPDGITPKTAREVPSGIMLRIMNLILWCGNLPHSIRLARTVFIPKTVTAKRPQDFRPISVPSVLVRQLNAILATRLNSSINWDPRQRGFLPTDGCADNATIVDLVLRHSHKHFRSCYIANLDVSKAFDSLSHASIYDTLRAYGAPKGFVDYVQNTYEGGGTSLNGDGWSSEEFVPARGVKQGDPLSPILFNLVMDRLLRNLPSEIGARVGNAITNAAAFADDLVLFAETRMGLQVLLDRTLDFLSLVGLKLNADKCFTVGIKGQPKQKCTVLEAQSFYVGSREIPSLKRTDEWKYLGINFTATGRVRCNPAEDIGPKLQRLTKAPLKPQQRMFALRTVLIPQLYHKLALGSVAIGVLRKTDKLIRYYVRRWLNLPLDVPIAFIHAPPKSGGLGIPSLRWVAPMLRLRRLSNIKWPHLTQNEVASSFLEAEKQRARDRLFAEQHELLSRPAIEKYWANKLYLSVDGSGLREAGHWGPQHGWVNQPTRLLTGKEYIDGIRLRINALPTKSRTTRGRHELERQCRAGCDAPETTNHIMQKCYRSHGRRVARHNCVVNRIKRGLEERGCAVIVEPSLQCESGLNKPDLVALRQNHIDVIDIQIVTDGHSMDDAHQRKINRYDRPDIRTELRRRFEAAGDIEFHSATLNWRGIWSGQSVKRLIAKGLLSKYDSHIISVQVMRGSLGCFKQFMYLSGFSRDWT

SEQ ID NO: 2970 - protein, 1022 aa, Drosophila mauritiana
MTTRPSVDTFPEDQYEPNAAATLSRVPCTVCGRSFNSKRGLGVHMRSRHPDELDEERRRVEIKARWSEEEKWMMARKEVELTANGHKHINKQLAVYFANRSVEAIKKLRQRGDYKEKIEQIRGQSARVPEVANLTIRRRPSRSEQNHQVTTSETTPITPFEQSNREILRTLRGYSPVECHSKWRAQELQTIIDRAELEGKETTLQCLSLYLLGIFPAQGVRHTLTRPPRRPRNRRESRRQQYAVTQRNWDKHKGRCIKSLLNGTDESVMPSQEVMVPYWREVMTQPSPSSCSGEVIQMDHSLERVWSAITEHDLRASRISLSSSPGPDGITPKTAREVPSGIMLRIMNLILWCGNLPHSIRLARTVFIPKTVTAKRPQDFRPISVPSVLVRQLNAILATRLNSSINWDPRQRGFLPTDGCADNATIVDLVLRHSHKHFRSCYIANLDVSKAFDSLSHASIYDTLRAYGAPKGFVDYVQNTYEGGGTSLNGDGWSSEEFVPARGVKQGDPLSPILFNLVMDRLLRNLPSEIGARVGNAITNAAAFADDLVLFAETRMGLQVLLDRTLDFLSLVGLKLNADKCFTVGIKGQPKQKCTVLEAQSFYVGSREIPSLKRTDEWKYLGINFTATGRVRCNPAEDIGPKLQRLTKAPLKPQQRMFALRTVLIPQLYHKLALGSVAIGVLRKTDKLIRYYVRRWLNLPLDVPIAFIHAPPKSGGLGIPSLRWVAPMLRLRRLSNIKWPHLTQNEVASSFLEAEKQRARDRLFAEQHELLSRPAIEKYWANKLYLSVDGSGLREAGHWGPQHGWVNQPTRLLTGKEYIDGIRLRINALPTKSRTTRGRHELERQCRAGCDAPETTNHIMQKCYRSHGRRVARHNCVVNRIKRGLEERGCAVIVEPSLQCESGLNKPDLVALRQNHIDVIDIQIVTDGHSMDDAHQRKINRYDRPDIRTELRRRFEAAGDIEFHSATLNWRGIWSGQSVKRLIAKGLLSKYDSHIISVQVMRGSLGCFKQFMYLSGFSRDWT

SEQ ID NO: 2971 - protein, 978 aa, Drosophila santomea
MRSRHPDELDEERRRVDIKARWSEEEKWMMARKEVELMANGFKHINKQLAVYFANRSVEAIKKLRQRGDYKEKIEQIRGQSALAPEVANLTIRRRPSRSEQDHQVPTSEASPITPLEQSNREILRTLRGYSPVVCPSKWRAQELQTIIDRAEFEGKETTLQCLSLYLQGIFPVQGVRHTLTRPPRRPRNRRESRRQQYAVIQRNWDKHKGRCIKSLLNGTDESVMPSREFMEPYWREVMTQPSPSSCNGEVIRTDHSLETVWSAITEQDLRAPRVSLSSSPGPDGVTPKTAREVPSGITLRIMNLILWCGNLPHSIRLARTIFIPKTVTAKRPQDFRPISVPSVLVRQLNAILATRLTSSIDWDPRQRGFLPTDGCADNATIVDLVLRHSHKYFKSCYIANLDVSKAFDSLSHAAIYGTLRAYGAPKGFVDYVQKTYEGGGISLNGEGWCSEEFVPARGVKQGDPLSPILFNLVIDRLLRALPSEIGTKVGNAMINAAAFADDLVLFAETRMGLQTLLDKTMDFLSIVGLKLNADKCFTVGIKGQPKQKCTVLEAQSFCVGSREIPTLKRTDEWKYLGIHFTASGRVRCNPAEDIGPKLQRLSEAPLKPQQRLFALRTVLIPQLYHKLSLGSVTIGVLRKTDKLIRFYVRRWLNLPSDVPIAFVHAPPKCGGLGIPSLRWIAPMLRLRRLSNIKWPHLVQSEEASSFIEAEKQRARDRLIAEQNELLSRPAIEKYWANRLYLSVDGGGLREAGHYGPQHGWVSQPTRLLTGKEYLDGIRLRINALPTKSRTTRGRHELERQCRAGCDAPETTNHIMQKCYRSHGRRVARHNCVVNRIKRGLEERGCVVIAEPSLQCESGLNKPDLVVLRQNHIDVIDVQVVTDGHSMDEAHQRKINRYDRPDIRTELRRRFEAAGDIEFHSATLNWRGIWSGQSVKRLIAKGLLSKYDSHIISVQVMRGSLGCFRQFMYLSGFSRDWT

SEQ ID NO: 2972 - protein, 978 aa, Drosophila santomea
MRSRHPDELDEERRRVDIKARWSEEEKWMMARKEVELMANGFKHINKQLAVYFANRSVEAIKKLRQRGDYKEKIEQIRGQSALAPEVANLTIRRRPSRSEQDHQVPTSEASPITPLEQSNREILRTLRGYSPVVCPSKWRAQELQTIIDRAEFEGKETTLQCLSLYLQGIFPVQGVRHTLTRPPRRPRNRRESRRQQYAVIQRNWDKHKGRCIKSLLNGTDESVMPSREFMEPYWREVMTQPSPSSCNGEVIHTDHSLETVWSAITEQDLRASRVSLSSSPGPDGVTPKTAREVPSGIMLRIMNLILWCGNLPHSIRLARTIFIPKTVTAKRPQDFRPISVPSVLVRQLNAILATRLTSSIDWDPRQRGFLPTDGCADNATIVDLVLRHSHKYFKSCYIANLDVSKAFDSLSHAAIYGTLRAYGAPKGFVDYVQKTYEGGGISLNGEGWCSEEFVPARGVKQGDPLSPILFNLVIDRLLRALPSEIGTKVGNAMINAAAFADDLVLFAETRMGLQTLLDKTMDFLSIVGLKLNADKCFTVGIKGQPKQKCTVLEAQSFCVGSREIPTLKRTDEWKYLGIHFTASGRVRCNPAEDIGPKLQRLSEAPLKPQQRLFALRTVLIPQLYHKLSLGSVTIGILRKTDKLIRFYVRRWLNLPSDVPIAFVHAPPKCGGLGIPSLRWVAPMLRLRRLSNIKWPHLVQSEEASSFIEAEKQRARDRLIAEQNELLSRPAIEKYWANRLYLSVDGGGLREAGHYGPQHGWVSQPTRLLTGKEYLDGIRLRINALPTKSRTTRGRHELERQCRAGCDAPETTNHIMQKCYRSHGRRVARHNCVVNRIKRGLEERGCVVIAEPSLQCESGLNKPDLVVLRQNHIDVIDVQVVTDGHSMDEAHQRKINRYDRPDIRTELRRRFEAAGDIEFHSATLNWRGIWSGQSVKRLIAKGLLSKYDSHIISVQVMRGSLGCFRQFMYLSGFSRDWT

SEQ ID NO: 2973 - protein, 1023 aa, Drosophila fuyamai
MTTPTPVESIPGNQYIPTASATLSRVPCTICERVFACQRGLGVHMRYRHPDELDEIRRRVDIKARWSEEEKMMMARKEVELTANGIKHINKQLADIFTNRSVEAVKKARQRGDYKEKVELIRGQSALAPEVARLTIRRRPSNSEQNQRVSTSESSPINPQEQSNSEILRTLRGYSPVVCSSEWRAQELQTIVDRAQLDGKETTLQNLSAYLQGIFPVQGARRMLTRPTRRPRNRRESRRQQYAVIQRNWDKHKGRCIKSLLEETDESVMPSREFMEPYWREIMTQPSPSSCENIVTPMDHSLEGVWSAITKRDLRASRVALSSSPGPDGITPKSAREVPSGIMLRIMNLILWCGKLPHFIRLARTIFIPKMATAKRPQDFRPISVPSVLVRQLNAILATRLASSVNWDPRQRGFLPTDGCADNATIVDLVLRSSHKSFSSCYIANLDVSKAFDSLSHAAIVNTLKAYGVPKGFVDYVQHSYEVGGTSLCGEGWCSEEFVPARGVKQGDPLSPILFNLVIDRLLRAFPKEIGAKVGTAMTNAAAFADDLVLFAETRLGLQTLLDKTVDFLATVGLRLNADKCFTVGIKGQPKQKCTVLDPQSFRVGLNGCPALKRIDEWKYLGIKFNAGGRVKCNPAEDLGPKLQRLSEAPLKPQQKLFALRTVLIPQLYHKLTLGSVTIGALRKFDKLIRFYVRKWLDLPPDVPIAFVHAPPKCGGLGIPSLRWMAPMLRLRRLSNIKWPHFDQSEVASSFIETEMQKARVRLLAEQNELLSRPAIEKFWADRLYMSVDGNGLREAGHYGPQHGWVSQPTRLLTGKEYVDGIKLRINALPTKSRTTRGRHELDRQCRAGCDAPETTNHIMQKCYRSHGRRVARHNCVVNRIKRGLEERGCVVIVEPSLQGESGLRKPDLVVVRPNHIDVIDVQVTTDGHPLDDAHQRKIQKYDTPDIRTELRRKFVGTHDIEFHSATINWRGIWSGRSVKRLIAKGLLSKYDSHIISIQVMRGSLSCFRQFMYLSGYSRDYVA

SEQ ID NO: 2974 - protein, 1022 aa, Drosophila sechellia
MTTRPSVDIFPEDQYEPNAAATLSRVPCTVCGRSFNSKRGLGVHMRSRHPDELDEERRRVDIKARWSEEEKWMMARKEVELTANGHKHINKQLAVYFANRSVEAIKKLRQRGDYKEKIEQIRRQSALVPEVANLTIRRRPSRSEQNHQVTTSETTPITPFEQSNREILRTLRGYSPVECHSKWRAQELQTIIDRAELEGKETTLQCLSLYLLGIFPAQGVRHTLTRPPRRPRNRRESRRQQYAVVQRNWDKHKGRCIKSLLNGTDESVMPSQEVMVPYWREVMTQPSPSSCSREVIQMDHSLERVWSAITEHDLRASRISLSSSPGPDGITPKTAREVPSGIMLRIMNLILWCGNLPHSIRLARTVFIPKTVTAKRPQDFRPISVPSVLVRQLNAILATRLNSSINWDPRQRGFLPTDGCADNATIVDLVLRHSHKHFRSCYIANLDVSKAFDSLSHASIYDTLRAYGAPKGFVDYVQNTYEGGGTSLNGDGWSSEEFVPARGVKQGDPLSPILFNLVMDRLLRNLPSEIGARVGNAITNAAAFADDLVLFAETRMGLQVLLDRTLDFLSLVGLKLNADKCFTVGIKGQPKQKCTVLEAQSFYVGSREIPSLKRTDEWKYLGINFTATGRVRCNPAEDIGPKLQRLTKAPLKPQQRMFALRTVLIPQLYHKLALGSVAIGILRKTDKLIRYYVRRWLNLPLDIPIAFIHAPPKSGGLGIPSLRWVAPMLRLRRLSNIKWPHLTQNEVASSFLEAEKQRARDRLLAEQNELLSRPAIEKYWANKLYLSVDGSGLREAGHWGPQHGWVNQPTRLLTGKEYIDGIRLRINALPTKSRTTRGRHELERQCRAGCDAPETTNHIMQKCYRSHGRRIARHNCVVNRIKRGLEERGCVVIVEPSLQCESGLNKPDLVALRQNHIDVIDIQIVTDGHSMDDAHQRKINRYDRPDIRTELRRRFEAAGDIEFHSATLNWRGIWSGQSVKRLIAKGLLSKYDSHIISVQVMRGSLGCFKQFMYLSGFSRDWT

SEQ ID NO: 2975 - protein, 950 aa, Drosophila sechellia
MMARKEVELTANGHKHINKQLAVYFANRSVEAIKKLRQRGDYKEKIEQIRRQSALVPEVANLTIRRRPSRSEQNHQVTTSETTPITPFEQSNREILRTLRGYSPVECHSKWRAQELQTIIDRAELEGKETTLQCLSLYLLGIFPAQGVRHTLTRPPRRPRNRRESRRQQYAVVQRNWDKHKGRCIKSLLNGTDESVMPSQEVMVPYWREVMTQPSPSSCSREVIQMDHSLERVWSAITEHDLRASRISLSSSPGPDGITPKTAREVPSGIMLRIMNLILWCGNLPHSIRLARTVFIPKTVTAKRPQDFRPISVPSVLVRQLNAILATRLNSSINWDPRQRGFLPTDGCADNATIVDLVLRHSHKHFRSCYIANLDVSKAFDSLSHASIYDTLRAYGAPKGFVDYVQNTYEGGGTSLNGDGWSSEEFVPARGVKQGDPLSPILFNLVMDRLLRNLPSEIGARVGNAITNAAAFADDLVLFAETRMGLQVLLDRTLDFLSLVGLKLNADKCFTVGIKGQPKQKCTVLEAQSFYVGSREIPSLKRTDEWKYLGINFTATGRVRCNPAEDIGPKLQRLTKAPLKPQQRMFALRTVLIPQLYHKLALGSVAIGILRKTDKLIRYYVRRWLNLPLDIPIAFIHAPPKSGGLGIPSLRWVAPMLRLRRLSNIKWPHLTQNEVASSFLEAEKQRARDRLLAEQNELLSRPAIEKYWANKLYLSVDGSGLREAGHWGPQHGWVNQPTRLLTGKEYIDGIRLRINALPTKSRTTRGRHELERQCRAGCDAPETTNHIMQKCYRSHGRRIARHNCVVNRIKRGLEERGCVVIVEPSLQCESGLNKPDLVALRQNHIDVIDIQIVTDGHSMDDAHQRKINRYDRPDIRTELRRRFEAAGDIEFHSATLNWRGIWSGQSVKRLIAKGLLSKYDSHIISVQVMRGSLGCFKQFMYLSGFSRDWT

SEQ ID NO: 2976 - protein, 754 aa, Drosophila simulans
MPSQEVMVPYWREVMTQPSPSSCSGEVIQMDHSLERVWSAITEHDLRASRISLSSSPGPDGITPKSAREVPSGIMLRIMNLILWCGNLPHSIRLARTVFIPKTVTAKRPQDFRPISVPSVLVRQLNAILATRLNSSINWDPRQRGFLPTDGCADNATIVDLVLRHSHKHFRSCYIANLDVSKAFDSLSHASIYDTLRAYGAPKGFVDYVQNTYEGGGTSLNGDGWSSEEFVPARGVKQGDPLSPILFNLVMDRLLRNLPSEIGAKVGNAITNAAAFADDLVLFAETRMGLQVLLDRTLDFLSLVGLKLNADKCFTVGIKGQPKQKCTVLEAQSFYVGSREIPSLKRTDEWKYLGINFTATGRVRCNPAEDIGPKLQRLTKAPLKPQQRMFALRTVLIPQLYHKLALGSVAIGVLRKTDKLIRYYVRRWLNLPLDMPIAFIHAPPKSGGLGIPSLRWVAPMLRLRRLSNIKWPHLTQNEVASSFLEAEKQRARDRLLAEQNELLSRPAIEKYWANKLYLSVDGSGLREAGHWGPQHGWVNQPTRLLTGKEYIDGIRLRINALPTKSRTTRGRHELERQCRAGCDAPETTNHIMQKCYRSHGRRVARHNCVVNRIKRGLEERGCVVIVEPSLQCESGLNKPDLVALRQDHIDVIDIQIVTDGHSMDDAHQRKINRYDRPDIRTELRRRFEAAGDIEFHSATLNWRGIWSGQSVKRLIAKGLLSKYDSHIISVQVMRGSLGCFKQFMYLSGFSRDWT

SEQ ID NO: 2977 - protein, 1022 aa, Drosophila melanogaster
MTTRPSVDIFPEDQYEPNAAATLSRVPCTVCGRSFNSKRGLGVHMRSRHPDELDEERRRVDIKARWSDEEKWMMARKEVELTANGCKHINKQLAVYFANRSVEAIKKLRQRGDYKEKIEQIRGQSALAPEVANLTIRRRPSRSEQDHQVTTSETTPITPFEQSNREILRTLRGYSPVECHSKWRAQELQTIIDRAHLEGKETTLQCLSLYLLGIFPAQGVRHTLTRPPRRPRNRRESRRQQYAVVQRNWDKHKGRCIKSLLNGTDESVMPSQEIMVPYWREVMTQPSPSSCSGEVIQMDHSLERVWSAITEQDLRASRVSLSSSPGPDGITPKSAREVPSGIMLRIMNLILWCGNLPHSIRLARTVFIPKTVTAKRPQDFRPISVPSVLVRQLNAILATRLNSSINWDPRQRGFLPTDGCADNATIVDLVLRHSHKHFRSCYIANLDVSKAFDSLSHASIYDTLRAYGAPKGFVDYVQNTYEGGGTSLNGDGWSSEEFVPARGVKQGDPLSPILFNLVMDRLLRTLPSEIGAKVGNAITNAAAFADDLVLFAETRMGLQVLLDKTLDFLSIVGLKLNADKCFTVGIKGQPKQKCTVLEAQSFYVGSSEIPSLKRTDEWKYLGINFTATGRVRCNPAEDIGPKLQRLTKAPLKPQQRLFALRTVLIPQLYHKLALGSVAIGVLRKTDKLIRYYVRRWLNLPLDVPIAFVHAPPKSGGLGIPSLRWVAPMLRLRRLSNIKWPHLTQNEVASSFLEAEKQRARDRLLAEQNELLSRPAIEKYWANKLYLSVDGSGLREAGHYGPQHGWVSQPTRLLTGKEYIDGIRLRINALPTKSRTTRRRHELERQCRAGCDAPETTNHIMQKCYRSHGRRVARHNCVVNRIKRGLEERGCVVIVEPSLQCESGLNKPDLVALRQNHIDVIDIQIVTDGHSMDDAHQRKINRYDRPDIRTELRRRFEAAGDIEFHSATLNWRGIWSGQSVKRLIAKGLLSKYDSHIISVQVMRGSLGCFKQFMYLSGFSRDWT

SEQ ID NO: 2978 - protein, 978 aa, Drosophila subpulchrella
MRSQHPDELDDIRRRVDIKARWCEEEKMMMARKEVELTANGVRHINKQLAVFFTNRSVEAIKKLRQRDDYKEKIEQIRGQSALVPEVANLTIRRRPSNSEQNPQVPTSETSPITPLEQSNSGILLALRGYSPVVCPSKWRAQELQTIIDRAQIEGKETTLQCLSAYLQGIFPTQGARRTLTRPARRPRNRRESRRQQYAVIQRNWDKHKGRCIKSILEETDESVMPNQEYMEPYWREVMTQSSPSSCENIVTTPVHSLERVWSAITKRELRTSRVALSSSPGPDGITPKSAKEVPLGVMLRIMNLILWCGKLPRFIRLARTIFIPKTGTAMRPQDFRPISVPSVLVRQLNAILATRLTSSVDWDPRQRGFLPTDGCADNATIVDLVLRSSHKSYRSCYIANLDVSKAFDSLSHASIYNTLKAYGAPKDFVDYVQSSYEVGGTSLCGEGWSSEEFVPARGVKQGDPLSPILFNLVIDRLLRAFPKEIGTKVGTAMTNAAAFADDLVLFAETRMGLQQLLDKTVSYLATVGLTLNADKCFTIGIKGQPKQKCTVLDPHTFQVGLNGCPALKRTNEWKYLGIIFNANGRVKCNPAEDIGPKLQRLSQAPLKPQQKIFALRTVLIPQLYHKLTLGSVTIGVLRKSDKLIRFYVRKWLGLPPDVPIAFVHAPPKCGGLGIPSLRWMAPMLRLRRLSNIKWPHFEQSEVASSFIEEEMQRARVRLLAEQGEMHTRSAIEEYWANRLFVSVDGNGLREAGHYGPQHGWVSQPTRLLTGKEYRDGIKLRINALPTKSRTTRGRHELDRQCRAGCDAPETSNHIMQKCYRSHGRRVARHNCVVNRIKRGLEERGCVVIVEPSLQGESGLNKPDLVVLRPNHIDVIDVQVTNDGHSLDDAHQRKIQRYDTPDIRRELRRKFVATGDIEFHSATINWRGIWSGQSVKRLIAKGLLNKYDSHIISIQVIRGSLGCFRQFMYYSGYSRGWT

SEQ ID NO: 2979 - protein, 1022 aa, Drosophila simulans
MTTRPSVDIFPEDQYEPNAAATLSRVPCTVCGRSFNSKRGLGVHMRSRHPDELDEERRRVDIKARWSEEEKWMMARKEVELTANGHKHMNKQLAVYFANRSVEAIKKLRQRGDYKEKIEQIRGQSALVPEVANLTIRRRPSRSEQNHQVTTSETTPITPFEQSNREILRTLRGYSPVECHSKWRAQELQTIIDRAELEGKETTLQCLSLYLLGIFPAQGVRHTLTRPPRRPRNRRESRRQQYAVVQRNWDKHKGRCIKSLLNGTDESVMPSQEVMVPYWREVMTQPSPSSCSGEVIQMDHSLERVWSAITEHDLRASRISLSSSPGPDGITPKSAREVPSGIMLRIMNLILWCGNLPHSIRLARTVFIPKTVTAKRPQDFRPISVPSVLVRQLNAILATRLNSSINWDPRQRGFLPTDGCADNATIVDLVLRHSHKHFRSCYIANLDVSKAFDSLSHASIYDTLRAYGAPKGFVDYVQNTYEGGGTSLNGDGWSSEEFVPARGVKQGDPLSPILFNLVMDRLLRNLPSEIGAKVGNAITNAAAFADDLVLFAETRMGLQVLLDRTLDFLSLVGLKLNADKCFTVGIKGQPKQKCTVLEAQSFYVGSREIPSLKRTDEWKYLGINFTATGRVRCNPAEDIGPKLQRLTKAPLKPQQRMFALRTVLIPQLYHKLALGSVAIGVLRKTDKLIRYYVRRWLNLPLDMPIAFIHAPPKSGGLGIPSLRWVAPMLRLRRLSNIKWPHLTQNEVASSFLEAEKQRARDRLLAEQNELLSRPAIEKYWANKLYLSVDGSGLREAGHWGPQHGWVNQPTRLLTGKEYIDGIRLRINALPTKSRTTRGRHELERQCRAGCDAPETTNHIMQKCYRSHGRRVARHNCVVNRIKRGLEERGCVVIVEPSLQCESGLNKPDLVALRQDHIDVIDIQIVTDGHSMDDAHQRKINRYDRPDIRTELRRRFEAAGDIEFHSATLNWRGIWSGQSVKRLIAKGLLSKYDSHIISVQVMRGSLGCFKQFMYLSGFSRDWT

SEQ ID NO: 2980 - protein, 1022 aa, Drosophila simulans
MTTRPSVDIFPEDQYEPNAAATLSRVPCTVCGRSFNSKRGLGVHMRSRHPDELDEERRRVDIKARWSEEEKWMMARKEVELAANGHKHMNKQLAVYFANRSVEAIKKLRQRGDYKEKIEQIRGQSALVPEVANLTIRRRPSRSEQNHQVTTSETTPITPFEQSNREILRTLRGYSPVECHSKWRAQELQTIIDRAELEGKETTLQCLSLYLLGIFPAQGVRHTLTRPPRRPRNRRESRRQQYAVVQRNWDKHKGRCIKSLLNGTDESVMPSQEVMVPYWREVMTQPSPSSCSGEVIQMDHSLERVWSAITEHDLRASRISLSSSPGPDGITPKSAREVPSGIMLRIMNLILWCGNLPHSIRLARTVFIPKTVTAKRPQDFRPISVPSVLVRQLNAILATRLNSSINWDPRQRGFLPTDGCADNATIVDLVLRHSHKHFRSCYIANLDVSKAFDSLSHASIYDTLRAYGAPKGFVDYVQNTYEGGGTSLNGDGWSSEEFVPARGVKQGDPLSPILFNLVMDRLLRNLPSEIGAKVGNAITNAAAFADDLVLFAETRMGLQVLLDRTLDFLSLVGLKLNADKCFTVGIKGQPKQKCTVLEAQSFYVGSREIPSLKRTDEWKYLGINFTATGRVRCNPAEDIGPKLQRLTKAPLKPQQRMFALRTVLIPQLYHKLALGSVAIGVLRKTDKLIRYYVRRWLNLPLDMPIAFIHAPPKSGGLGIPSLRWVAPMLRLRRLSNIKWPHLTQNEVASSFLEAEKQRARDRLLAEQNELLSRPAIEKYWANKLYLSVDGSGLREAGHWGPQHGWVNQPTRLLTGKEYIDGIRLRINALPTKSRTTRGRHELERQCRAGCDAPETTNHIMQKCYRSHGRRVARHNCVVNRIKRGLEERGCVVIVEPSLQCESGLNKPDLVALRQDHIDVIDIQIVTDGHSMDDAHQRKINRYDRPDIRTELRRRFEAAGDIEFHSATLNWRGIWSGQSVKRLIAKGLLSKYDSHIISVQVMRGSLGCFKQFMYLSGFSRDWT

SEQ ID NO: 2981 - protein, 1022 aa, Drosophila sechellia
MTTRPSVDIFPEDQYEPNAAATLSRVPCTVCGRSFNSKRGLGVHMRSRHPDELDEERRRVDIKARWSEEEKWMMARKEVELTANGHKHINKQLAVYFANRSVEAIKKLRQRGDYKEKIEQIRRQSALVPEVANLTIRRRPSRSEQNHQVTTSETTPITPFEQSNREILRTLRGYSPVECHSKWRAQELQTIIDRAELEGKETTLQCLSLYLLGIFPAQGVRHTLTRPPRRPRNRRESRRQQYAVVQRNWDKHKGRCIKSLLNGTDESVMPSQEVMVPYWREVMTQPSPSSCSREVIQMDHSLERVWSAITEHDLRASRISLSSSPGPDGITPKTAREVPSGIMLRIMNLILWCGNLPHSIRLARTVFIPKTVTAKRPQDFRPISVPSVLVRQLNAILATRLNSSINWDPRQRGFLPTDGCADNATIVDLVLRHSHKHFRSCYIANLDVSKAFDSLSHASIYDTLRAYGAPKGFVDYVQNTYEGGGTSLNGDGWSSEEFVPARGVKQGDPLSPILFNLVMDRLLRNLPSEIGARVGNAITNAAAFADDLVLFAETRMGLQVLLDRTLDFLSLVGLKLNADKCFTVGIKGQPKQKCTVLEAQSFYVGSREIPSLKRTDEWKYLGINFTATGRVRCNPAEDIGPKLQRLTKAPLKPQQRMFALRTVLIPQLYHKLALGSVAIGVLRKTDKLIRYYVRRWLNLPLDIPIAFIHAPPKSGGLGIPSLRWVAPMLRLRRLSNIKWPHLTQNEVASSFLEAEKQRARDRLLAEQNELLSRPAIEKYWANKLYLSVDGSGLREAGHWGPQHGWVNQPTRLLTGKEYIDGIRLRINALPTKSRTTRGRHELERQCRAGCDAPETTNHIMQKCYRSHGRRIARHNCVVNRIKRGLEERGCVVIVEPSLQCESGLNKPDLVALRQNHIDVIDIQIVTDGHSMDDAHQRKINRYDRPDIRTELRRRFEAAGDIEFHSATLNWRGIWSGQSVKRLIAKGLLSKYDSHIISVQVMRGSLGCFKQFMYLSGFSRDWT

SEQ ID NO: 2982 - protein, 945 aa, Drosophila subpulchrella
MRSQHPDELDDIRRRVDIKARWCEEEKMMMARKEVELTANGVRHINKQLAVFFTNRSVEAIKKLRQRDDYKEKIEQIRGQSALVPEVANLTIRRRPSNSEQNPQVPTSETSPITPLEQSNSGILLALRGYSPVVCPSKWRAQELQTIIDRAQIEGKETTLQCLSAYLQGIFPTQGARRTLTRPARRPRNRRESRRQQYAVIQRNWDKHKGRCIKSILEETDESVMPNQEYMEPYWREVMTQSSPSSCENIVTTPVHSLERVWSAITKRELRTSRVALSSSPGPDGITPKSAKEVPLGVMLRIMNLILWCGKLPRFIRLARTIFIPKTGTAMRPQDFRPISVPSVLVRQLNAILATRLTSSVDWDPRQRGFLPTDGCADNATIVDLVLRSSHKSYRSCYIANLDVSKAFDSLSHASIYNTLKAYGAPKDFVDYVQSSYEVGGTSLCGEGWSSEEFVPARGVKQGDPLSPILFNLVIDRLLRAFPKEIGTKVGTAMTNAAAFADDLVLFAETRMGLQQLLDKTVSYLATVGLTLNADKCFTIGIKGQPKQKCTVLDPHTFQVGLNGCPALKRTNEWKYLGIIFNANGRVKCNPAEDIGPKLQRLSQAPLKPQQKIFALRTVLIPQLYHKLTLGSVTIGVLRKSDKLIRFYVRKWLGLPPDVPIAFVHAPPKCGGLGIPSLRWMAPMLRLRRLSNIKWPHFEQSEVASSFIEEEMQRARVRLLAEQGEMHTRSAIEEYWANRLFVSVDGNGLREAGHYGPQHGWVSQPTRLLTGKEYRDGIKLRINALPTKSRTTRGRHELDRQCRAGCDAPETSNHIMQKCYRSHGRRVARHNCVVNRIKRGLEERGCVVIVEPSLQGESGLNKPDLVVLRPNHIDVIDVQVTNDGHSLDDAHQRKIQRYDTPDIRRELRRKFVATGDIEFHSATINWRGIWSGQSVKTVDCEGPSK

SEQ ID NO: 2983 - protein, 1022 aa, Drosophila simulans
MTTRPSVDIFPEDQYEPNAAATLSRVPCTVCGRSFNSKRGLGVHMRSRHPDELDEERRRVDIKARWSEEEKWMMARKEVELTANGHKHMNKQLAVYFANRSVEAIKKLRQRGDYKEKIEQIRGQSALVPEVANLTIRRRPSRSEQNHQVTTSETTPITPFEQSNREILQTLRGYSPVECHSKWRAQELQTIIDRAELEGKETTLQCLSLYLLGIFPAQGVRHTLTRPPRRPRNRRESRRQQYAVVQRNWDKHKGRCIKSLLNGTDESVMPSQEVMVPYWREVMTQPSPSSCSGEVIQMDHSLERVWSAITEHDLRASRISLSSSPGPDGITPKSAREVPSGIMLRIMNLILWCGNLPHSIRLARTVFIPKTVTAKRPQDFRPISVPSVLVRQLNAILATRLNSSINWDPRQRGFLPTDGCADNATIVDLVLRHSHKHFRSCYIANLDVSKAFDSLSHASIYDTLRAYGAPKGFVDYVQNTYEGGGTSLNGDGWSSEEFVPARGVKQGDPLSPILFNLVMDRLLRNLPSEIGAKVGNAITNAAAFADDLVLFAETRMGLQVLLDRTLDFLSLVGLKLNADKCFTVGIKGQPKQKCTVLEAQSFYVGSREIPSLKRTDEWKYLGINFTATGRVRCNPAEDIGPKLQRLTKAPLKPQQRMFALRTVLIPQLYHKLALGSVAIGVLRKTDKLIRYYVRRWLNLPLDMPIAFIHAPPKSGGLGIPSLRWVAPMLRLRRLSNIKWPHLTQNEVASSFLEAEKQRARDRLLAEQNELLSRPAIEKYWANKLYLSVDGSGLREAGHWGPQHGWVNQPTRLLTGKEYIDGIRLRINALPTKSRTTRGRHELERQCRAGCDAPETTNHIMQKCYRSHGRRVARHNCVVNRIKRGLEERGCVVIVEPSLQCESGLNKPDLVALRQDHIDVIDIQIVTDGHSMDDAHQRKINRYDRPDIRTELRRRFEAAGDIEFHSATLNWRGIWSGQSVKRLIAKGLLSKYDSHIISVQVMRGSLGCFKQFMYLSGFSRDWT

SEQ ID NO: 2984 - protein, 978 aa, Drosophila subpulchrella
MRSQHPDELDDIRRRVDIKARWCEEEKMMMARKEVELTANGVRHINKQLAVFFTNRSVEAIKKLRQRDDYKEKIEQIRGQSALVPEVANLTIRRRPSNSEQNPQVPTSETSPITPLEQSNSGILLALRGYSPVVCPSKWRAQELQTIIDRAQIEGKETTLQCLSAYLQGIFPTQGARRTLTRPARRPRNRRESRRQQYAVIQRNWDKHKGRCIKSILEETDESVMPNQEYMEPYWREVMTQSSPSSCENIVTTPVHSLERVWSAITKRELRTSRVALSSSPGPDGITPKSAKEVPLGVMLRIMNLILWCGKLPRFIRLARTIFIPKTGTAMRPQDFRPISVPSVLVRQLNAILATRLTSSVDWDPRQRGFLPTDGCADNATIVDLVLRSSHKSYRSCYIANLDVSKAFDSLSHASIYNTLKAYGAPKDFVDYVQSSYEVGGTSLCGEGWSSEEFVPARGVKQGDPLSPILFNLVIDRLLRAFPKEIGTKVGTAMTNAAAFADDLVLFAETRMGLQQLLDKTVSYLATVGLTLNADKCFTIGIKGQPKQKCTVLDPHTFQVGLNGCPALKRTNEWKYLGIIFNANGRVKCNPAEDIGPKLQGLSQAPLKPQQKIFALRTVLIPQLYHKLTLGSVTIGVLRKSDKLIRFYVRKWLGLPPDVPIAFVHAPPKCGGLGIPSLRWMAPMLRLRRLSNIKWPHFEQSEVASSFIEEEMQRARVRLLAEQGEMHTRSAIEEYWASRLFVSVDGNGLREAGHYGPQHGWVSQPTRLLTGKEYRDGIKLRINALPTKSRTTRGRHELDRQCRAGCDAPETSNHIMQKCYRSHGRRVARHNCVVNRIKRGLEERGCVVIVEPSLQGESGLNKPDLVVLRPNHIDVIDVQVTNDGHSLDDAHQRKIQRYDTPDIRRELRRKFVATGDIEFHSATINWRGIWSGQSVKRLIAKGLLNKYDSHIISIQVIRGSLGCFRQFMYYSGYSRGWT

SEQ ID NO: 2985 - protein, 1045 aa, Drosophila sechellia
MTLLRSFNTTNRNNEPRSNLRNLMTTRPSVDIFPEDQYEPNAAATLSRVPCTVCGRSFNSKRGLGVHMRSRHPDELDEERRRVDIKARWSEEEKWMMARKEVELTANGHKHINKQLAVYFANRSVEAIKKLRQRGDYKEKIEQIRRQSALVPEVANLTIRRRPSRSEQNHQVTTSETTPITPFEQSNREILRTLRGYSPVECHSKWRAQELQTIIDRAELEGKETTLQCLSLYLLGIFPAQGVRHTLTRPPRRPRNRRESRRQQYAVVQRNWDKHKGRCIKSLLNGTDESVMPSQEVMVPYWREVMTQPSPSSCSREVIQMDHSLERVWSAITEHDLRASRISLSSSPGPDGITPKTAREVPSGIMLRIMNLILWCGNLPHSIRLARTVFIPKTMTAKRPQDFRPISVPSVLVRQLNAILATRLNSSINWDPRQRGFLPTDGCADNATIVDLVLRHSHKHFRSCYIANLDVSKAFDSLSHASIYDTLRAYGAPKGFVDYVQNTYEGGGTSLNGDGWSSEEFVPARGVKQGDPLSPILFNLVMDRLLRNLPSEIGARVGNAITNAAAFADDLVLFAETRMGLQVLLDRTLDFLSLVGLKLNADKCFTVGIKGQPKQKCTVLEAQSFYVGSREIPSLKRTDEWKYLGINFTATGRVRCNPAEDIGPKLQRLTKAPLKPQQRMFALRTVLIPQLYHKLALGSVAIGILRKTDKLIRYYVRRWLNLPLDIPIAFIHAPPKSGGLGIPSLRWVAPMLRLRRLSNIKWPHLTQNEVASSFLEAEKQRARDRLLAEQNELLSRPAIEKYWANKLYLSVDGSGLREAGHWGPQHGWVNQPTRLLTGKEYIDGIRLRINALPTKSRTTRGRHELERQCRAGCDAPETTNHIMQKCYRSHGRRIARHNCVVNRIKRGLEERGCVVIVEPSLQCESGLNKPDLVALRQNHIDVIDIQIVTDGHSMDDAHQRKINRYDRPDIRTELRRRFEAAGDIEFHSATLNWRGIWSGQSAKRLIAKGLLSKYDSHIISVQVMRGSLGCFKQFMYLSGFSRDWT

SEQ ID NO: 2986 - protein, 969 aa, Drosophila subpulchrella
MRSQHPDELDDIRRRVDIKARWCEEEKMMMARKEVELTANGVRHINKQLAVFFTNRSVEAIKKLRQRDDYKEKIEQIRGQSALVPEVANLTIRRRPSNSEQNPQVPTSETSPITPLEQSNSGILLALRGYSPVVCPSKWRAQELQTIIDRAQIEGKETTLQCLSAYLQGIFPTQGARRTLTRPARRPRNRRESRRQQYAVIQRNWDKHKGRCIKSILEETDESVMPNQEYMEPYWREVMTQSSPSSCENIVTTPVHSLERVWSAITKRELRTSRVALSSSPGPDGITPKSAKEVPLGVMLRIMNLILWCGKLPRFIRLARTIFIPKTGTAMRPQDFRPISVPSVLVRQLNAILATRLTSSVDWDPRQRGFLPTDGCADNATIVDLVLRSSHKSYRSCYIANLDVSKAFDSLSHASIYNTLKAYGAPKDFVDYVQSSYEVGGTSLCGEGWSSEEFVPARGVKQGDPLSPILFNLVIDRLLRAFPKEIGTKVGTAMTNAAAFADDLVLFAETRMGLQQLLDKTVSYLATVGLTLNADKCFTIGIKGQPKQKCTVLDPHTFQVGLNGCPALKRTNEWKYLGIIFNANGRVKCNPAEDIGPKLQRLSQAPLKPQQKIFALRTVLIPQLYHKLTLGSVTIGVLRKSDKLIRFYVRKWLGLPPDVPIAFVHAPPKCGGLGIPSLRWMAPMLRLRRLSNIKWPHFEQSEVASSFIEEEMQRARVRLLAEQGEMHTRSAIEEYWANRLFVSVDGNGLREAGHYGPQHGWVSQPTRLLTGKEYRDGIKLRINALPTKSRTTRGRHELDRQCRAGCDAPETSNHIMQKCYRSHGRRVARHNCVVNRIKRGLEERGCVVIVEPSLQGESGLNKPDLVVLRPNHIDVIDVQVTNDGHSLDDAHQRKIQRYDTPDIRRELRRKFVATGDIEFHSATINWRGIWSGQSVKRLIAKGLLNKYDSHIISIQVIRGSLGCLTVHVL

SEQ ID NO: 2987 - protein, 978 aa, Drosophila yakuba
MRSRHPDELDEERRRVDIKARWSEEEKWMMARKEVELMANGFKHINKQLAVYFANRSVEAIKKLRQRGDYKEKIEQIRGQSALAPEVANLTIRRRPSRSEQDHQVPTSEASPITPLEQSNREILRTLRGYSPVVCPSKWRAQELQTIIDRAEFEGKETTLQCLSLYLQGIFPVQGVRHTLTRPPRRPRNRRESRRQQYAVIQRNWDKHKGRCIKSLLNGTDESVMPSREFMEPYWREVMTQPSPSSCNGEVIRTDHSLETVWSAITEQDLRASRVSLSSSPGPDGVTPKTAREVPSGIMLRIMNLILWCGNLPHSIRLARTIFIPKTVTAKRPQDFRPISVPSVLVRQLNAILATRLTSSIDWDPRQRGFLPTDGCADNATIVDLVLRHSHKYFKSCYIANLDVSKAFDSLSHAAIYGTLRAYGAPKGFVDYVQKTYEGGGISLNGEGWCSEEFVPARGVKQGDPLSPILFNLVIDRLLRALPSEIGTKVGNAMINAAAFADDLVLFAETRMGLQTLLDKTMDFLSIVGLKLNADKCFTVGIKGQPKQKCTVLEAQSFCVGSREIPTLKRTDEWKYLGIHFTASGRVRCNPAEDIGPKLQRLSEAPLKPQQRLFALRTVLIPQLYHKLSLGSVTIGVLRKTDKLIRFYVRRWLNLPSDVPIAFVHAPPKCGGLGIPSLRWVAPMLRLRRLSNIKWPHLVQSEEASSFIEAEKQRARGRLIAEQNELLSRPAIEKYWANRLYLSVDGGGLREAGHYGPQHGWVSQPTRLLTGKEYLDGIRLRINALPTKSRTTRGRHELERQCRAGCDAPETTNHIMQKCYRSHGRRVARHNCVVNRIKRGLEERGCVVIAEPSLQCESGLNKPDLVVLRQNHIDVIDVQVVTDGHSMDEAHQRKINRYDRPDIRTELRRRFEAAGDIEFHSATLNWRGIWSGQSVKRLIAKGLLSKYDSHIISVQVMRGSLGCFRQFMYLSGFSRDWT

SEQ ID NO: 2988 - protein, 978 aa, Drosophila yakuba
MRSRHPDELDEERRRVDIKARWSEEEKWMMARKEVELMANGFKHINKQLAVYFANRSVEAIKKLRQRGDYKEKIEQIRGQSALAPEVANLTIRRRPSRSEQDHQVPTSEASPITPLEQSNREILRTLRGYSPVVCPSKWRAQELQTIIDRAEFEGKETTLQCLSLYLQGIFPVQGVRHTLTRPPRRPRNRRESRRQQYAVIQRNWDKHKGRCIKSLLNGTDESVMPSREFMEPYWREVMTQPSPSSCNGEVIRTDHSLETVWSAITEQDLRASRVSLSSSPGPDGVTPKTAREVPSGIMLRIMNLILWCGNLPHSIRLARTIFIPKTVTAKRPQDFRPISVPSVLVRQLNAILATRLTSSIDWDPRQRGFSPTDGCADNATIVDLVLRHSHKYFKSCYIANLDVSKAFDSLSHAAIYGTLRAYGAPKGFVDYVQKTYEGGGISLNGEGWCSEEFVPARGVKQGDPLSPILFNLVIDRLLRALPSEIGTKVGNAMINAAAFADDLVLFAETRMGLQTLLDKTVDFLSTVGLKLNADKCFTVGIKGQPKQKCTVLEAQSFCVGSREIPTLKRTDEWKYLGIHFTASGRVRCNPAEDIGPKLQRLSEAPLKPQQRLFALRTVLIPQLYHKLSLGSVTIGVLRKTDKLIRFYVRRWLNLPSDVPIAFVHAPPKCGGLGIPSLRWVAPMLRLRRLSNIKWPHLVQSEEASSFIEAEKQRARGRLIAEQNELLSRPAIEKYWANRLYLSVDGGGLREAGHYGPQHGWVSQPTRLLTGKEYLDGIRLRINALPTKSRTTRGRHELERQCRAGCDAPETTNHIMQKCYRSHGRRVARHNCVVNRIKRGLEERGCVVIAEPSLQCESGLNKPDLVVLRQNHIDVIDVQVVTDGHSMDEAHQRKINRYDRPDIRTELRRRFEAAGDIEFHSATLNWRGIWSGQSVKRLIAKGLLSKYDSHIISVQVMRGSLGCFRQFMYLSGFSRDWT

SEQ ID NO: 2989 - protein, 754 aa, Drosophila yakuba
MPSREFMEPYWREVMTQPSPSSCNGEVIRTDHSLETVWSAITEQDLRASRVSLSSSPGPDGVTPKTAREVPSGIMLRIMNLILWCGNLPHSIRLARTIFIPKTVTAKRPQDFRPISVPSVLVRQLNAILATRLTSSIDWDPRQRGFSPTDGCADNATIVDLVLRHSHKYFKSCYIANLDVSKAFDSLSHAAIYGTLRAYGAPKGFVDYVQKTYEGGGISLNGEGWCSEEFVPARGVKQGDPLSPILFNLVIDRLLRALPSEIGTKVGNAMINAAAFADDLVLFAETRMGLQTLLDKTVDFLSTVGLKLNADKCFTVGIKGQPKQKCTVLEAQSFCVGSREIPTLKRTDEWKYLGIHFTASGRVRCNPAEDIGPKLQRLSEAPLKPQQRLFALRTVLIPQLYHKLSLGSVTIGVLRKTDKLIRFYVRRWLNLPSDVPIAFVHAPPKCGGLGIPSLRWVAPMLRLRRLSNIKWPHLVQSEEASSFIEAEKQRARGRLIAEQNELLSRPAIEKYWANRLYLSVDGGGLREAGHYGPQHGWVSQPTRLLTGKEYLDGIRLRINALPTKSRTTRGRHELERQCRAGCDAPETTNHIMQKCYRSHGRRVARHNCVVNRIKRGLEERGCVVIAEPSLQCESGLNKPDLVVLRQNHIDVIDVQVVTDGHSMDEAHQRKINRYDRPDIRTELRRRFEAAGDIEFHSATLNWRGIWSGQSVKRLIAKGLLSKYDSHIISVQVMRGSLGCFRQFMYLSGFSRDWT

SEQ ID NO: 2990 - protein, 978 aa, Drosophila suzukii
MRSQHPDELDDIRRRVDIKARWCEEEKMMMARKEVELTANGIKHINKQLAVFFTNRSVEAIKKLRQRDDYKEKIEQIRGQSALVPEVANLTIRRRPSNSEQNPQVPTSETSPITPLEQSNSGILLALRGYSPVVCPSRWRAQELQTIIDRAQIEGKETTLQCLSAYLQGIFPTQGARRTLTRPARRPRNRRESRRQQYAVIQRNWDKHKGRCIKSILEETDESVMPSREFMEPYWREIMTQPSPSSCDDIVTTPVHSLERVWSAITKRELRASAVALSSSPGPDGITPKSAKEVPSGIMLRIMNLILWCGKLPRFIRLARTIFIPKTGTAMRPQDFRPISVPSVLVRQLNAILATRLTSSVDWDPRQRGFLPTDGCADNATIVDLVLRSSHKSYRSCYIANLDVSKAFDSLSHASIYNTLKAYGAPKDFVDYVQSSYEVGGTSLCGEGWSSEEFVPARGVKQGDPLSPILFNLVIDRLLRAYPKEIGTKVGTAMTNAAAFADDLVLFAETRMGLQQLLDKTVSYLATVGLTLNADKCFTIGIKGQPKQKCTVLDPHTFRVGLNGCPALKRTNEWKYLGIIFNANGRVKCNPAEDIGPKLQRLSQAPLKPQQKIFALRTVLIPQLYHKLTLGSVTIGVLRKSDKLIRFYVRKWLDLPPDVPIAFVHAPPKCGGLGIPSLRWMAPMLRLRRLSNIKWPHFEQSEVASSFIEDEMQRARVRLLAEQNEMLTRPAIEEYWANRLFVSVDGNGLREAGHYGPQHGWVSQPTRLLTGKEYRDGIKLRINALPTKSRTTRGRHELDRQCRAGCDAPETSNHIMQKCYRSHGRRVARHNCVVNRIKRGLEERGCVVIVEPSLQGESGLNKPDLVVLRPNHIDVIDIQVTNDGHSLDDAHQRKIQRYDTPDIRRELRRKFVATGDIEFHSATINWRGIWSGQSVKRLIAKGLLNKYDSHIISIQVIRGSLGCFRQFMYYGGYSRGWT

SEQ ID NO: 2991 - protein, 978 aa, Drosophila suzukii
MRSQHPDELDDIRRRVDIKARWCEEEKMMMARKEVELTANGIKHINKQLAVFFTNRSVEAIKKLRQRDDYKEKIEQIRGQSALVPEVANLTIRRRPSNSEQNPQVPTSETSPITPLEQSNSGILLALRGYSPVVCPSRWRAQELQTIIDRAQIEGKETTLQCLSAYLQGIFPTQGARRTLTRPTRRPRNRRESRRQQYAVIQRNWDKHKGRCIKSILEETDESVMPNREFMEPYWREIMTQPSPSSCDDIVTTPVHSLERVWSAITKRELRASAVALSSSPGPDGITPKSAKEVPSGIMLRIMNLILWCGKLPRFIRLARTIFIPKTGTAMRPQDFRPISVPSVLVRQLNAILATRLTSSVDWDPRQRGFLPTDGCADNATIVDLVLRSSHKSYRSCYIANLDVSKAFDSLSHASIYNTLKAYGAPKDFVDYVQSSYEVGGTSLCGEGWSSEEFVPARGVKQGDPLSPILFNLVIDRLLRAYPKEIGTKVGTAMTNAAAFADDLVLFAETRMGLQQLLDKTVSYLATVGLTLNADKCFTIGIKGQPKQKCTVLDPHTFRVGLNGCPALKRTNEWKYLGIIFNANGRVKCNPAEDIGPKLQRLSQAPLKPQQKIFALRTVLIPQLYHKLTLGSVTIGVLRKSDKLIRFYVRKWLDLPPDVPIAFVHAPPKCGGLGIPSLRWMAPMLRLRRLSNIKWPHFEQSEVASSFIEDEMQRARVRLLAEQNEMLTRPAIEEYWANRLFVSVDGHGLREAGHYGPQHGWVSQPTRLLTGKEYRDGIKLRINALPTKSRTTRGRHELDRQCRAGCDAPETSNHIMQKCYRSHGRRVARHNCVVNRIKRGLEERGCVVIVEPSLQGESGLNKPDLVVLRPNHIDVIDIQVTNDGHSLDDAHQRKIQRYDTPDIRRELRRKFVATGDIEFHSATINWRGIWSGQSVKRLIAKGLLNKYDSHIISIQVIRGSLGCFRQFMYYGGYSRGWT

SEQ ID NO: 2992 - protein, 948 aa, Drosophila teissieri
MMARNEAELTANGFKHINKLLAVYFANRSGEAIKKLRQRGDYKEKIEQIRGQSALAPEVANLTIRRRPSRSEQDHQVPTSEASPITPLEQSNREILRTLRGYSPVVCPSKWRAQELQTIIDRAEFEGKETNAYRSTSREFFPVQGVRHTLTRPPRRPRNRRESRRQQYAVVQRNWDKHKGRCIKSLLNGTDESVMPSQEFMEPYWREVMTQPSPSSCNGEVIRTDHSLETVWPAITEQALRASRVSLSSSPGPDGVTPKTDREVPSGIMLRIMNLILWCGNLPHSIRLARTIFIPKTVTAKRPQDFRPISVPSVLVRQLNAILATRLTSSIDWDPRQRGFLPTDGCADNATIVDLVLRHSHKYFKSCYIANLDVSKAFDSLSHAAIYGTLRAYGAPKGFVDYVQKTYEGGGISLNGEGWCSEEFVPARGVKQGDPLSPILFNLVIDRLFRALPSEIGTKVGNAMINAAAFADDLVLFAETRMGLQTLLDKTMDFLSIVGLKLNADKCFTVGIKGQPKQKCTVLEAQSFCVGSREIPTLKRTDEWKYLGIHFTASGRVRCNPAEDIGPKLQRLSEAPLKPQQRLFALRSVLIPQLYHKLSLGSVTIGVLRKTDKLICFYVRRWLNLPSDVPIAFVHASSKCGGLGIPSLRSVAPMLRLRRLSNIKWPHLVQSEEASSFIEAEKQRARGRLIAEQNELLSRPAIEKYWANRLYLSVDGGGLCEASHYGPQHGWVSQPTRLLTGKEYLDGIRLRINALPTKSRTTRGRHELERQCRAGCDAPETTNHIMQKCYRSHGRRVARHNCVVNRIKRGLEERGCVVIAEPSLQCESGLNKPDLVVLRPNHIDVIDVQVVTDGHSLDEAHQRKINRYDRPDIRTELRRRFEAAGDIEFHSATLNWRGIWSGQSVKRLIAKGLLSKYDSHIISVQVMRGSLGCFRQFMYLSGFSRDWT

SEQ ID NO: 2993 - protein, 892 aa, Drosophila teissieri
MTLLRRRRRPSRSEQDHQVPTSEASPITPLEQSNREILRTLRGYSPVVCPSKWRAQELQTIIDRAEFEGKETTLQCLSLYLQGIFPVQGVRHTLTRPPRRPRNRRESRRQQYAVIQRNWDKHKGRCIKSLLNGTDESVMPSREFMEPYWREVMTQPSPSSCNGEVIRTDHSLETVWSAITEQDLRASRVSLSSSPGPDGVTPKTAREVPSGIMLRIMNLILWCGNLPHSIRLARTIFIPKTVTAKRPQDFRPISVPSVLVRQLNAILATRLTSSIDWDPRQRGFLPTDGCADNATIVDLVLRHSHKYFKSCYIANLDVSKAFDSLSHAAIYGTLRAYGAPKGFVDYVQKTYEGGGISLNGEGWCSEEFVPARGVKQGDPLSPILFNLVIDRLLRALPSEIGTKVGNAMINAAAFADDLVLFAETRMGLQTLLDKTMDFLSIVGLKLNADKCFTVGIKGQPKQKCTVLEAQSFCVGSREIPTLKRTDEWKYLGIHFTASGRVRCNPAEDIGPKLQRLSEAPLKPQQRLFALRTVLIPQLYHKLSLGSVTIGVLRKTDKLIRFYVRRWLNLPSDVPIAFVHAPPKCGGLGIPSLRWVAPMLRLRRLSNIKWPHLVQSEEASSFIEAEKQRARGRLIAEQNELLSRPAIEKYWANRLYLSVDGGGLREAGHYGPQHGWVSQPTRLLTGKEYLDGIRLRINALPTKSRTTRGRHELERQCRAGCDAPETTNHIMQKCYRSHGRRVARHNCVVNRIKRGLEERGCVVIAEPSLQCESGLNKPDLVVLRQNHIDVIDVQVVTDGHSMDEAHQRKINRYDRPDIRTELRRRFEAAGDIEFHSATLNWRGIWSGQSVKRLIAKGLLSKYDSHIISVQVMRGSLGCFRQFMYLSGFSRDWT

SEQ ID NO: 2994 - protein, 1028 aa, Drosophila mauritiana
MNLNNLMTTRPSVDIFPEDQYEPNAAATLSRVPCTVCGRSFNSKRGLGVHMRSRHPDELDEERRRVEIKARWSEEEKWMMARKEVELTANGHKHINNQLAVYFANRSVEAIKKLRQWGDYKEKIEQIRGQSARVPEVANLTIRRRPSRSVQNHQVTTSETTPITPFEQSNREILRTLRGYSPVECHSKWRAQELQTIIDRAELEGKETTLQCLSLYLLGIFPAQGVRHTLTRPPRRPRNRRESRRQQYAVTQRNWDKHKGRCIKSLLNGTDESVMPSQEVMVPYWREVMTQPSPSSCSGEVIQMDHSLERVWSAITEHDLRASRISLSSSPGPDGITPKTAREVPSGIMLRIMNLILWCGNLPHSIRLARTVFIPKTVTAKRPQDFRPISVPSVLVRQLNAILATRLNSSINWDPRQRGFLPTDGCADNATIVDLVLRHSHKHFRSCYIANLDVSKAFDSLSHASIYDTLRAYGAPKGFVDYVQNTYEGGGTSLNGDGWSSEEFVPARGVKQGDPLSPILFNLVMDRLLRNLPSEIGARVGNAITNAAAFADDLVLFAETRMGLQVLLDRTLDFLSLVGLKLNADKCFTVGIKGQPKQKCTVLEAQSFYVGSREIPSLKRTDEWKYLGINFTATGRVRCNPAEDIGPKLQRLTKAPLKPQQRMFALRTVLIPKLYHKLALGSVAIGVLRKTDKLIRYYVRRWLNLPLDVPIAFIHAPPKSGGLGIPSLRWVAPMLRLRRLSNIKWPHLTQNEVASSFLEAEKQRARDRLFAEQNELLSRPAIEKYWANKLYLSVDGSGLREAGHWGPQHGWVNQPTRLLTGKEYIDGIRLRINALPTKSRTTRGRHELERQCRAGCDAPETTNHIMQKCYRSHGRRVARHNCVVNRIKRGLEERGCVVIVEPSLQCESGLNKPDLVALRQNHIDVIDIQIVTDGHSMDDAHQRKINRYDRPDIRTELRRRFEAAGDIEFHSATLNWRGIWSGQSVKRLIAKGLLSKYDSHIISVQVMRGSLGCFKQFMYLSGFSRDWT

SEQ ID NO: 2995 - protein, 754 aa, Drosophila suzukii
MPNREFMEPYWREIMTQPSPSSCDDIVTTPVHSLERVWSAITKRELRASAVALSSSPGPDGITPKSAKEVPSGIMLRIMNLILWCGKLPRFIRLARTIFIPKTGTAMRPQDFRPISVPSVLVRQLNAILATRLTSSVDWDPRQRGFLPTDGCADNATIVDLVLRSSHKSYRSCYIANLDVSKAFDSLSHASIYNTLKAYGAPKDFVDYVQSSYEVGGTSLCGEGWSSEEFVPARGVKQGDPLSPILFNLVIDRLLRAYPKEIGTKVGTAMTNAAAFADDLVLFAETRMGLQQLLDKTVSYLATVGLTLNADKCFTIGIKGQPKQKCTVLDPHTFRVGLNGCPALKRTNEWKYLGIIFNANGRVKCNPAEDIGPKLQRLSQAPLKPQQKIFALRTVLIPQLYHKLTLGSVTIGVLRKSDKLIRFYVRKWLDLPPDVPIAFVHAPPKCGGLGIPSLRWMAPMLRLRRLSNIKWPHFEQSEVASSFIEDEMQRARVRLLAEQNEMLTRPAIEEYWANRLFVSVDGHGLREAGHYGPQHGWVSQPTRLLTGKEYRDGIKLRINALPTKSRTTRGRHELDRQCRAGCDAPETSNHIMQKCYRSHGRRVARHNCVVNRIKRGLEERGCVVIVEPSLQGESGLNKPDLVVLRPNHIDVIDIQVTNDGHSLDDAHQRKIQRYDTPDIRRELRRKFVATGDIEFHSATINWRGIWSGQSVKRLIAKGLLNKYDSHIISIQVIRGSLGCFRQFMYYGGYSRGWT

SEQ ID NO: 2996 - protein, 990 aa, Scaptomyza hsui
MPRINLIDPLTTTSPMVSSLGGQHEPDAAATSVPSGLCTICGRSFRGERGLGVHMSRQHKDAFDEMRLRVDVKLRWSEEETWMMARKEVELAANGRRNINQQLAEVFTHRSVEAIKMARQRGDYRQKVEQIRGQSAPTPEVAEITIMRRPSLCELDPPVSTSEASPIIPFEQPNMEILQVLRSYRRVECDPRWRAQTLQSIIDSAQEEGKAATLHRLSLYLLEVFPAVTRPVNARPPRRPRNRRESRRQQFASTQRNWDKHKGRCIKTLLNGNDESVMPNQEYMVPYWREVMTQPSPSYVVNNAVLQPEHSLARVWSAISVQDLRATKVSLSSSPGPDGISPRTARSIPTGIILRIYNLILWCGNLPQSIRLARTIFIPKTVTANRPQDYRPITVSSVLVRQLNAILASRLTSSINWDARQRGFLPTDGCADNATMVDLILRNSHKSSLSTYIATLDVSKAFDSVSHAAVYNTLTAYGAPKEMVDYIQKTYEGGGTTLNGEGWRSEVFVPARGVKQGDPLSPVLFNMIIDQLLRALPNEIGVKIGNAMTNAAAFADDLVLFAETPMGLQKLLDLTVSFLGTVGLKLNADKCFTVSIKGQPKQKKTVVIQQSFRIGQIACPALKRTDEWKYLGIRFNADGRVRYNPAEDLGPKLLRLTRAPLKPQQKLFALRNVLIPQFFHKLTLGSVTIGVLRKFDKLVRFYVRRWLGLPLDVCVAFFHAPPKSGGLGIPSVRWIAPLQRLRRLSNLKWPHLEQSEVASSFVEEELRRVRVRLLAGNTQLHTRTEVETYWANRLHMSVDGSGLREAGQFGPQHGWVSQPTRLLTGKEYRSGIQLRINALPSKSRTTRGRHELDRQCRAGCRASETTNHGRRVARHNSVVNFLKRGLEEKGCVVIAEPSLQCESGLSKPDLVALRNNIIHVIDAQGVKDGNPKKKKPQQKKKKKKKKKKKKKRGGGDGGGLVASSSTQPLLTGGWSVEWSIGKRIDCEKPP

SEQ ID NO: 2997 - protein, 1032 aa, Scaptomyza hsui
MPRINLIDPLTTSSPTVSSLGGQHEPDAAATSVPSGLCTICGRSFRGERGLGVHMSRQHKDAFDEMRLRVDVKLRWSEEETWMMARKEVELAANGRRNINQQLAEVFTHRSVEAIKKARQRGDYRQKVEQIRGQSAPTPEVAEITIMRRPSLCELDPPVSTSEASPIIPFEQPNMEILQVLRSYRRVECNPRWRAQTLQSIIDSAQEEGKETTLHRLSLYLLEVFPAVTRPVNARPPRRPRNRRESRRQQFASTQRNWDKHKGRCIKTLLNGNDESVMPNQEYMVPYWREVMTQPSPSYVVNNAVLQPEHSLARVWSAISVQDLRATKVSLSSSPGPDGISPRTARSIPTGIILRIYNLILWCGNLPQSIRLARTIFIPKTVTANRPQDYRPITVSSVLVRQLNAILASRLTSSINWDARQRGFLPTDGCADNATMVDLILRNSHKSSLSTYIATLDVSKAFDSVSHAAVYNTLTAYGAPKEMVDYIQKTYEGGGTTLNGEGWRSEVFVPARGVKQGDPLSPVLFNMIIDQLLRALPNEIGVKIGNAMTNAAAFADDLVLFAETPMGLQKLLDLTVSFLGTVGLKLNADKCFTVSIKGQPKQKKTVVIQQSFRIGQIACPALKRTDEWKYLGIRFNADGRVRYNPAEDLGPKLLRLTRAPLKPQQKLFALRNVLIPQFFHKLTLGSVTIGVLRKFDKLVRFYVRRWLGLPLDVCVAFFHAPPKSGGLGIPSVRWIAPLQRLRRLSNLKWPHLEQSEVASSFVEEELRRVRVRLLAGNTQLHTRTEVETYWANRLHMSVDGSGLREAGQFGPQHGWVSQPTRLLTGKEYRSGIQLRINALPSKSRTTRGRHELDRQCRAGCRASETTNHILQQCYRTHGRRVARHNSVVNFLKRGLEEKGCVVIAEPSLQCESGLSKPDLVALRNNIIHVIDAQVVTDGHSIDEAHQRKIDRYDRLDIRTELRRRFGAACGIEFHSATLNWRGIWSGQSVKGLIAKNLLSKGDSNIISVRVLSGGTYCFRQFMYLCGYTRDWT

SEQ ID NO: 2998 - protein, 1302 aa, Ips nitidus
MDADKNDSQSSTGETGSDLSLTQMTTGPSNSGTQAQVKTTILPYRCHKCGKRYQTKCGLAKHAKDCDKTQRRKCNYCDKEFDTFLKLRAHESKTHNASYLADEEANLKPSEATLFAQIAEIEAKRAGKNYLSEIVQLTGLSKDQIRHRRDKPEYKEYLKMAKERIGQNTEAPSQRSYDKIFPSARATPPSQQATGTPRLQTPRLSLQGSSSILLGDSGDDLFVTPRTSLGPAPRPRQTDLKSTTAGSSNAVKPGNCTSNKLAKASLAKGFMKLGAFLAKNTKAKATPHEETGGEEKFATPPTSPVATTSTGISAAADASLANATAEKGTIINVISMVTIPAAGRQPAEDVATQLLGGQKRRRETEISPETALLSQPRKKQLLTRVEPEERPTMAHTSSQETPDTNTTIRSSQPALAPSYIEANGNSGPERLKLWIQNYILDQTARPQTERDLEGIKLAKMALTGNETTLKTTLEEWISIKFKPASNRQQKGSTQKSTANARSGTVKNYGQTNTGRGRRAENYKKAQDLYGKNRASLAAAILAGKPFDQDEQTPNVEEVELFFGGILEQPSYEDLDPIEDQKRADGETDQPFECEEIVMGKDGWSPTAPGPDGITVNSVKAHDNTSLSLLFNCILYRNCMPQSWKTSRTTLIYKDGDRKDPANYRPITVSSALMRLLHRLIARRIKHVISPSMNQRGFTNIDGTLANTIIAQHYIRNRIEDRKSYNVLSLDLCKAFDSVNQGAVIRALKRIGVSAHMVRYVNNALNEATTTIKVGNNFTRELKVSRGVKQGDPLSPILFNLVVDELICKLEKTGRGGTLGDGVKCSALAFADDLVILEDREVDLPLDINLVQNFCAKKGMTINARKSSVITGALVPRGGKVVPRTKAFLDCGGNLIRQATDFEPTKYLGHQLGASGLLKPSIKNLSTWLQNIGRAPLKPEQKLQLLKTYAIPKVLYGLQQPKITGRILREADRLVRHFVKKNMHLNIHTPDAAIHAKIKDGGLGVSSLRNTIPQIFMGRLKNLIAVEQDTCLRFVMMHDSSRQLMNRLTTLCGAEPGDLHYAGKIKQSPLLKGMECASEDASSRSWIDHKPNGWTGRDYVRAVQLRSANLPTAGLPSNPADQRQCRAGCAKVETICHVLQGCPSTHWERIRRHNEIAKKLSKHCKNKKWQVLDEPHFRHADGTLFKPDLVVSIDTNTLVVSDVQVVWEGDIGLGVMHANKKHKYEHDIKFTEAISLKFPDKNIIHAPVTLGARGIWPRCNSETEDLLQLTRGFKESCVASTLKWGSSIHAAFSKKTWRARQTR

SEQ ID NO: 2999 - protein, 1142 aa, Ebrietas anacreon
MADLENPQPVVLVEGNNFVVLLPITTDRHIQCPLCTRSGSFKGVRKIEKFARHCKDSHAAMAIVYRCSGCGFVAPEGKRYPRKVVTQHCSTCVPTVTPTPSGNDRERRMAIRQRLGTAPPPCRQETESAGPPAVAELTPEPEAPQQPGEVGEPTTHETGPDVVTETSPSPPTPPAIQVSLEMNETRALPRTGASQSPSVTHTAARGPTPEQRLLVEELDAVSDGDALNEAAVRAAQFFGRLREATMSTDGPGRAHPRRGHGSSRRLNVTEEATRLQSLYRRDRKKAVRNILSGPTETCRLPPDVVENHFRTLAAPKTGLDDWPEVLGQVPPTADSNGRLSESLTRREVYRKLKSRQNTSPGPDGLSYSDLKRADPGAHVLTSLYNAVLRVEVVPDCWKESITVLIHKKGDPTDIGNWRPIALGNTCAKLFASLLADRVKRWATYNHRLSDSQKGFLPYEGCHEHNFVLQEAIRFARDNKRELVVVWLDLASAFTSVPHSSIFRALEGHGMPERAIKIIKSLTVGGKTRIRVGNTFTQPILLQSGVRQGCPLSPDIFNLTLEVVLRELARSGVGFDMDGERISNLAYADDVALLADSADGMRQLLLAAERAAHAVGLKFNSAKCAALHVVGGGEDGAIETQFFIEGRPIRSLKPGEAYEHLGVPTGVQVRQTPVSTIAHMITDAKKIDEAPLAPWQKLDAISTFVLPCLDFILRGSTVEKEYLREADRFFRKLAKKWMSLPERASAEIVFLPPGQGGAGLLPLTDLYDVHRVTHAFKMLTSSDPTVANIAKGELRHTVTERLRRPPNGIEVAHYLSGASDIPRSSGRGSFWTGIRKSSTALAQRLRWIWCEETRSLLIRLANGITITPGERRMLYRQLRLGLTRHYGQRLVDKPDQGKAIEATRESRYANHFLRTGRNTRFCDWRFIHRARLGVLPLNAAKRWQMGRDKRCRMCGYESETLPHVINHCGVHSAARQLRHDSIVDRLVKAVRRPGVVTTNRTVEGTSGAMNALRPDIVIRDEVSKKVAIIDVAVPFENRLRALYETKQAKMAKYAPLAEQLRAQGYRVTVDAFVVGSLGAWDRGNERVLERLKVHRFYAALMRRLMVSDTIRWSRDIYVEHVTGVRQYEASQPHERRVASEATT

SEQ ID NO: 3000 - protein, 1156 aa, Cycloglypha thrasibulus
MADPESPQPVVLVDGSDFVVLLPINTDRHIQCPLCTRSGSFKGVRKIENFARHCKDSHPTMAIIYKCSGCGFTAPEGKRYPRKIVTQHCSTCVPTVTPGPSGNDRERRMAIRQRLGTAPPSNSSPCRDETEPAGPPTVAESIPEPEATPQPTETGGTTAHNVTTIAHEVAPDNLPELAPSPLTPPEVQVPQMERNGTRSPSTAGANQGPPVTHIAARGPSPEQRLLVEELDGVSDRDALNEAASRAAQFLGRLKEAIQSSDRPSRAQPRRGHTSGRRTNITEEATRLQRLYRRDRKKAVRNILSGPTEACQIPLEVVEDHFRALAAPKLGGDDWPDVFGQAPPTADSNLRLSESLSRREVIRKLKSRLNTSPGPDGLSYSDLKRADPGAHVLASLYNAVWRVEVIPDCWKESTTVLLHKKGDPTEIGNWRPIALGNTCAKLFASLLADRVKRWATVNHRLSDSQKGFLPYEGCHEHNFVLQEAIRSVKDGRKELVVVWLDLASAFTSVPHPSIFRSLEGHGMPAKAVNLIESLTVGNRTRIRVGNSFTQPILLQAGVRQGCPLSPDIFNLTLEVVLRELARSGVGYELGGERISSLAYADDIALLADSADGMRQMLRSAERAAHAVGMKFNPAKCAALHMTGGGEDDVLETQFLIEEQPIRCLQPGEAYEHLGVPTGQQVRQTPVKAIADIISDAKKIDEAPLAPWQKLDAVSTFVLPCLDFILRGGVVEKEYLREADRMLKKLAKSWMSLPQRASPEIVFLPPGQGGAGLLPLADLYDIHTVTHAFKMLTASDPLVSNIAKSGLRKTVSDRLRRPPSGIDVAQYLSGASDIPRSSARGSFWSVVRKSATALAQKLGLRWIWCCETSSLSVRLASGTTVTPADRHMLYRRLRLGIIHYYGQRLVDKPDQGKVVEVTRESRYANHFLRTGRNTRFCDWRFIHRARLGVLPLNAAKRWQVGRDKRCRMCGHELETLPHVINHCGVHSAARQLRHNNIVDRLVKAVRRPGTISVNRTVEGSGGEVNFLRPDIVIRDEGAKQIAIIDVAVPFENRVRAMYNTKQAKLAKYAPLAEQLRAQGYRVTVDAFVVGSLGAWDRGNERVLELLKVNKYYAALMRRLMVSDTIRWSRDIYVEHVTGVRQYEAPQPHGRQQISESTS

SEQ ID NO: 3001 - protein, 1140 aa, Camptopleura auxo
MADPETNQPAVLVEGSNFAVLLPIATDRHIQCPLCTRSGSFKGVRKIENFARHCKDSHATMAIVYRCGGCGFTAPEGKRYPRKVVTQHCSVCVPSVTPVPSGNDRERRMAIRRRLGTAPPPNSTPCPQETESVEVPAVDEPVGEPGAPSQPTGTVETSAHDLAATVAQEVTPRDFSETSRSPPPPAEAHLSETQPPSMVEVRQSPPARTHTTARNPTPEQRRLIEELDAVADGEALNELAKRVAQFLGRLREAVSATDGVPRATSRRGHGSGRRLNEVEEATRLQRLYRRDRRKAMRHILSGPAEACRIPVVEVESHFRALAAPKTGRDDWPDVLGPVHPTAESNYRLTESLSRREVYRKLKSRLNTSPGPDGLCYSDLKRADPGAHVLTSLYNAVWRVEVTPDCWKESTTVLIHKKGDPTDIGNWRPIALSNTCAKLFASLLADRVKRWATCNHRLSDSQKGFLPYEGCHEHNFVLQEAIRSARDGKRELVVVWLDLASAFTSVPHSSIFRALEGHGMPQKAMNVIKSLTIGAKTCIRVENTYTQPILLQAGVRQGCPLSPDIFNLTLEVVLRELARSGVGFSLGGERISNLAYADDIALMADSADGMRQLLVAAERAAHAVGLTFNSAKCAALHVAGGGEEGVLETQFLVEGQPVRCLKSGEAYEHLGVPTGEQVRQTPVNTIAQIIADAKKIDEAPLAPWQKLDAVGTFILPCLDFILRGSTVEKEYLREADRMIKKLAKSWMSLPQRASPEIVFLPPGQGGAGLLPLADLYDVHTVTHAFKMLTALDPLVSNIAKSGLRKTVSERLRRPPSGIDVAQYLSGASDIPRSSARGSFWSGVRKSATALAQKLGLRWIWCGATSSLLIRLANGTTVTPANRRMLYRQLRLGLVHHYGQRLVDKPDQGKVVEVIRESRYANHFLRTGRNTRFCDWRFIHRARLGVLPLNAAKRWQVGRDKRCRMCGHELETLPHVLNHCGVHSAARQLRHDNIVNRLVKAVRRPGTVSVNRTVEGCGGEVNSLRPDIVIRDEGAKQVAIVDVAVPFENRVRAMHDTKQAKLAKYAPLAEQLRAQGYHVTVDAFVVGALGAWDRGNERVLGRLRVNRFYAALMRRLMVSDTIRWSRNIYVEHVTGVRQYESS

SEQ ID NO: 3002 - protein, 1135 aa, Gorgythion begga
MMADQLNPQSFIIVEEGSFVVLLPITAEQHLQCPLCTRSGSFKGVRKIENFARHCKDSHAGMCIIYKCGGCGFTAPEGKRYPRKVVSQHCATCIPSVTPTPSGSDRQRRLNIRRRLGTAPPLNTSPSSEPRVPAEPPTVAEIEELGTPPRIIVTEEDETPMPESPPALGVPSVVPPPMPPNPPRQSNETQTPPLGDLIQNRLDARTPARGPTPEQRLIIEQLEAVSDVVTLNEVAKRVAQFMGRLKEAIPATGESNRTLPPRGHGSGRQLSGIEEATRLQRLYRRDRKKAMRQILSGPALTCSVPINEVESHFRALASPRSGRNDWSDVLRQDPPSPESNRRLTETLNRSEVLRKLKSRLNTSPGPDGLTYPDLKRADPGAHVLTALYNTVWRIEAVPDCWKESTTILIQKKGDPADMGNWRPIAMGNTSAKLFASLLADRVKRWATTNHRLSDSQRGFLPYEGCHEHNFVLQEAIRSARADKRELVVVWLDLASAFSSVPHSSIYRALEGHGMPEKAKNVIRAMNTGSTTRVRLGRTYTQPILLQAGVKQGCPLSPDVFNLTLEVVLRELKRTGVAFELNGEKISNLAYADDIALLADSADGMKQLLLAAERAAQAVGLSFNSTKCAALHIPGDGGEEVLDSQFLVEGHAIRSLKTGEAYEHLGVPTGLQVRQTPINLIADIVADVRRIDESLLAPWQKLDAVGTFVLPCMDFILRGGTVEKEYLREADRFIKKTAKKWMSLPERASPEIVFLPPAQGGAGLLPLADLYDVHTITHAFKMLTSPDPVVNSIAQSELRRTVSARLKKLPTGDEVAQYLSGGSDIPRSSGRGSFWTIARKSTTGLVKKLGLRWIWCGETRSLSICLASGATVTPADRRTLYRQLRQCLTRHYGQKLVDKPDQGKAIEVTSESRHANHFLRTGRNTRFCDWRFIHRARLGVLPLNAAKRWQSGMDKRCRRCGHELETLPHVINHCGVHAAARQLRHNNIVDRLVKAARRPGTISVNSTVEGSSGEVGSLRPDIVIRDEGAKQIAIVDVAVPFENRAQAMYATKQMKLQKYGPLAEQLRAQGYRVTVDAFVVGSLGAWDRGNERVLQRLMVGRFYAGLMRRLMVSDTIRWSRDIYVEHVTGVRQYQTA

SEQ ID NO: 3003 - protein, 1136 aa, Chiomara georgina
MADLLSLQPIIAVEGDSFVVLLPIATDRHLQCPLCTRSGSFKGVRKVENFARHCKDSHAGMGILYKCGGCGFTAPEGKRYPRKIVMQHCTGCVPSVASVPSGNDRERRLNIRRRLGTAPPPDNSAAPAISAEPTTEIESSVEPVTPPQSQALDRAAPDTPQTLGELNVSPVRGPQTPPGHQNPPLEPSENTAPTTGGPSQVPPDTRPRALITSPTPEQRLLIDELKEVSDEQRLNEVAERVVQFLGRLKETTPATDPARPRRAHRPESRQPSEIEEATRLQRLYRRDRRKAMRHILSGPAESCHIPVEAVESHFRALAAQRNCTNDWPDVLGQVPPTPDSDRRLSEPLTRSEVFKKLKTRLNTSPGPDGLTYTDLKKADPGAHVLTALYNTAWRLEIVPDCWKESTTVLIHKKGDPKDMGNWRPIAMGNTCCKLFASLLADRVKRWATANHRLSDSQKGFLPYEGCQEHNFVLQEAIRNAALNKKELVVVWLDLASAFTSVPHSSIHRALEGHGMPDKARNIIKAMTTGSRTRVRVGGCFTQPILLEAGVRQGCPLSPDIFNLTLEVVLREVKQSGVGFEFDGVSVSNLAYADDIALLANSAEGMKQLLLAAERAARAVGLSFNPAKCAALHMPGGGGDEALDTSFVVEGRAIRCLKTGEAYEHLGVPTGMQVRQTPVKAIADIIADVQKIEASPLAPWQKLDAVGTFVLPCLDFLLRGGTIEKEYLREADRIIKKMAKRWMSLPGRASPEIVFLPPAQGGAGLLPLTDLYDVHTVTHGFKMLTASDPAVSNIAQSELRKTVSDRLRRPPTGDDVAQYLSGSSDFPRSSGRGSFWTQVRKSVAALTQKLGLRWIWCEATRSLSIRLANGAFVTPADRRSLYRQLRMGLTGYYGRKLLDKPDQGKVMEVTSGSRHSNHFLRTGRNTRFCDWRFIHRARLGVLPLNAARRWQSGMDKRCRRCGHELETLPHVINHCGVHSAARQLRHNNVVDRLVKAARCPGTISVNCTVEGSSGESQSLRPDIVIRDEGAKRVAIVDVAVPFENRAPAMYATKQAKLEKYTPLAEQLRAQGYAVTVDAFLVGSLGAWDRGNERVLHRLMVGRFYSGLMRRLMISDTIRWSRDIYVEHVTGVRQYRTS

SEQ ID NO: 3004 - protein, 1169 aa, Sostrata bifasciata
MADQNNPRPVILVEGDQFVVLLPIGADRHIQCPLCTRSGSFKGIRKIENFVRHRRDSHATMGLTYRCGGCGVTAPERKRYPRKVVTQHCSVCVPTVAAVPSGNDRERRIGIRRRLGILPPPVRSSTSDPSSEAANESNAAAESVEVEPPMQSEEANGLSLSAPRDTPVNPPSEVRLSGQCPGTQRVSLEPANTAASQHSESFHLRLVPPTPEPLPLEPIGSVNMSSNGASQAPLIGNTGTGIGKPTPEQCRLMGELDSVSEREALNEIAQRVARFLGRLKECTPAEEETGRDSRRQYHGSRRQLSETEEATRLQRLYRGNRKKAMRHILSGPPATCQIAIEQVEAHFRILAAPRTGSDTWPEILNQTPPTASSNVKLCRPFSRNEVRRKLKGRTNTSPGPDGLTYADLKKADPGAYVLTSLYNAVWRVESIPDCWKESTTVLIHKKGDIKDIGSWRPIALGNTCPKLFASLLAARLKWWATTNKRISNSQKGFLPYEGCHEHNFVLQEAIRSASVAKKELVVVWLDLANAFSSVPHSSISRALVGHGLPGKVGSLVESMNEGGATRVRVGNAYTEPILLLAGVKQGCPLSSDIFNLTLEVVLRELARTGEGFDISGAKISNLAYADDIALLADSADGMRRLLLAAEGAAHLMGLQFNPAKCASLHLSGGHQETLSTEFHIEGQPVRCMRTGEAYEHLGVPTGWQVRQTPIAAIADIVADAHKIDESLLAPWQKLDAVSTFVLPCMDFILRGGVVEKEYLHEADKIIKKLAKKWMSLPKRASPEIVSLPPAQGGAGLLPLADLYDVHTVTHGFKMLTASDPVVSGIARHELRRTVSQRCKSDRPSGADVAQYLSGDADLPRSSSRGSFWTSVRKSSSALKHKLGLQWTWCGETRELRISLANGTILSPSDRRLLFRQLRQGLIRHYGQKLIAKTDQGKVIEVTRESRHANHFLRTGRNTRFCDWRFIHRARLGVLPLNAAKRWQSGGDKRCRKCGYELETLPHVVSHCGVHSAARQLRHDNLVNRLVKATRCPGTITVNRTVEGTSGNMNSLRPDIVIRHEVTKTIAIVDIAVPFENRPEAMHAARQSKELKYAPMAQQLRAQGYKVTVAPFVVGSLGAWDPVNEKVLKRLNVSRYYAALMRRLMVSDTIRWSRNIYVEHVTGIRQYAAP

SEQ ID NO: 3005 - protein, 1166 aa, Anastrus sempiternus
MIMADSLNPQPVISVEGSQYIVLLPIATEQNIQCPLCTRSGSFKGVRKIENLARHCRDSHSSMTITYRCSRCGFTAPEGKRYPRKVVTQHCSECVSIVATVPSGNDRERRIGIRRRLGTLSNRQISEATDVPAPAEVEVVQPLVAELPSQMEEEAERTTVNNAPEPRLNSPQPSRIEAEAERTTVTNAPEARLNSPQSPERSLELQQTPAEPVNTHSLTPPSAVTNQITPIRGANPGAKTPTPEQCRLMEDLDSVTGMEALNEIAIRVSEFLGRLKENTPATVETGRAPTRRFNNPARQLNRVEEATRLQGLYRKNRVKAMRLILSGPATTCQMPVQEVEAHFKALAAPRSGSDSWPEVFDQALPTPESDASLCKPLSRGEVLKKLKTRSNTSPGPDGLTYADLKKADPGAYVLTSYYNAVWRVEAVPDSWLESNTILIHKKGDPSDIANWRPIAMGNTCSKLFASLLAGRLKRWAMTNQRISGSQKGFLPYEGCHEHNFVLQEAIRNARVAKKDLVVVWLDLASAFTSVPHSSISRALEGHGVPEKARRLVAALNKGQRTRVRIGNGYSQEILLQAGVKQGCPLSPDIFNLTMEVVLRELTRTNVGFKMGEVKISNLAYADDIALLADSVDDMRQLLCAAEGAAHAVGLHFNPAKCAAMHIANGGDDTVCSEFRVGGQLIRCLKSGEAYEHLGVPTGWQVKQTPITAIADIVADVRAIDDSLLAPWQKLDAVGTFVLPCMDFILRGGTIEKEYLHEADRLIKKLAKKWMSLPNRASAEIVCLPPAQGGAGLLPLADLYDVHTVTHGFKMLTAPDPNVSDIASGELRRTVSLRLKKEGPSGDDVAQYLSGDSDLPRSSSRGSFWTSVRKSVSALKHKLGLQWTWCWETRTLRIRLANGTIIAPADRRILYRQLRQGLIWHYGQKLIAKPDQGKVIEVTRQSRHANHFLRTGRNTRFCDWRFIHRARLGVLPLNAAKRWQSGVDKRCRRCGHDLETLPHVLNHCGVHSAARQLRHDGIVDRLVSAARCPGIVSVNRTIEGTSGDMASLRPDIAIRDEGSKSIIIVDVAVPFENRPQAIRAARQSKTEKYAPLAAQLRAQGYRACVLPFTVGSLGAWDSTNERVLQRLHINRYYAAMMRRLMVSDTIRWSRNIYVEHVTGTRQYQTQT

SEQ ID NO: 3006 - protein, 1135 aa, Potamanaxas melicertes
MYLARGNLQPIISVIMAESLNHQPVILVEGSKFFVLLPIATDQIIQCPLCTRSGSFRGVRKIENLARHCKDAHPSMDVMYKCRGCGFTAPEGKRYPRKVVTQHCSACVPSVAAVPSGNDRERRMSIRRRLGTLPPRHDAINTDLPASVEEEAAEVVAIAGSPVRGELEGESDATESRQTPAGEVQSPARSLDPQHPPSEPANAPTMPSIENIQMAPLSDADSAVRRPLPEQCRLMEELDSVTDLEVLNEIAGRVSQFLGRVKRNSLAAAETGRVPPRRFRESGRQLSGVEEATRLQALYRKNRVKAMRRILSGPPATCQIPIQEVAAHFQTLAAPRTGSDNWPDVFDRTHPTAESSEALCRPLSRGEVLRKIKGKSNTAPGPDGLTYADLKKADPGAHVLTSLYNAVWRVEAVPDSWRDSNTILIHKKGAPEDIANWRPIAMSNTCPKLFASLLAGRIKKWALKNRRLSDSQKGFLPYEGCHEHNFVLQEAIRNARVAKKDLVVVWLDLASAFTSVPHSSISRALEGHGVPEKAIRIIDSLNVGNRTRVRVGSEFTDPILLQAGVKQGCPLSPDTFNLTLEVVLRELTRTGVGFNMGGVRLSSLAYADDIALLADSADGMRLLLSAAEGAAHSVGLQFNPAKCAALHMSGGEDDTLCTEFRIGGQSIRCLKAGEAYDHLGVPTGWQVKQTPITAIADIVADARRIDESLLAPWQKLDAVGTFVLPGMDFILRGGTIDKEYLHEADRVIKRLAKKWMSLPNRASAEIVCLPPAQGGAGLLLLADLYDVHTVTHGYKMLTASDPTVSDIARNELRRSVSERLRKDRPSGVDVALYLSGDSDLPRSTGRGTFWTSVRKSASALRHKLGLQWVWSWETRTLAIRLANGTIVTPSDRRVLFRQLRQGLIRYYAQKLVAKPDQGKVIEVTKESRHANHFLRSGRNTRFCDWRFIHRARLGVLPLNAAKRWQSGDDKRCRRCGHELETLPHVISHCGVHSAARQLRHDTIVSRLVNAARCPGTISVNRTIEGTSGDVASLRPDIIIRDEGTKRIILVDVAVPFENRPQAMQAARQGKVLKYTPLAVQLRTQGYKVSVIPFTVGSLGAWDSVNEKVLERLKVDRYCRDGRVGRIRDAGGAGMS

SEQ ID NO: 3007 - protein, 995 aa, Junonia vestina
MYKFCFLIFSFIVLICNFNFLLGIFFFIISIFICIKLESSFNIMSQPSSIDSSCSLDNLIRCDQCTETKYFRGTRGLNIHIGRAHKANNPDPGPSFSTNDSNCWPSNSDSFWELLSDLKNNTPLIKRIPRGSRISVATALKKTIDEAVKKNNKESWEQLFTFSFRTLHVENKNEKISLTQKIKNNCVNPLKLVPPKIFPRPKRVPNISKIIESKVSDGDLKGAARIIFSNDIIAPNDLNTLQALQSKHPSPITDNIIPEPLSELIENVTNDDIFQALMSFKNGSAGGLDGLTPQHLKDLVSSGDCGKALLNSLVALVNLMLSGKVSSDVTDILYGANLCAFKKKDGGIRPIAVGSTLRRIASKVCCKRIFPILSSKFQPKQIGFGCIKGSEAAVHSIRTFLKSEKAEVLLKVDVKNAFNSVDRAMLLEEVKKQIPFLYPYLHQCYGRPSKLIYKKHLLLSSVGCQQGDPLGPALFSLAIHPYIHSLKSPLNIWYLDDGTIGGPSSLVMRDLKDLKDSFKTIGLELNFSKCELFINPSVLGEKREDLINQFNSLTPNIKIVGTDSLHVLGAPIFDDSIPKFFHEQINKFMDHSSRLNQISPHMALFIIRFCLYVPKFTYYLRTSQLWKFPQLLLTIDDNIKNTLSNILNCQFTDRSWTQATLPIRFGGLGIRSVSSVALPAFLSSVHGCRDLIGNIINPSLGSIEVAHLIEAREAWFSQYKDEFPSHLDSQKQWDEIICKKKQLELLESSQNLAERARLLAVSEKESGFWLQALPSPIIGTLLDRNTLTLCICLRLGLKTNQEHQCICGDLVNSLGHHGLSCQKSAGRISRHAALNEIIRRALSSINIPNVLEPCGVFRSDGKRADGMTLIPWKRGQCLVWDATCVDTLAPSHTKATGASAGAAAALAETRKKRKYESLDEGYIFLPFAVETLGPWGSEAKKFIKDLSVRLFEASGDRRAGSFFSQRISLAIQRGNAASLLGTMPQGDSLDGIFYL

SEQ ID NO: 3008 - protein, 995 aa, Junonia genoveva
MYKFCFLIFSFIVLICNFNFLLGIFFFIISLFICIKLESSFNIMSQPSSIDSSCSLDNLIRCDQCTETKYFRGTRGLNIHIGRAHKANNPDPGPSFSTNDSNCWPSNSDSFWELLSDLKNNTPLIKRIPRGSRISVATALKKTIDEAVKKNNKESWEQLFTFSFRTLHVENKNEKISLTQKIKNNCVNPLKLVPPKIFPRPKRVPNISKIIESKVSDGDLKGAARIIFSNDIIAPNDLNTLQALQSKHPSPITDNIIPEPLSELIENVTNDDIFQALMSFKNGSAGGLDGLTPQHLKDLVSSGDCGKALLNSLVALVNLMLSGKVSSDVTDILYGANLCAFKKKDGGIRPIAVGSTLRRIASKVCCKRIFPILSSKFQPKQIGFGCIKGSEAAVHSIRTFLKSEKAEVLLKVDVKNAFNSVDRAMLLEEVKKQIPFLYPYLHQCYGRPSKLIYKKHLLLSSVGCQQGDPLGPALFSLAIHPYIHSLKSPLNIWYLDDGTIGGPSSLVMRDLKDLKDSFKTIGLELNFSKCELFINPSVLGEKREDLINQFNSLTPNIKIVGTDSLHVLGAPIFDDSIPKFFHEQINKFMDHSSRLNQISPHMALFIIRFCLYVPKFTYYLRTSQLWKFPQLLLTIDDNIKNTLSNILNCQFTDRSWTQATLPIRFGGLGIRSVSSVALPAFLSSVHGCRDLIGNIINPSLGSIEVAHLIEAREAWFSQYKDEFPSHLDSQKQWDEIICKKKQLELLESSQNLAERARLLAVSEKESGFWLQALPSPIIGTLLDRNTLTLCICLRLGLKTNQEHQCICGDLVNSLGHHGLSCQKSAGRISRHAALNEIIRRALSSINIPNVLEPCGVFRSDGKRADGMTLIPWKRGQCLVWDATCVDTLAPSHTKATGASAGAAAALAETRKKRKYESLDEGYIFLPFAVETLGPWGSEAKKFIKDLSVRLFEASGDRRAGSFFSQRISLAIQRGNAASLLGTMPQGDSLDGIFYL

SEQ ID NO: 3009 - protein, 965 aa, Junonia evarete
MYKFCFLIFSFIVLICNFNFLLGIFFFIISLFICIKLESSFNIMSQPSSIDSSRSLDNLIRCDQCTETKYFRGTRGLNIHIGRAHKANNPDPGPSFSTNDSNCWPSNSDSFWELLSDLKNNTPLIKRIPRGSRISVATALKKTIDEAVKKNNKESWEQLFTFSFRTLHVENKNEKISLTQKIKNNCVNPLKLVPPKIFPRPKRVPNISKIIESKVSDGDLKGAARIIFSNDIIAPNDLNTLQALQSKHPSPITDNIIPEPLSELIENVTNDDIFQALMSFKNGSAGGLDGLTPQHLKDLVSSGDCGKALLNSLVALVNLMLSGKVSSDVTDILYGANLCAFKKKDGGIRPIAVGSTLRRIASKVCCKRIFPILSSKFQPKQIGFGCIKGSEAAVHSIRTFLKSEKAEVLLKVDVKNAFNSVDRAMLLEEVKKQIPFLYPYLHQCYGRPSKLIYKKHLLLSSVGCQQGDPLGPALFSLAIHPYIHSLKSPLNIWYLDDGTIGGPSSLVMRDLKDLKDSFKTIGLELNFSKCELFINPSVLGEKREDLINQFNSLTPNIKIVGTDSLHVLGAPIFDDSIPKFFHEQINKFMDHSSRLNQISPHMALFIIRFCLYVPKFTYYLRTSQLWKFPQLLLTIDDNIKNTLSNILNCQFTDRSWTQATLPIRFGGLGIRSVSSVALPAFLSSVHGCRDLIGNIINPSLGSIEVAHLIEAREAWFSQYKDEFPSHLDSQKQWDEIICKKKQLELLESSQNLAERARLLAVSEKESGFWLQALPSPIIGTLLDRNTLTLCICLRLGLKTNQEHQCICGDLVNSLGHHGLSCQKSAGRISRHAALNEIIRRALSSINIPNVLEPCGVFRSDGKRADGMTLIPWKRGQCLVWDATCVDTLAPSHTKATGASAGAAAALAETRKKRKYESLDEGYIFLPFAVETLGPWGSEAKKFIKDLSVRLFEASGDRRAGSFFSQ

SEQ ID NO: 3010 - protein, 995 aa, Junonia litoralis
MYKFCFLIFSFIVLICNFNFLLGIFFFIISLFICIKLESSFNIMSQPSSIDSSRSLDNLIRCDQCTETKYFRGTRGLNIHIGRAHKANNPDPGPSFSTNDSNCWPSNSDSFWELLSDLKNNTPLIKRIPRGSRISVATALKKTIDEAVKKNNKESWEQLFTFSFRTLHVENKNEKISLTQKIKNNCVNPLKLVPPKIFPRPKRVPNISKIIESKVSDGDLKGAARIIFSNDIIAPNDLNTLQALQSKHPSPITDNIIPEPLSELIENVTNDDIFQALMSFKNGSAGGLDGLTPQHLKDLVSSGDCGKALLNSLVALVNLMLSGKVSSDVTDILYGANLCAFKKKDGGIRPIAVGSTLRRIASKVCCKRIFPILSSKFQPKQIGFGCIKGSEAAVHSIRTFLKSEKAEVLLKVDVKNAFNSVDRAMLLEEVKKQIPFLYPYLHQCYGRPSKLIYKKHLLLSSVGCQQGDPLGPALFSLAIHPYIHSLKSPLNIWYLDDGTIGGPSSLVMRDLKDLKDSFKTIGLELNFSKCELFINPSVLGEKREDLINQFNSLTPNIKIVGTDSLHVLGAPIFDDSIPKFFHEQINKFMDHSSRLNQISPHMALFIIRFCLYVPKFTYYLRTSQLWKFPQLLLTIDDNIKNTLSNILNCQFTDRSWTQATLPIRFGGLGIRSVSSVALPAFLSSVHGCRDLIGNIINPSLGSIEVAHLIEAREAWFSQYKDEFPSHLDSQKQWDEIICKKKQLELLESSQNLAERARLLAVSEKESGFWLQALPSPIIGTLLDRNTLTLCICLRLGLKTNQEHQCICGDLVNSLGHHGLSCQKSAGRISRHAALNEIIRRALSSINIPNVLEPCGVFRSDGKRADGMTLIPWKRGQCLVWDATCVDTLAPSHTKATGASAGAAAALAETRKKRKYESLDEGYIFLPFAVETLGPWGSEAKKFIKDLSVRLFEASGDRRAGSFFSQRISLAIQRGNAASLLGTMPQGDSLDGIFYL

SEQ ID NO: 3011 - protein, 914 aa, Junonia evarete
MYKFCFLIFSFIVLICNFNFLLGIFFFIISLFICIKLESSFNIMSQPSSIDSSCSLDNLIRCDQCTETKYFRGTRGLNIHIGRAHKANNPDPGPSFSTNDSNCWPSNSDSFWELLSDLKNNTPLIKRIPRGSRISVATALKKTIDEAVKKNNKESWEQLFTFSFRTLHVENKNEKISLTQKIKNNCVNPLKLVPPKIFPRPKRVPNISKIIESKVSDGDLKGAARIIFSNDIIAPNDLNTLQALQSKHPSPITDNIIPEPLSELIENVTNDDIFQALMSFKNGSAGGLDGLTPQHLKDLVSSGDCGKALLNSLVALVNLMLSGKVSSDVTDILYGANLCAFKKKDGGIRPIAVGSTLRRIASKVCCKRIFPILSSKFQPKQIGFGCIKGSEAAVHSIRTFLKSEKAEVLLKVDVKNAFNSVDRAMLLEEVKKQIPFLYPYLHQCYGRPSKLIYKKHLLLSSVGCQQGDPLGPALFSLAIHPYIHSLKSPLNIWYLDDGTIGGPSSLVMRDLKDLKDSFKTIGLELNFSKCELFINPSVLGEKREDLINQFNSLTPNIKIVGTDSLHVLGAPIFDDSIPKFFHEQINKFMDHSSRLNQISPHMALFIIRFCLYVPKFTYYLRTSQLWKFPQLLLTIDDNIKNTLSNILNCQFTDRSWTQATLPIRFGGLGIRSVSSVALPAFLSSVHGCRDLIGNIINPSLGSIEVAHLIEAREAWFSQYKDEFPSHLDSQKQWDEIICKKKQLELLESSQNLAERARLLAVSEKESGFWLQALPSPIIGTLLDRNTLTLCICLRLGLKTNQEHQCICGDLVNSLGHHGLSCQKSAGRISRHAALNEIIRRALSSINIPNVLEPCGVFRSDGKRADGMTLIPWKRGQCLVWDATCVDTLAPSHTKATGASAGAAAALAETRKKRK

SEQ ID NO: 3012 - protein, 995 aa, Junonia villida
MYKFCFLIFSFTVLIFNFNFLLGIFFFIISLFICTRLESSLNIMSQPSSIDSSTSLDNLIRCDQCTETKYFRGTRGLNIHIGRAHKANNPDPGPSFSTNDSNCGPSNPDSFWELLSDFKNNTPLIKRIPRGSRISVATALKKTIDEAVKNNNKDSWEQLFTFSFRTLHVENKNERLSLTQKIKNNCLNPLKLVQPKIFPRPKRAPNISKIIESKVSDGDLKGAARIIFSNDIIAPNDLNTLQALQSKHPSPATHNIIPEPLSELIENVTNDDVFQALMSFKNGSAGGLDGLTPQHLKDLVSSGDCGKALLNSLAALVNLMLSGKVSSDVTDILYGANLCAFKKKDGGIRPIAVGSTLRRIASKVCCKRIFPILSSKFQPKQIGFGCKKGSEAAVHSIRTFLKSEKAEVLLKVDVKNAFNSVDRAMLLEEAKKQIPFLYPYLHQCYGRPSKLIYKKHLLLSSVGCQQGDPLGPALFSLAIHPFIHSLKSPLNIWYLDDGTIGGPSSLVIRDLKDLKDSFKTIGLELNFSKCELFINPSVLGEKREDLINQFNSLTPNIKIVGTDSLHVLGAPIFDDSIPKFFHEQINKFMDHSSRLNQISPHMALFIIRFCLYVPKFTYYLRTSQLWKFPQLLLTIDDNIKNTLSNILNCQFTDRSWTQATLPIRFGGLGIRSVSSVALPAFLSSVHGCRDLIGNIINPSLGSIEVAHLSGAREAWFSQHTDEVPIHLDSQKQWDEIICKKKHLELLESSPNLAERARLLAVSEKESGFWLQALPSRNIGTLLDRNTLTLCICLRLGLKTNQEHQCICGDLVNNLGHHGLSCQKSAGRISRHSALNEIIRRALSSINIPNVLEPCGVFRSDGKRADGMSLIPWKRGQCLVWDATCVDTLAPSHIKATGASAGAAAALAETRKIRKYESLDEGYIFLPFAVETLGPWGSEAKKFIKDLSVRLFEASGDRRAGSFFSQRISLAIQRGNAASLLGTMPQGDSLDGIFYL

SEQ ID NO: 3013 - protein, 718 aa, Junonia evarete
MSFKNGSAGGLDGLTPQHLKDLVSSGDCGKALLNSLVALVNLMLSGKVSSDVTDILYGANLCAFKKKDGGIRPIAVGSTLRRIASKVCCKRIFPILSSKFQPKQIGFGCIKGSEAAVHSIRTFLKSEKAEVLLKVDVKNAFNSVDRAMLLEEVKKQIPFLYPYLHQCYGRPSKLIYKKHLLLSSVGCQQGDPLGPALFSLAIHPYIHSLKSPLNIWYLDDGTIGGPSSLVMRDLKDLKDSFKTIGLELNFSKCELFINPSVLGEKREDLINQFNSLTPNIKIVGTDSLHVLGAPIFDDSIPKFFHEQINKFMDHSSRLNQISPHMALFIIRFCLYVPKFTYYLRTSQLWKFPQLLLTIDDNIKNTLSNILNCQFTDRSWTQATLPIRFGGLGIRSVSSVALPAFLSSVHGCRDLIGNIINPSLGSIEVAHLIEAREAWFSQYKDEFPSHLDSQKQWDEIICKKKQLELLESSQNLAERARLLAVSEKESGFWLQALPSPIIGTLLDRNTLTLCICLRLGLKTNQEHQCICGDLVNSLGHHGLSCQKSAGRISRHAALNEIIRRALSSINIPNVLEPCGVFRSDGKRADGMTLIPWKRGQCLVWDATCVDTLAPSHTKATGASAGAAAALAETRKKRKYESLDEGYIFLPFAVETLGPWGSEAKKFIKDLSVRLFEASGDRRAGSFFSQRISLAIQRGNAASLLGTMPQGDSLDGIFYL

SEQ ID NO: 3014 - protein, 774 aa, Ophraella communa
MEWADITVKEVQESLKKASNWKAPGQDGIQNYWLKTLTAIHQPLAHQYNRLMKDPENMPEWITEGKTILLPKNNKTEEAKNYRPITCLTTMYKNLTSIIRNRLYQHLETNEIFPHEQKGCVKDSYGCRDHLMLNKIITEDAKRKKRNLSMGWIDYQKAFDSVPHSWLLKALQIYKTNPIVVNMLQIAMKKWKTHLTINANGTTIDAGTIKIRSGIDSLSPLIFCMALFPLSNELNSTNRGYILNKKKPPINHLFYVDDLKLYAKNDKELEDLFINVKTFSDDIKMQFGLEKCAKVTVERGKPVKTQNIVIDNNTEIMDLEETEIYKYLGILENSEIEDAEMKDKVCKEYYSRVRKILQSQLTGKNKFTAITALAQPVLNYSYGILEWKEVEIKNIDRKTRKLLTIYNLHHPKADVDRLYTARASGGRGLISNEQTYNLTIIGITNYIMEKRKDRHVELIKQNEMESKGNNAITNKGKNLTKKYENKSVNEMNGTTVTEKVKKLKQRCRQKMNEEREQKWKSKEMHGQYAREIDRDDVDKKQTFSWLTTGILKGETESLIIAAQDQAISTNYIRKKIFREKIDSRCRLCKQYDETIKHIITGCPVLARKEYLERHNKVCSALHYNICKFYDIETEDAWYKHNPKSVETKDEITVIWDMQVQTDRTVMANKPDLIIKDLKNRTCLLIDVAIPSDATGKEKESEKIIKYRDLQIEVQRMWGLKTYIIPIIIGATGTIYNNFGELLNKIPATTINPQLEHYKKTALLETAHIIRRALG

SEQ ID NO: 3015 - protein, 1199 aa, Ophraella communa
MTHGNENGTRENGQEDHAPTIYPEENLAEDTQPGPSGIQNQDFQRETDKNKRQKWSKNEYKEILWCYYYLAETTGTKNLKENYDLWRSRNPNSRPNISANTLATQRRYIMSHKKLTEIEIDQIKALVQKYIKDNAQNPEENKLNETGNGEDQNLQTDVQKQRIPDIQNEVDMEEAQTNQSAQSNCEEIVENMVREIKNKLIDADSMSRNKLPKINETQKATSLISHGNKAILQIIDGWAVSQHSITEINKLVYATGSVICAYLNIKQEITRTKYRKPKWKMRIEQRIAQMRKELSQMNEIIRGNKTGRMQLIKQRLFHKHKIKSKQDEDKIMEEIKQKIQSQAQRIRRYDERYKFYVENKKFVENPKSFYRTLKQNTINIEKTPTKEQIQTFWKGIWQEEKQHNDEAQWIKREEQRYRNIRNMEWADITVKEVQESLKKASNWKAPGQDGIQNYWLKTLTAIHQPLAHQYNRLMKDPENMPEWITEGKTILLPKNNKTEEAKNYRPITCLTTMYKNLTSIIRNRLYQHLETNEIFPHEQKGCVKDSYGCRDHLMLNKIITEDAKRKKRNLSMGWIDYQKAFDSVPHSWLLKALQIYKTNPIVVNMLQIAMKKWKTHLTINTNGTTIDAGTIKIRSGIFQGDSLSPLIFCMALFPLSNELNSTNRGYILNKKKPPINHLFYVDDLKLYAKNDKELGDLFINVKTFSDDIKMQFGLEKCAKVTVERGKLVKTQNIVIDNNTEIMDLEETEIYKYLGILENSEIEDAEMKDKVCKEYYSRVRKILQSQLTGKNKFTAITALAQPVLNYSYGILEWKEVEIKNIDRKTRKLLTIYNLHHPKADVDRLYTARASGGRGLISNEQTYNLTIICITNYIMEKRKDRHVELIKQNEMERKGNNAITNKGKNLTKKYENKSVNEMNGTTVTEKVKKLKQRCRQKMNEEREQKWKSKEMHGQYAREIDRDDVDKKQTFSWLTTGILKGETESLIIAAQDQAISTNYIRKKIFREKIDSRCRLCKQYDETIKHIITGCPVLARKEYLERHNKVCSALHYNICKFYDIETEDAWYKHNPKSVETKDEITVIWDMQVQTDRTVMANKPDLIIKDLKNRTCLLIDVAIPSDATGKEKESEKIIKYRDLQIEVQRMWGLKTSIIPIIIGATGTIYNNFGELLNKIPGNNNKSTIRTLQKTALLETAHIIRRALG

SEQ ID NO: 3016 - protein, 904 aa, Tomocerus nigrus
MATSNDNTILSQTGTDVRCIECGKTCKGERGLKIHQSKAHKLLHLDNILNKYDDSQCQTANVTDNTQNDESTNNKDSFMPDEKNAQIKHANLCLKKQNDSLIKLIDDFEPMSFDAQVDNVITILKKVNSRLPGPKHPAIKFYEARNRKSQFRARENGYTKSTNPQRTSKRERRRRNEKYEHQLMQHLYYNQRKKCVNKLIKDGNNICTIPLNDLHKSFSDRWSHPNNFCKESYKDIPPDIQAQINNDFNYTISESEIKMSISSLKSDSSPGPDSIYPRCLKLTKCAETISIIATIMMLHNYVPSAFKEARTILIYKNKGDRQLSDNWRPISVCSVIRRVVEKTIDRRMRNWIAFHPRQKGFIHEPGCHINTTILEGILKKAKTEKSTVVILFLDIHQAYDNIGHQHTVRCLNEIPMPTLLRNLGISLQTNNFTRLKVNNMSSAPIYLKRGVFQGSPLSPLLFNTAIDYVINEISEPEVSSLYGFELDKSLPKLSVLSFVDDTVLIANNRISAAELFKIAENAFSMTGMKISHGKSSAIVVENGKLSELDLNVSKDVSIHSLKENEVIKYLGVTYKQQQMFDESIAISRIKSSLSKLISSNMLYPDQKLNIINQYLWPVMVYPLQTCPFSKLKKSFLHDIDIMIRTTVKTIIGVPDDIPSSMLYSPKKWKGLEIPNGEWEAYIQQYNICETLMRQKDPYIFVSRELDNEQKKCLEKLNISNDEIINTRNTMKRESKSKYLFSTPKVLRTILREREFAKWCELKTKGKGIPLFKDTPYANSWISTRKGMSSSEWTTALKLIGCVAAVNSIPGRNLNTTRCRFSTCNEIETLGHVLGSCRKSELLRNNRHHIIRSMIAQTFRENDYEVFEEVHCQSSTGSNRRVDILAIKGDQGYILDPTIRFESHI

SEQ ID NO: 3017 - protein, 1948 aa, Amphibalanus amphitrite
MSVSPHHDPPVSLPRAADTQPQIVDGRLVLPFPLPGLLLCPVEGCGGRYANCDASTMRQSLRRHIKRCHVALTDAQWVCGGCRCRLPYHFSRHGCFAQPAAAGPVAMPHRCWCGRSFTTRRGLTNHARLCRRSPVHVDTPSLPLTAGTDRPVAGDDDLSLPPLTPPEAPVRGSVSDPGPGSPRSSLPSPLADRPGSGDVTLTPDDVIPGPVTSRPGPSVLPDGPGDRCDTPVPAVTVTVSPGVSSVDWSPVPSPGVMSDVTSRVSSSGVTSTASSDSSEASTPLGTPCAPTPRARRSLASLRTSPARPDPPGDPVSPPANRDRPSPLQRLARRFMAAIGRGGRRPVAPARRDPAPPRPDSPLLPPFPPSLEACRRSESGSELDITLETPPRAPSPSDWTLLEDLAVSSDSEAAVTEDSLPLSLRLAGTDSPPLPVAADAPSPDRAPTPPLDLAPSSPLSPADCPPPDRAETPPPDAAPRSVPAPASASSADGLPPSAAGRPPPAPSPPTDSGNGGGDERRRRKRRRRRRDRRGPVPRDPARDVPVPGDLTRPSQPGRDPPSHSSSPPRDTSGDGCGWPRRTLVFHQSRAPVPQDPVDGDPRRGPPVSDLGGPPVTSTDRGRDCAARTQPCTPTRRVRTPPGFPSRGGRPPPGFPARDVPLHGPVSPGARAAVGDSGLTRTYSEVVRTPVPHAVPPVTRPEPPAPRAVPPAPHAVPGPSRDPGGDRRANRGRGGRDGGRGRQPAANPARDAAGPSRAAAGGRPGADLTRRAPVSPRDRDPPHGGAAPRPTRGRGPPGDPAHRDRPSVARDPAVTRPGRGRSGGEPTGAGRGARGRGGRGGRPPADPPRAVPRVPPDPPRGSPGTAARVPPGHPPRAPPGDPAGAVAGGPPRAPPRDPPGDPPGDPPTDRDPAPDRPAGGARGGGRGRGRGRGASRGRGRGGASRGRGGAAGAPAGDPAGDPDGGAGGGGRGGGRGRGRGGPGRGRGRGAGRGGGAGGAGDPAGAPDPAVAPDPTQQGPEPTELQQEFLPILTALQETHTPWEDVERQLTRLCAEAARRNADYHERRRRPAPWRPPNERPPADRPPAGEPRPPPAEQEPEPAEDHRRPWQPPAYAAEEASRLQRLYRSNREKAVRQVLREETPPCPVPGEQLAAHFAPPPCPPVEWDRRPQEVPDLTPAAPSPALTAPFRADEVWGRLRRAANTAPGPDGLRYAAWRALDPGALLLTRAFELCRLARRVPPTWLVSETALLHKGGDPTRPDSWRPIALGATVAKLYAGVWADRLSGWVEAADLLSTGQKGFRPFDGVLEHNFVLQSAINSAREDGTEAHVAFIDLTNAFGSVPHSLLWQVLQRVGVPEEVVAVVQGLYQGSATRYRAGDGLTAPVACQRGVRQGCPLSGLLFSLALEPLLRALAAAQVRCLAYADDLALIFSRRSEVQDGLALLERVCAWAGLTPNPGKSALLSVGAPSPPATLCGAPLPLIDRDGAYRYLGRPVGHTRLIQPPLQVVAEARRDAARLLGSPLAPWQKLDAVRAFIAPRLTHCLRLGVIPKGALAAFDRSLRWRVKGVLNLPINATNHYLYSPTGAGGVGLTHFAQEADILLAAATQRLLHSRDPAVAELAAAELTGAARRRVRRDPTPADLADYLNGVAMRDDGGGVSCRSTRTRVATTALARRAPVRWRAADPPVLQVGEADVEPRRESRALREAVRRTDLADLTRLPQQGKVLACVADQPVSSHYMYNGSFTRFADWRFVHRARLSLVPLNAYSRRPGADRRCRRCGYVQETLPHVINHCLTAHAEAYQKRHDALLARLERATPVFPGDEVRVNRRVPGLDSALRPDLVVTRGDRVTLVDVTVSFENRPEALRAAAADKERKYAPLVQELRRQGKTASVHALVLGSLGTWVRGNEATLRQLRVSRVYARLMRKLMVSDTLRWSRDVYVEHVTGSRQY

SEQ ID NO: 3018 - protein, 891 aa, Amphibalanus amphitrite
MWSGSSLGCAPRRPGVTPTTTSGAGAPPPGAPPNERPPADRPPAAPPAGEPRPPPAEQEPEPAEDHRRPWQPPAYAAEEASRLQKLYRANRDKAVRQVLREETPPCPVPGEQLAAHFAPPPCPPVEWDRRPQEVPDLTPAAPSPALTAPFRADEVWGRLRRAANTAPGPDGLRYAAWRALDPGALLLTRAFELCRLARRVPPTWLVSETALLHKGGDPTRPDSWRPIALGATVAKLYAGVWADRLSGWVEAADILSPGQKGFRPFDGVLEHNFVLQCAVNSAREDGTEAHVAFIDLTNAFGSVPHSLLWQVLQRVGVPEEVVAVLQGLYEGSATRYRAGDGLTAPVACQRGVRQGCPLSGLLFSLALEPLLRALAAAQVRCLAYADDLALIFSRRSEVQDGLALLERVCAWAGLTPNPGKSALLSVGAPSPPATLCGAPLPLIDRDGAYRYLGRPVGHTRLSQPPLQVVAEARRDAARLLGSPLAPWQKLDAVRTFIAPRLTHCLRLGVIPKGALAAFDRSLRWRVKGILHLPINSTNRYLYSPTTAGGVGLTHFSQEADILLAAATQRLLHSRDPAVAELAAAELIGAARRRVRRDPTPADLAEYLNGAPMRDDGGGVSCRSTRTRVATTALARRAAVRWRAADPPVLQVGEADVEPRRESRALREAVRQTELRELTQMPQQGKVLACVADQPVSSHYMYNGSFTRFADWRFVHRARLSLVPLNAYSRRAGADRRCRRCGYVQETLPHVTNHCLQAHAEAYQLRHDAILARLERATPVFPGDEVRVNRRVPGIDSALRPDLVVTRGDHVSLVDVTVAFENRPEALRAAAADKERKYAPLVQELRRQGKTASVHALVLGSLGTWVRSNERTLRQLRVSRVYARLMRKLMAE

SEQ ID NO: 3019 - protein, 1997 aa, Amphibalanus amphitrite
MSVSPHHDPPVSLPRAADTQPTLVDGRLVLPFPLPGLLMCPVENCGTRYANTGPSVLRQSLKRHIARCHVDLTSAQWVCGGCHEELPYHLSRHGCFAQPAAAGPVAMPHRCWCGRSFTTRRGLTNHARLCRRSPVHVDTPSLPPTADTDRPAPGDDAVSLPPLTPPEAPVRGSASDPGPGSPRSSVSSPLADRRGSGGRPAADDVTDGDGGSPAPSDVSDSDVTVVSHSPSVDHGPVTPRPGPVTPRPGPVTPRPGPVTPRPFPVRVTVVLPPGSVPQSPVPSPGVMSDVSDVTSVMPSVSSIDGSATPTSDSSGSSTPLGTPCALTPRVRRSLASLRTSPARPDPPGDPVSPPADRDRPSPLQRLARRFMAAIGRGGRRPAAPARRDPAPPRPDSPLLPPFPPSLEACRRSESGSELDITLETPPRAPSPSDWTLLEDLAVSSDSEAAVTEDSLPLSLRLAGTDSPPLPVAADAPSPDRAPTPPLDPAPSSPLSPADCPPPDRAETPPPDAAPRSVPAPASASSADGSPPAAAGRPPPAPSPPTDSGSGGGDERRGRRRRRRRRDRRGPVPSDPARDMPGHPAPGSDPTPSGASDDEDGPLPTMVFYRSDAVLAPSSVPPRRVRTPPGFPSRGGRPPPGFPALGDRSAAPATTEARCDRPGTEPARDGRALTDDVSRDTPGPRAVHAPPCTGARDDGPRRVPDAPAAAVRTYSEVVRTPVTHTVPPVTRPVPPVTRVTRVRDGDRDNRSNRGGGGRARRGAGGPSRDRPGPSRDRPDPGPSRGAPGPSRGRAGGRAGGVSDPPRDPAGPRPTRGRGPPGDPAHRDRPSVARDPAVTRPGSGRSGGEPAGAGRGARGRGGRGGRPPADPPRAVPRVPPDPPRGSPGAAARVPPCADSPRGSPGTATRVTPGDPPRAPPGDPAGAVAGGPPRAPPRDPPRDPPGDLPTDPPTDRDPAPGRPASGARSGGRGRGRGRGASRGRGRGGASRGRGGAAGAPAGDPAGDPDGGAGGGGRGGGRGRGRGGPGRGRGRGAGRGGGAGGAGDPAGAPDPAGAPDPTQQGPEPTELQQQFLPVLTALQETRAPWEEVERQLTRLCAEAARRNADYHERRRRPAPWRPPNERPPADRPPAAPPAGEPRPQPAEQEPEPAEDHRRPWQPPAYAAEEASRLQRLYRSNREKAVRQVLREETPPCPVPGEQLAAHFAPPPCPPVEWDRRPQEVPDLTPAAPSPALTAPFRADEVWGRLRRAANTAPGPDGMRYAAWRALDPDALLLTRAFELCRLARRVPPTWLVSETALLHKGGDPTRPDSWRPIALGATVAKLYAGVWADRLSGWVEAADLLSTGQKGFRPYDGVLEHNFVLQCAVNSAREDGTEAHVAFIDLANAFGSVPHSLLWQVLQRIGVPEDVVAVLQGLYEGSATRYRAGDGLTAPVACQRGVRQGCPLSGLLFSLALEPLLRALAAAQVRCLAYADDLALIFSRRSEVQDGLALLERVCAWAGLTPNPGKSALLSVGAPSPPAALCGAPLPLIDRDGAYRYLGRPVGHTRLTQPPLQVVAEARRDAARLLGSPLAPWQKLDAVRTFIAPRLTHCLRLGVIPKGALAAFDRSLRWRVKGVLNLPVNATNRYLYSPTTAGGVGLTHFSQEADILLAAATQRLLHSRDPAVAELAAAELTGAARRRVRRDPTPADLAEYLNGAPMRDDGGGVSCRSTRTRVATTALARRAAVRWRAADPPVLQVGEADVEPRRESRALREAVRQTELRELTQMPQQGKVLACVADQPVSSHYMYNGSFTRFADWRFVHRARLSLVPLNAYSRRAGADRRCRRCGYAAETLPHVTNHCLQAHAEAYQLRHDAILARLERATPVFAGDDVRVNRRVPGIDSALRPDLVVTRGDHVSLVDVTVAFENRPEALRAAAADKERKYAPLVQELRRQGKTASVHALVLGSLGTWVRSNERTLRQLRVSRVYARLMRKLMVSDTLRWSRDIYIEHITGTRQY

SEQ ID NO: 3020 - protein, 1714 aa, Amphibalanus amphitrite
MSDVSDVTSVMSSVSSTDGSVTPTSDSSGSSTPLGTPCALTPRVRRSLASLRTSPARPDPPGDPVSPPADRDRPSPLQRLARRFMAAIGRGGRRPAAPARRDPAPPRPDSPLLPPFPPSLEACRRSESGSELDLTLETPPRAPSPSPSDRTLLEDLAVSSDSEAAVTEDSLPLSLRLAGTDSPPLPVTTDAPSPDRAPTPPLDPAPSSPLSPADCPPPDRAETPPPDAAPRSVPAPASASSADGSPPAAAGRPPPAPSPPTDSGSGGGDERRGRRRRRRRRDRRGPVPSDPARDLPGHPAPDSDPTPSGASDDEDGPLPTMVFYRSDAVLAPSSVPPRRVRTPPGFPSRGGRPPPGFPALGDRSAAPATTEARCDRPGPEPARDGRALTDDVSRDTPGPRAVHAPPCTGARDDGPCRVPDAPAAAVRTYSEVVRTPVTHTVPPVTRPVPPVTRVTRVRDGDRDNRPNRGGGGRARRGAGGPSRDRPGPSRDRPDPGPSRGAPGPSRGRAGGRAGGMSGPPRDPVGPRPTRGRGPTRDPADSGRPGADRDRPGDPAVTRPGRGRSGGVPAGAGRGARGRGGRGGRPPADQPCVTPRVPPDPPRVPPDPPRAVPRVPPDPPRGSPGAAARVTPGDPPRAPPGDPAGAVAGGPPRAPPRAPPGDLPTDPPTDRDPVPDRPASGARGGGRGRGRGRGASRGRGRGGAPRGRGGAAGAPAGDPAGDPDGGAGGGGRGAGRGRGRGGPGRGRGRGAGRGGGAGGAGDPAGAPDPAGAPNPTQQGPEPTELQQEFLPILTTLQETRAPWEDVERQLTRLCAEAARRNADYHERRRRPAPWRPPNERPPADRPPAAPPAGEPRPPPGEQEPEPAEDHRRPWQPPAYAAEEASRLQRLYRANREKAVRQVLREETPPCPVPGEQLAAHFAPPPCPPVEWDRRPQEVPDLTPAAPSPALTAPFRADEVWGRLRRAANTAPGPDGLRYAAWRALDPGALLLTRAFELCRLARRVPPTWLESETVLLHKGGDPTRPDSWRPIALGATVAKLYAGVWADRLSGWVEAADLLSTGQKGFRPFDGVLEHNFVLQSAINSAREDGTEAHVAFIDLANAFGSVPHSLLWQVLQRIGVPEEVVAVVQGLYQGSATRYRAGDGLTAPVACQRGVRQGCPLSGLLFSLALEPLLRALAAAQVRCLAYADDLALIFSRRSEVQDGLALLERVCAWAGLTPNPWKSALLSVGAPSPPATLCGAPLPLIDRDGAYRYLGRPVGHTRLTQPPLQVVAEARRDAARLLGSPLAPWQKLDAVRAFIAPRLTHCLRLGVIPKGALAAFDRSLRWRVKGILNLPVNATNRYLYSPTTAGGVGLTHFSQEADILLAAATQRLLHSRDPAVAELAAAELTGAARRRVRRDPTPADLAEYLNGAPMRDDGGGVSCRSTRTRVATAALARRAPVRWRAADPPVLQVGEADVEPRRESRALREAVRQTELRELTQMPQQGKVLACVADQPVSSHYMYNGSFTRFADWRFVHRARLSLVPLNAYSRRPGADRRCRRCGYVQETLPHVINHCLTAHAEAYQKRHDALLARLERATPVFPGDEVRVNRRVPGLDSALRPDLVVTRGDRVTLVDVTVSFENRPEALRAAAADKERKYAPLVQELRRQGKTASVHALVLGSLGTWVRTNEATLRQLRVSRVYARLMRKLMVSDTLRWSRDVYVEHVTGSRQY

SEQ ID NO: 3021 - protein, 2002 aa, Amphibalanus amphitrite
MSAPPSRAPTVSPPRAADTQPRIDGDRLVLPFPLPGLLLCPVEGCGFRYANCVPSTMRHSLKRHIKRCHVDLSVAQWVCGGCGARLPYHFSRHGCFAQPAAAGPVAMPHRCWCGRSFTTRRGLTNHARLCRRSPVHVDTPSLPLTAGTDRPVAGDDGLSLPPLTPPEAPVRGSASDPGPGSPRSSVSSPLADRRGSGGRPAADDVTDGDGGSPAPSDVSDSDVTVVSHSPSVDHGPVTPRPGPVTPRADPSDPCGDTPVPTVTVVLSPRSTESRSPVPSPGVMSDDTSVTSRVSSSGVTSTASSDSSEASTPLGTPCAPTPRARRSLASLRTSPARPDPPGDPVSPPADRDRPSPLQRLARRFMAAIGRGGRRPAAPARRDPSPPRPDSPLLPPFPPSLEACRRSESGSELDITLETPPRPPSPSDWTLLEDLAVSSDSEAAVTEDSLPLSLRLAGTDSPPLPVAADAPSPDRAPTPPLDPAPSSPLSPADCPPPDRAETPPPDAAPRSVPAPASASSADGSPPSAAGRPPPAPSPPTDSGSGGGDERRRRKRRRRRRDRRGPVPRDPARDVPVPGDPARPSHPGRDPSSHGSPPPRDTSGDGCGWPRRTLVFHQSRAPVPQDPVDGDPRRGPPVSDLGGPLVTPTDRGRDCTARTQPCTPTRRVRTPPGFPSRGGRPPPGFPARDTPRDAPRVDPVSPSVRATVGDGVGPTRTYSEVVRTPVSHPVPPVPRAAPHPVPPVTHVRDGGRDPRPGRGGGGRARRGAGGPSHDRPGPSRDRPDPGPSRGAPGPSRGRAGGRAGGVSGPPRDPAGPRPTRGRGPPGDPAHRDRPGGARDPPVTRPGRGRSGGEPAGAGRGARGRGGRSGRPPADPPRVVPRVPPDPPRAVPRVPPDPPRGSPGAAARVPPCADPPRGSPGTAARVTPGDPPRAPPGDPAGAVAGGPPRAPPRAPPGDLPADPPTDRDPAPDRPAGGARGGGRGRGRGRGASRGRGRGGASRGRGGAAGAPAGDPAGDPDGGAGGGGRGGGRGRGRGGPGRGRGRGAGRGGGAGGAGDPAGAPDPAGAPDPTQQGPEPTELQQEFIPVLTALQETRAPWEEVERQLTRLCAEAARRNADYHERRRRPAPWRPANERPPADRPAGEPRPPPAEQEPEPAEDHRRPWQPPAYAAEEASRLQKLYRANREKAVRQVLREETPPCPVPGEQLAAHFAPPPCPPVEWDRRPQEVPDLTPAAPSPALTAPFRADEVWGRLRRAANTAPGPDGLRYAAWRALDPGALLLTRAFELCRLARRVPPTWLESETALLHKGGDPTRPDSWRPIALGATVAKLYAGVWADRLSGWVEAADLLSTGQKGFRPFDGVLEHNFVLQSAINSAREDGTEAHVAFIDLANAFGSVPHSLIWQVLQRIGVPEEVVAVVQGLYQGSATRYRAGDGLTAPVACQRGVRQGCPLSGLLFSLALEPLLRALAAAQVRCLAYADDLALIFSRRSEVQDGLALLERVCAWAGLTPNPGKSALLSVGAPSPPATLCGAPLPLIDRDGAYRYLGRPVGHTRLTQPPLQVVAEARRDAARLLGSPLAPWQKLDAVRAFIAPRLTHCLRLGVIPKGALAAFDRSLRWRVKGILNLPINATNGYLYSPTGAGGVGLTHFAQEADILLAAATQRLLHSRDPAVAELAAAELTGAARRRVRRDPTPADLAEYLNGAPMRDDGGGVSCRSTRTRVATTALARRAPVRWRAADPPVLQVGEADVEPRRESRALREAVRRTDLADLTRLPQQGKVLSCVADQPVSSHYMYNGSFTRFADWRFVHRARLSLVPLNAYSRRPGADRRCRRCGYAAETLPHVLNHCLTAHAEAYQRRHDALLARLERATPVFPGDEVRVNRRVPGLDSALRPDLVVTRGDRVTLVDVTVSFENRPEALRAAAADKERKYAPLVQELRRQGKTASVHALVLGSLGTWVRTNEATLRQLRVSRVYARLMRKLMVSDTLRWSRDVYVEHVTGSRQY

SEQ ID NO: 3022 - protein, 1972 aa, Amphibalanus amphitrite
MSAPPSRAPTVSPPRAADTQPTIDGERLVLPFPLPGLLLCPVEGCGTRYANCSASTMRQSLKRHVKRCHTELTAAQWVCGGCREELPYHFNRHGCFAQPAAAGPVAMPHRCWCGRSFTTRRGLTNHARLCRSSPVHVDTPSLSLSRVTADADRPAPGDDAVSLPPLTPPEAPVRGSASDPGPGSPRSSLSSPLADRRGSGGRPAAGDVTDDDVTDGDVTLTPDCEVTPRPGPVTPRSGPVTPQPGPVSVTVVLPPGSVSQSPVPSPGVMSDVSDVTSVMSSVSSTDVTSSFSTSDSSGSSTPLGTPCALTPRARRSLRTSPARPDRPSDPVSPPADRDRPSPLQRLARRFMAAIGRGGRRPAAPARRDPSPPRPDSPLLPPFPPSLEACRRSESGSELDITLETPPRAPSPSDWTLLEDLAVSSDSEAAVTEDSLPLSLRLAGTDSPPLPVAADAPSPDRAPTPPLDPAPSSPLSPADCPPPDRAETPPPDAAPRSVPAPASASSADGSPPSAAGRPPPAPSPPTDSGSGRGDERRRKRRRRRRRDRQSVPGGPARDVPGHPAPDSDPTPSGASDDEDGPLPTMVFYRSDAVLAPSSVPPRRVRTPPGFPSRGGRPPPGLPTLGDRSAAPATTEARCDRPGPEPARDGRALTDDVSRDTPGPLAVHAPPCTGARDDGPCRVPDAPPATVRTYSEVVRTPVTHTVLPVTRPVPPVTRVTRVRDGDRDNRSNRGGGGRARRGAGGLSRDRPGPSRDRPDPGPSRGAPGPSRGRAGGRAGGVSGPPRDPAGPRPTRGRGPPGDPAHRDRPSVARDPAVTRPGRGRSGGEPTGAGRGARGRGGRGGRPPADPPRAAPRVPPDPPRGSPGTAARVPPCADPPRGSPGTATRVTPGDPPRAPPGDPAGAVAGGPPRDPPRDPPTDLPANPPTDRDPAPDRPAGGARGGGRGRGRGRGASRGRDRGGAPRGRGGAAGAPAGDPAGDPDGGAGGGGRGGGRGRGRGGPGRGRGRGAGRGGGAGGAGDPAGAPDPAVAPDPTQQGPEPTELQQEFIPVLTALQETRAPWEEVERQLTRLCAEAARRNADYHERRRRPAPWRPPNERPPTDRPPAAPPAGEPRPQPAEQEPEPAEDHRRPWQPPAYAAEEASRLQRLYRSNREKAVRQVLQEDSPPCPVPGEQLAAHFAPPPCPPVEWDRRPQEVPDLTPAAPSPALTAPFRADEVWGRLRRAANTAPGPDGLRYAAWRALDPGALLLTRAFELCRLARRVPPTWLVSETALLHKGGDPTRPDSWRPIALGATVAKLYAGVWADRLSGWVEAADILSPGQKGFRPFDGVLEHNFVLQCAVNSAREDGTEAHVAFIDLANAFGSVPHSLLWQVLQRVGVPEEVVAVLQGLYEGSATRYRAGDGLTAPVACQRGVRQGCPLSGLLFSLALEPLLRALAAAQVRCLAYADDLALIFSRRSEVQDGLALLERVCAWAGLTPNPGKSALLSVGAPSPPATLCGAPLPLIDRDGAYRYLGRPVGHTRLIQPPLQVVAEARRDAARLLGSPLAPWQKLDAVRTFIAPRLTHCLRLGVIPKGALAAFDRSLRWRVKGVLNLPVNATNRYLYSPTKAGGVGLTHFSQEADILLAAATQRLLHSQDPAVAELAAAELAGAARRRVRRDPTPADLAEYLNGAPMRDDGGGVSCRSTRTRVATTALARRAAVRWRAADPPVLQVGEADVEPRRESRALREAVRQTELAELTRMPQQGKVLACVADQPVSSHYMYSGSFTRFADWRFVHRARLGLVPLNAYSRRAGADRRCRRCGYAAETLPHVTNHCLRAHAEAYQLRHNAILARLERATPVFAGDDVRVNRRVPGIDSALRPDLVVTRGDHVSLVDVTVAFENRPEALRAAAADKERKYAPLVQELRRQGKTASVHALVLGSLGTWVRGNERTLRQLRVSRVYARLMRKLMVSDTLRWSRDIYIEHITGTRQY

SEQ ID NO: 3023 - protein, 1960 aa, Amphibalanus amphitrite
MAVSPHHDPTVSLPRAADTQPRIVDGRLVLPFPLPGLLLCPVEGCGGRYANCDASTMRQSLRRHIKRCHVALTDAQWVCGGCRCRLPYHFSRHGCFAQPAAAGPVAMPHRCWCGRSFTTRRGLTNHARKCRRSPVQVDTPSLSLSRVTANADRPMADDDDALSLPPLTPPDAPLRATASDPGPGSPRSDMSSPLADRPGSGDVTLTPDDVIPGRVTPRPGPSVLPASPSDRCDTPVPAVTVTVSPGVSSVDWSPVPSPGVMSDMTSYVSSSGVTSTPSSDSSEASTPLGTPCAPTPRARWSLASLRTSPARPDPPGDPVSPTADRDRPSPLQRLARRFMAAIGRGGRRPVAPARRDPSPPRPDSPLLPPFPPSLEACRRSESGSELDITLETPPRAPSPSDWTLLEDLAVSSDSEAAVTEDSLPLSLRLAGTDSPPLPVAADAPSPDRAPTPPLDPAPSSPLSPADCPPPDRAETPPPDAAPRSVPAPASASSADGSPPSAAGRPPPAPSPPTDSGSGGGDERRRRKRRRRRRDRRAVPGGPARDVPGPGDPARPSHPGRDPPSHGSSPPRDTSGDGCGWPRRTLVFHQSRAPVPQDPVDGDPRRGLPVSDLGGPPVTPTDRGRDCAARTQLCTPTRRVRTPPGFPSRGGRPPPGFTARDVPLHGPVSPGARAAVGDSGPTRTYSEVVRTPVPHAVPPVTRPEPPAPRAVPLAPRAVPGPSRDPGGDRRANRGRGGRDGGRGRQPAANPARDAAGPSRAAAGGRPGADLTRRAPVSPRDRDPPHGGAAPRPTGGRGPPGDPAHRDRPSGARDPTVTRPGRGRSGGEPSGAGRGARGRGGRGGRPPADPPRVVPRVLPDPPRAAPRVPPDPPRGSPGTAARVAPGDPPRAPPGDPAGAVAGGPPRDPPRDPPGDLPTDPPTDRDPAPDRPASGARGGGRGRGRGRGASRGRGRGGASRGRGGAAGAPAGDPAGDPDGGAGGGGRGGGRGRGRGGPGRGRGRGAGRGGGAGGAGDPAGAPDPTQQGPEPTELQQEFIPVLTALQETRAPWEEVERQLTRLCAEAARRNADYHERRRRPAPWRPPNERPPTDRPPAAPPAGEPRPPPAEQEPEPAEDHRRPWQPPAYAAEEASRLQKLYRSNRDKAVRQVLREETPPCPVPGEQLAAHFAPPPCPPVEWDRRPQEVPDLTPAAPSPALTAPFRADEVWGRLRRAANTAPGPDGLRYAAWRALDPGALLLTRAFELCRLARRVPPTWLVSETALLHKGGDPTRPDSWRPIALGATVAKLYAGVWADRLSGWVEAADLLSTGQKGFRPFDGVLEHNFVLQSAINSAREDGTEAHVAFIDLANAFGSVPHSLLWQVLQRVGVPVEVVAVLQGLYEGSATRYRAGDGLTAPVACQRGVRQGCPLSGLLFSLALEPLLRALAAAQVRCLAYADDLALIFSRRSEVQDGLALLERVCAWAGLTPNPGKSALLSVGAPSPPATLCGAPLPLIDRDGAYRYLGRPVGHTRLTQPPLQVVAEARRDAARLLGSPLAPWQKLDAVRTFIAPRLTHCLRLGVIPKGALAAFDRSLRWRVKGILNLPINATNGYLYSPTGAGGVGLTHFAQEADILLAAATQRLLHSRDPAVAELAAAELTGAARRRVRRDPTPADLAEYLNGAPMRDDGGGVSCRSTRTRVATTALARRAAVRWRAADPPVLQVGEADVEPRRESRALREAVRRTDLADLTRLPQQGKVLACVADQPISSHYMYNGSFTRFADWRFVHRARLSLVPLNAYSRRPGADRRCRRCGYVQETLPHVLNHCLTAHAEAYQRRHDALLARLERATPVFPGDEVRVNRRVPGIDSALRPDLVVTRGDHVSLVDVTVAFENRPEALRAAAADKERKYAPLVQELRRQGKTASVHALVLGSLGTWVRGNERTLRQLRVSRVYARLMRKLMVSDTLRWSRDIYIEHITGTRQY

SEQ ID NO: 3024 - protein, 1107 aa, Amphibalanus amphitrite
MPPRADPPRGSPGSAARVPPGDPPRAPPGDPANAVTGGPPRAPPRDPPRAPPGDLPADPPTDRDPAPDRPAGGARGGGRGRGRGRGTSRGRGRGGASRGRGGAAGAPAGEPAGDPDGGAGGGGRGGGRGRGRGGPGRGRGRGAGRGGGAGGAGDPAGAPDPAGAPDPTQQGPEQTELQQEFLPLLTALQETRAPWEDVERQLTRLCAEAARRNADYHERRRRPAPWRPPNERPPADRPAAAPPAGEPRPPPAEQEPEPAEDHRRPWQPPAYAAEEASRLQKLYRSNREKAVRQVLREETPPCPVPGEQLAAHFAPPPCPPVEWDRRPQEVPDLTPAAPSPALTAPFRADEVWGRLRRAANTAPGPDGLRYAAWRALDPGALLLTRAFELCRLARRVPPTWLESETVLLHKGGDPTRPDSWRPIALGATVAKLYAGVWADRLSGWVEAADLLSPGQKGFRPYDGVLEHNFVLQCAVNSAREDGTEAHVAFIDLANAFGSVPHSLLWQVLDRIGVPEEVLTVLQGLYDGSATRYRAGDGLTAPVACQRGVRQGCPLSGLLFSLALEPLLRALAAAQVRCLAYADDLALIFSRRSEVQDGLALLERVCAWAGLTPNPGKSALLSVGAPSPPATLCGAPLPLIDRDGAYRYLGRPVGHTRLTQPPLQVVAEARRDAARLLGSPLAPWQKLDAVRAFIAPRLTHCLRLGVIPKGALAAFDRSLRWRVKGVLNLPVNATNRYLYSPTKAGGVGLTHFSQEADILLAAATQRLLHSRDPAVAELAAAELAGAARRRVRRDPTPADLAEYLNGAPMRDDGGGVSCRSTRTRVATTALARRAAVRWRAADPPVLQVGEADVEPRRESRALREAVRQTELAELTRMPQQGKVLACVADQPVSSHYMYNGSFTRFADWRFVHRARLGLVPLNAYSRRAGADRRCRRCGYVLETLPHVTNHCLQAHAEAYQLRHDAILARLERATPVFAGDDVRVNRRVPGIDSALRPDLVVTRGDHVSLVDVTVAFENRPEALRAAAADKERKYAPLVQELRRQGKTASVHALVLGSLGTWVRSNERTLRQLRVSRVYARLMRKLMVSDTLRWSRDIYIEHITGTRQY

SEQ ID NO: 3025 - protein, 1419 aa, Amphibalanus amphitrite
MPGHPAPGSDPTPSGASDDEDGPLPTMVFYRSDAVLAPSSVPPRRVRTPPGFPSRGGRPPPGFPALGDRSAAPATTEARCDRPGTEPARDGRALTDDVSRDTPGPRAVHAPPCTGARDDGPRRVPDAPAAAVRTYSEVVRTPVTHTVPPVTRPVPPVTRVTRVRDGDRDNRSNRGGGGRARRGAGGPSRDRPGPSRDRPDPGPSRGAPGPSRGRAGGRAGGVSDPPRDPAGPRPTRGRGPPGDPAHRDRPSVARDPAVTRPGSGRSGGEPAGAGRGARGRGGRGGRPPADPPRAVPRVPPDPPRGSPGAAARVPPCADSPRGSPGTATRVTPGDPPRAPPGDPAGAVAGGPPRAPPRDPPRDPPGDLPTDPPTDRDPAPGRPASGARSGGRGRGRGRGASRGRGRGGASRGRGGAAGAPAGDPAGDPDGGAGGGGRGGGRGRGRGGPGRGRGRGAGRGGGAGGAGDPAGAPDPAGAPDPTQQGPEPTELQQQFLPVLTALQETRAPWEEVERQLTRLCAEAARRNADYHERRRRPAPWRPPNERPPADRPPAAPPAGEPRPQPAEQEPEPAEDHRRPWQPPAYAAEEASRLQRLYRSNREKAVRQVLREETPPCPVPGEQLAAHFAPPPCPPVEWDRRPQEVPDLTPAAPSPALTAPFRADEVWGRLRRAANTAPGPDGMRYAAWRALDPDALLLTRAFELCRLARRVPPTWLVSETALLHKGGDPTRPDSWRPIALGATVAKLYAGVWADRLSGWVEAADLLSTGQKGFRPYDGVLEHNFVLQCAVNSAREDGTEAHVAFIDLANAFGSVPHSLLWQVLQRIGVPEDVVAVLQGLYEGSATRYRAGDGLTAPVACQRGVRQGCPLSGLLFSLALEPLLRALAAAQVRCLAYADDLALIFSRRSEVQDGLALLERVCAWAGLTPNPGKSALLSVGAPSPPAALCGAPLPLIDRDGAYRYLGRPVGHTRLTQPPLQVVAEARRDAARLLGSPLAPWQKLDAVRTFIAPRLTHCLRLGVIPKGALAAFDRSLRWRVKGVLNLPVNATNRYLYSPTTAGGVGLTHFSQEADILLAAATQRLLHSRDPAVAELAAAELTGAARRRVRRDPTPADLAEYLNGAPMRDDGGGVSCRSTRTRVATTALARRAAVRWRAADPPVLQVGEADVEPRRESRALREAVRQTELRELTQMPQQGKVLACVADQPVSSHYMYNGSFTRFADWRFVHRARLSLVPLNAYSRRAGADRRCRRCGYAAETLPHVTNHCLQAHAEAYQLRHDAILARLERATPVFAGDDVRVNRRVPGIDSALRPDLVVTRGDHVSLVDVTVAFENRPEALRAAAADKERKYAPLVQELRRQGKTASVHALVLGSLGTWVRSNERTLRQLRVSRVYARLMRKLMVSDTLRWSRDIYIEHITGTRQY

SEQ ID NO: 3026 - protein, 1972 aa, Amphibalanus amphitrite
MSAPPSRAPTVSPPRAADTQPTIDGERLVLPFPLPGLLLCPVEGCGTRYANCSASTMRQSLKRHVKRCHTELTAAQWVCGGCREELPYHFNRHGCFAQPAAAGPVAMPHRCWCGRSFTTRRGLTNHARLCRSSPVHVDTPSLSLSRVTADADRPAPGDDAVSLPPLTPPEAPVRGSASDPGPGSPRSSLSSPLADRRGSGGRPAAGDVTDDDVTDGDVTLTPDCEVTPRPGPVTPRSGPVTPQPGPVSVTVVLPPGSVSQSPVPSPGVMSDVSDVTSVMSSVSSTDVTSSFSTSDSSGSSTPLGTPCALTPRARRSLRTSPARPDRPSDPVSPPADRDRPSPLQRLARRFMAAIGRGGRRPAAPARRDPSPPRPDSPLLPPFPPSLEACRRSESGSELDITLETPPRAPSPSDWTLLEDLAVSSDSEAAVTEDSLPLSLRLAGTDSPPLPVPADAPSPDRAPTPPLDPAPSSPLSPADCPPPDRAETPPPDAAPRSVPAPASASSADGSPPSAAGRPPPAPSPPTDSGSGRGDERRRKRRRRRRRDRQSVPGGPARDVPGHPAPDSDPTPSGASDDEDGPLPTMVFYRSDAVLAPSSVPPRRVRTPPGFPSRGGRPPPGLPTLGDRSAAPATTEARCDRPGPEPARDGRALTDDVSRDTPGPLAVHAPPCTGARDDGPCRVPDAPPATVRTYSEVVRTPVTHTVLPVTRPVPPVTRVTRVRDGDRDNRSNRGGGGRARRGAGGLSRDRPGPSRDRPDPGPSRGAPGPSRGRAGGRAGGVSGPPRDPAGPRPTRGRGPPGDPAHRDRPSVARDPAVTRPGRGRSGGEPTGAGRGARGRGGRGGRPPADPPRAAPRVPPDPPRGSPGTAARVPPCADPPRGSPGTATRVTPGDPPRAPPGDPAGAVAGGPPRDPPRDPPTDLPANPPTDRDPAPDRPAGGARGGGRGRGRGRGASRGRDRGGAPRGRGGAAGAPAGDPAGDPDGGAGGGGRGGGRGRGRGGPGRGRGRGAGRGGGAGGAGDPAGAPDPAVAPDPTQQGPEPTELQQEFIPVLTALQETRAPWEEVERQLTRLCAEAARRNADYHERRRRPAPWRPPNERPPTDRPPAAPPAGEPRPQPAEQEPEPAEDHRRPWQPPAYAAEEASRLQRLYRSNREKAVRQVLQEDSPPCPVPGEQLAAHFAPPPCPPVEWDRRPQEVPDLTPAAPSPALTAPFRADEVWGRLRRAANTAPGPDGLRYAAWRALDPGALLLTRAFELCRLARRVPPTWLVSETALLHKGGDPTRPDSWRPIALGATVAKLYAGVWADRLSGWVEAADILSPGQKGFRPFDGVLEHNFVLQCAVNSAREDGTEAHVAFIDLANAFGSVPHSLLWQVLQRVGVPEEVVAVLQGLYEGSATRYRAGDGLTAPVACQRGVRQGCPLSGLLFSLALEPLLRALAAAQVRCLAYADDLALIFSRRSEVQDGLALLERVCAWAGLTPNPGKSALLSVGAPSPPATLCGAPLPLIDRDGAYRYLGRPVGHTRLIQPPLQVVAEARRDAARLLGSPLAPWQKLDAVRTFIAPRLTHCLRLGVIPKGALAAFDRSLRWRVKGVLNLPVNATNRYLYSPTKAGGVGLTHFSQEADILLAAATQRLLHSQDPAVAELAAAELAGAARRRVRRDPTPADLAEYLNGAPMRDDGGGVSCRSTRTRVATTALARRAAVRWRAADPPVLQVGEADVEPRRESRALREAVRQTELAELTRMPQQGKVLACVADQPVSSHYMYSGSFTRFADWRFVHRARLGLVPLNAYSRRAGADRRCRRCGYAAETLPHVTNHCLRAHAEAYQLRHNAILARLERATPVFAGDDVRVNRRVPGIDSALRPDLVVTRGDHVSLVDVTVAFENRPEALRAAAADKERKYAPLVQELRRQGKTASVHALVLGSLGTWVRGNERTLRQLRVSRVYARLMRKLMVSDTLRWSRDIYIEHITGTRQY

SEQ ID NO: 3027 - protein, 740 aa, Amphibalanus amphitrite
MRYAAWRALDPDALLLTRAFELCRLARRVPPTWLVSETALLHKGGDPTRPDSWRPIALGATVAKLYAGVWADRLSGWVEAADLLSTGQKGFRPYDGVLEHNFVLQCAVNSAREDGTEAHVAFIDLANAFGSVPHSLLWQVLQRIGVPEDVVAVLQGLYEGSATRYRAGDGLTAPVACQRGVRQGCPLSGLLFSLALEPLLRALAAAQVRCLAYADDLALIFSRRSEVQDGLALLERVCAWAGLTPNPGKSALLSVGAPSPPAALCGAPLPLIDRDGAYRYLGRPVGHTRLTQPPLQVVAEARRDAARLLGSPLAPWQKLDAVRTFIAPRLTHCLRLGVIPKGALAAFDRSLRWRVKGVLNLPVNATNRYLYSPTTAGGVGLTHFSQEADILLAAATQRLLHSRDPAVAELAAAELTGAARRRVRRDPTPADLAEYLNGAPMRDDGGGVSCRSTRTRVATTALARRAAVRWRAADPPVLQVGEADVEPRRESRALREAVRQTELRELTQMPQQGKVLACVADQPVSSHYMYNGSFTRFADWRFVHRARLSLVPLNAYSRRAGADRRCRRCGYAAETLPHVTNHCLQAHAEAYQLRHDAILARLERATPVFAGDDVRVNRRVPGIDSALRPDLVVTRGDHVSLVDVTVAFENRPEALRAAAADKERKYAPLVQELRRQGKTASVHALVLGSLGTWVRSNERTLRQLRVSRVYARLMRKLMVSDTLRWSRDIYIEHITGTRQY

SEQ ID NO: 3028 - protein, 300 aa, Amphibalanus amphitrite
MRDDGGGVSCRSTRTRVATTALARRAPVRWRAADPPVLQVGEADVEPRRESRALREAVRRTDLADLTRLPQQGKVLACVADQPVSSHYMYNGSFTRFADWRFVHRARLSLVPLNAYSRRPGADRRCRRCGYVQETLPHVINHCLTAHAEAYQKRHDALLARLERATPVFPGDEVRVNRRVPGLDSALRPDLVVTRGDRVTLVDVTVSFENRPEALRAAAAEKERKYAPLVQELRRQGKTASVHALVLGSLGTWVRSNETTLRQLRVSRVYARLMRKLMVSDTLRWSRDVYVEHVTGSRQY

SEQ ID NO: 3029 - protein, 300 aa, Amphibalanus amphitrite
MRDDGGGVSCRSTRTRVATTALARRAAVRWRAADPPVLQVGEADVEPRRESRALREAVRQTELRELTQMPQQGKVLACVADQPVSSHYMYNGSFTRFADWRFVHRARLSLVPLNAYSRRAGADRRCRRCGYVQETLPHVTNHCLQAHAEAYQLRHDAILARLERATPVFPGDEVRVNRRVPGIDSALRPDLVVTRGDHVSLVDVTVAFENRPEALRAAAADKERKYAPLVQELRRQGKTASVHALVLGSLGTWVRSNERTLRQLRVSRVYARLMRKLMVSDTLRWSRDIYIEHITGTRQY

SEQ ID NO: 3030 - protein, 1999 aa, Amphibalanus amphitrite
MTPPCPFPGRRTPSPRLLMAGWCSPFPSPGCSCAPWRDVGGRYANCDASTMRQSLRRHIKRCHVALTDAQWVCGGCRCRLPYHFSRHGCFAQPAAAGPVAMPHRCWCGRSFTTRRGLTNHARLCRRSPVHVDTPSLPLTAGTDRPVAGDDDLSLPPLTPPEAPVRGSVSDPGPGSPRSSLPSPLADRPGSGDVTLTPDDVIPGPVTSRPGPSVLPDGPGDRCDTPVPAVTVTVSPGVSSVDWSPVPSPGVMSDVTSRVSSSGVTSTASSDSSEASTPLGTPCAPTPRARRSLASLRTSPARPDPPGDPVSPPANRDRPSPLQRLARRFMAAIGRGGRRPVAPARRDPAPPRPDSPLLPPFPPSLEACRRSESGSELDITLETPPRAPSPSDWTLLEDLAVSSDSEAAVTEESLPLSLRLAGTDSPPLPVAADAPSPDRAPTPPLDPAPSSPLSPADCPPPERAETPPPDAAPRSVPAPASASSADGSPPAAAGRPPPAPSPPTDSGSGGGDERRRRKRRRRRRDRRGPVPRDPARDVPVPGDPARPSHPGRDPSSHSSSPPRDTSGDGCGWPRRTLVFHQSRAPVPQDPVDGDPRRGRPVSDLGGPPVTPTDRGRDCAARTQPCTPTRRVRTPPGFPSRGGRPPPGFPARDVPRDGPVSPGASAAVGDSGPTRTYSEVVRTPVPHAVPPVTRPEPPAPRAVPLAPRAVPGPSRDSGGDRRANRGRGGRDGGRGRQPAANPARAAAGPSRAAAGGRPGADLTRRAPVSPRDRDPPHGGAAPRPTGGRGPPGDPAHRDRPGGARDPTVTRPGRGRSGGEPSSAGRGARGRGGRGGRPPADPPRAVPRVPPDPPRGSPSATVRVPPCADPPRGSPGAAARVPPDPPRGSPGAAARVPPRADPPRGSPGAAARVTPGDLPRAPPGDPAGAVAGGPPRAPPCAPPGDLPTDPPTDRDPAPDRPAGGARGGGRGRGRGRGASRGRGRGGASRGRGGAAGAPAGAPAGDPAGDPDGGAGGGGRGGGRGRGRGGPGRGRGRGAGRGGGAGGAGDPAGAPDPAGAPDPTQQGPEPTELQQQFLPVLTALQETRAPWEDVERQLTRLCAEAARRNADYHERRRRPAPWRPPNERPPADRPPAAPPAGEPRPPPAEQEPEPAEDHRRPWQPPAYAAEEASRLQKLYRANRDKAVRQVLREETPPCPVPGEQLAAHFAPPPCPPVEWDRRPQEVPDLTPAAPSPALTAPFRADEVWGRLRRAANTAPGPDGLRYAAWRALDPGALLLTRAFELCRLARRVPPTWLVSETALLHKGGDPTRPDSWRPIALGATVAKLYAGVWADRLSGWVEAADILSPGQKGFRPFDGVLEHNFVLQCAVNSAREDGTEAHVAFIDLTNAFGSVPHSLLWQVLQRVGVPEEVVAVLQGLYEGSATRYRAGDGLTAPVACQRGVRQGCPLSGLLFSLALEPLLRALAAAQVRCLAYADDLALIFSRRSEVQDGLALLERVCAWAGLTPNPGKSALLSVGAPSPPATLCGAPLPLIDRDGAYRYLGRPVGHTRLSQPPLQVVAEARRDAARLLGSPLAPWQKLDAVRTFIAPRLTHCLRLGVIPKGALAAFDRSLRWRVKGILHLPINSTNRYLYSPTTAGGVGLTHFSQEADILLAAATQRLLHSRDPAVAELAAAELIGAARRRVRRDPTPADLAEYLNGAPMRDDGGGVSCRSTRTRVATTALARRAAVRWRAADPPVLQVGEADVEPRRESRALREAVRQTELRELTQMPQQGKVLACVADQPVSSHYMYNGSFTRFADWRFVHRARLSLVPLNAYSRRAGADRRCRRCGYVQETLPHVTNHCLQAHAEAYQLRHDAILARLERATPVFPGDEVRVNRRVPGIDSALRPDLVVTRGDHVSLVDVTVAFENRPEALRAAAADKERKYAPLVQELRRQGKTASVHALVLGSLGTWVRSNERTLRQLRVSRVYARLMRKLMVSDTLRWSRDIYIEHITGTRQY

SEQ ID NO: 3031 - protein, 2005 aa, Amphibalanus amphitrite
MSVSPHHDPPVSLPRAADTQPQIVDGRLVLPFPLPGLLLCPVEGCGGRYANCDASTMRQSLRRHIKRCHVALTDAQWVCGGCRCRLPYHFSRHGCFAQPAAAGPVAMPHRCWCGRSFTTRRGLTNHARLCRRSPVHVDTPSLPLTAGTDRPVAGDDDLSLPPLTPPEAPVRGSVSDPGPGSPRSSLPSPLADRPGSGDVTLTPDDVIPGPVTSRPGPSVLPDGPGDRCDTPVPAVTVTVSPGVSSVDWSPVPSPGVMSDVTSRVSSSGVTSTASSDSSEASTPLGTPCAPTPRARRSLASLRTSPARPDPPGDPVSPPANRDRPSPLQRLARRFMAAIGRGGRRPVAPARRDPAPPRPDSPLLPPFPPSLEACRRSESGSELDITLETPPRAPSPSDWTLLEDLAVSSDSEAAVTEESLPLSLRLAGTDSPPLPVAADAPSPDRAPTPPLDPAPSSPLSPADCPPPERAETPPPDAAPRSVPAPASASSADGSPPAAAGRPPPAPSPPTDSGSGGGDERRRRKRRRRRRDRRGPVPRDPARDVPVPGDPARPSHPGRDPSSHSSSPPRDTSGDGCGWPRRTLVFHQSRAPVPQDPVDGDPRRGRPVSDLGGPPVTPTDRGRDCAARTQPCTPTRRVRTPPGFPSRGGRPPPGFPARDVPRDGPVSPGASAAVGDSGPTRTYSEVVRTPVPHAVPPVTRPEPPAPRAVPLAPRAVPGPSRDSGGDRRANRGRGGRDGGRGRQPAANPARAAAGPSRAAAGGRPGADLTRRAPVSPRDRDPPHGGAAPRPTGGRGPPGDPAHRDRPGGARDPTVTRPGRGRSGGEPSSAGRGARGRGGRGGRPPADPPRAVPRVPPDPPRGSPSATVRVPPCADPPRGSPGAAARVPPDPPRGSPGAAARVPPRADPPRGSPGAAARVTPGDLPRAPPGDPAGAVAGGPPRAPPCAPPGDLPTDPPTDRDPAPDRPAGGARGGGRGRGRGRGASRGRGRGGASRGRGGAAGAPAGAPAGDPAGDPDGGAGGGGRGGGRGRGRGGPGRGRGRGAGRGGGAGGAGDPAGAPDPAGAPDPTQQGPEPTELQQQFLPVLTALQETRAPWEDVERQLTRLCAEAARRNADYHERRRRPAPWRPPNERPPADRPPAAPPAGEPRPPPAEQEPEPAEDHRRPWQPPAYAAEEASRLQKLYRANRDKAVRQVLREETPPCPVPGEQLAAHFAPPPCPPVEWDRRPQEVPDLTPAAPSPALTAPFRADEVWGRLRRAANTAPGPDGLRYAAWRALDPGALLLTRAFELCRLARRVPPTWLVSETALLHKGGDPTRPDSWRPIALGATVAKLYAGVWADRLSGWVEAADILSPGQKGFRPFDGVLEHNFVLQCAVNSAREDGTEAHVAFIDLTNAFGSVPHSLLWQVLQRVGVPEEVVAVLQGLYEGSATRYRAGDGLTAPVACQRGVRQGCPLSGLLFSLALEPLLRALAAAQVRCLAYADDLALIFSRRSEVQDGLALLERVCAWAGLTPNPGKSALLSVGAPSPPATLCGAPLPLIDRDGAYRYLGRPVGHTRLSQPPLQVVAEARRDAARLLGSPLAPWQKLDAVRTFIAPRLTHCLRLGVIPKGALAAFDRSLRWRVKGILHLPINSTNRYLYSPTTAGGVGLTHFSQEADILLAAATQRLLHSRDPAVAELAAAELIGAARRRVRRDPTPADLAEYLNGAPMRDDGGGVSCRSTRTRVATTALARRAAVRWRAADPPVLQVGEADVEPRRESRALREAVRQTELRELTQMPQQGKVLACVADQPVSSHYMYNGSFTRFADWRFVHRARLSLVPLNAYSRRAGADRRCRRCGYVQETLPHVTNHCLQAHAEAYQLRHDAILARLERATPVFPGDEVRVNRRVPGIDSALRPDLVVTRGDHVSLVDVTVAFENRPEALRAAAADKERKYAPLVQELRRQGKTASVHALVLGSLGTWVRSNERTLRQLRVSRVYARLMRKLMVSDTLRWSRDIYIEHITGTRQY

SEQ ID NO: 3032 - protein, 1957 aa, Amphibalanus amphitrite
MSAPPSRAPTVSPPRAADTQPTIDGERLVLPFPLPGLLLCPVEGCGTRYANCSASTMRQSLKRHVKRCHTELTAAQWVCGGCREELPYHFNRHGCFAQPAAAGPVAMPHRCWCGRSFTTRRGLTNHARLCRSSPVHVDTPSLSLSRVTADADRPAPGDDAVPLPPLTPPEAPVRGSASDPGPGSPRSSLSSPLADRRGSGGRPAAGDVTDDDVTDGDVTLTPDCEVTPRPGPVTPRSGPVTPQPGPVSVTVVLPPGSVSQSPVPSPGVMSDVSDVTSVMSSVSSTDVTSSFSTSDSSGSSTPLGTPCALTPRARRSLRTSPARPDPPGDPVSPPANRDRPSPLQRLARRFMAAIGRGGRRPAAPARRDPSLPRPDSPLLPPFPPSLEACRRSESGSELDITLETPPRAPSPSDWTLLEDLAVSSDSEAAVTEDSLPLSLRLAGTDSPPLPVPADAPSPDRAPTPPLDPAPSSPLSPADCPPPDRAETPPPDAAPRSVPAPASASSADGSPPSAAGRPPPAPSPPTDSGSGGGDERRRRKRRRRRRDRRGPVPRDPARDVPVPGDLTCSSHPGRDPSSHGSPPPRDTSGDGCGWPRRTLVFHQSRAPVPQDPVDGDPRRGPPVSDLGGPPVTSTDRGRDCAARTQPCTPTRRVRTPPGFPSRGGRPPPGFPARDVPLHGPVSPGARAAVGDSGLTRTYSEVVRTPVPHAVPPVTRPEPPAPRAVPPAPHAVPGPSRDPGGDRRANRGRGGRDGGRGRQPAANPARAAAGGRPGADLTRRAPVSPRGRDPPHGGAAPRPTRGRGPPGDPAHRDRPSVARDPAVTRPGRGRSGGEPTGAGRGARGRGGRGGRPPADQPRVTPRVPPDPPRGSPGATARVPPGHPPRAPPGDPAGAVAGGPPRAPPRDPPGDPPGDPPTDRDPAPDRPAGGARGGGRGRGRGRGASRGRGRGGASRGRGGAAGAPAGDPAGDPDGGAGGGGRGGGRGRGRGGPGRGRGRGAGRGGGAGGAGDPAGAPDPAVAPDPTQQGPEPTELQQEFLPILTALQETHTPWEDVERQLTRLCAEAARRNADYHERRRRPAPWRPPNERPPADRPPAGEPRPPPAEQEPEPAEDHRRPWQPPAYAAEEASRLQRLYRSNREKAVRQVLREETPPCPVPGEQLAAHFAPPPCPPVEWDRRPQEVPDLTPAAPSPALTAPFRADEVWGRLRRAANTAPGPDGLRYAAWRALDPGALLLTRAFELCRLARRVPPTWLVSETALLHKGGDPTRPDSWRPIALGATVAKLYAGVWADRLSGWVEAADLLSTGQKGFRPFDGVLEHNFVLQSAINSAREDGTETHVAFIDLTNAFGSVPHSLLWQVLQRVGVPEEVVAVVQGLYQGSATRYRAGDGLTAPVACQRGVRQGCPLSGLLFSLALEPLLRALAAAQVRCLAYADDLALIFSRRSEVQDGLALLERVCAWAGLTPNPGKSALLSVGAPSPPATLCGAPLPLIDRDGAYRYLGRPVGHTRLIQPPLQVVAEARRDAARLLGSPLAPWQKLDAVRAFIAPRLTHCLRLGVIPKGALAAFDRSLRWRVKGVLNLPINATNHYLYSPTGAGGVGLTHFAQEADILLAAATQRLLHSRDPAVAELAAAELTGAARRRVRRDPTPADLADYLNGVAMRDDGGGVSCRSTRTRVATTALARRAPVRWRAADPPVLQVGEADVEPRRESRALREAVRRTDLADLTRLPQQGKVLACVADQPVSSHYMYNGSFTRFADWRFVHRARLSLVPLNAYSRRPGADRRCRRCGYVQETLPHVINHCLTAHAEAYQKRHDALLARLERATPVFPGDEVRVNRRVPGLDSALRPDLVVTRGDRVTLVDVTVSFENRPEALRAAAAEKERKYAPLVQELRRQGKTASVHALVLGSLGTWVRSNETTLRQLRVSRVYARLMRKLMVSDTLRWSRDVYVEHVTGSRQY

SEQ ID NO: 3033 - protein, 1975 aa, Amphibalanus amphitrite
MSAPPSRAPTVSPPRAADTQPRIDGDRLVLPFPLPGLLLCPVEGCGFRYANCVPSTMRHSLKRHIKRCHVDLSVAQWVCGGCGARLPYHFSRHGCFAQPAAAGPVAMPHRCWCGRSFTTRRGLTNHARLCRRSPVHVDTPSLPLTAGTDRPVAGDDDLSLPPLTPPEAPVRGSASDPGPGSPRSNMSSPQADRRGSGGRPAADDVTDGDGGSPAPSDVSDSDVTVVSHSPSVDHGPVTPRPGPVTPRPGPVTPRPFPVRVTVTVPPGSVSQSPVPSPGVMSDVSDVTSVMPSVSSTDGSATPTSDSSGSSTPLGTPCAPTPRARRSLASLRTSPARPDPPGDPVSPPADRDRPSPLQRLARRFMAAIGRGGRRPAAPARRDPAPPRPDSPLLPPFPPSLEACRRSESGSELDITLETPPRAPSPSDWTLLEDLAVSSDSEAAVTEDSLPLSLRLAGTDSPPLPVAADAPSPDRAPTPPLDPAPSSPLSPADCPPPDRAETPPPDAAPRSVPAPASASSADGSPPTAAGRPPPAPSPPTDSGSGGGDERRGRRRRRRRRDRRGPVPSDPARDMPGHPAPDSDPTPSGASDDEDGPLPTMVFYRSDAVLAPSSVPPRRVRTPPGFPSRGGRPPPGFPALGDRSAAPATTESRRDRPGPEPARDGRALTDDVSRDTPGPRAVHAPPCTGARDDVPRRVPDAPAAAVRTYSEVVRTPVTHTVPPVTRPVPPVTRVTRVRDGDRDNRPNRGGGGRARRGAGGPSRDRPGPSRDRPDPGPSRGAPGPSRGRAGGRAGGVSDPPRDPAGPRPTRGRGPPGDPAHRDRPSVARDPAVTRPGRGRSGGEPAGAGRGARGRGGCGGRPPADPPRAVPRVPPDPPRGSPSAAARVTPGDLPRAPPGDPAGAVAGGPPRDPPRDPPTDLPADPPTDRDPAPDRPASGALGGGRGRGRGRGASRGRGRGGASRGRGGAAGAPAGDPAGDPDGGAGGGGRGGGRGRGRGGPGRGRGRGAGRGGGAGGAGDPAGAPDPAGAPDPAGAPDPTQQGPEPTELQQEFLPVLTALQETRAPWEEVERQLTRLCAEAARRNADYHERRRRPAPWRPPNERPPADRPPAAPPAGEPRPPPAEQEPEPAEDHRRPWQPPAYAAEEASRLQKLYRANRDKAVRQVLREETPPCPVPGEQLAAHFAPPPCPPVEWDRRPQEVPDLTPAAPSPALTAPFRADEVWGRLRRAANTAPGPDGLRYAAWRALDPGALLLTRAFELCRLARRVPPTWLESETVLLHKGGDPTRPDSWRPIALGATVAKLYAGVWADRLSGWVEAADLLSTGQKGFRPFDGVLEHNFVLQSAINSAREDGTEAHVAFIDLANAFGSVPHSLLWQVLQRVGVPEEVVAVVQGLYEGSATRYRAGDGLTAPVACQRGVRQGCPLSGILFSLALEPLLRALAAAQVRCLAYADDLALIFSRRSEVQDGLALLERVCAWAGLTPNPGKSALLSVGAPSPPATLCGAPLPLIDRDGAYRYLGRPVGHTRLTQPPLQVVAEARRDAARLLGSPLAPWQKLDAVRAFIAPRLTHCLRLGVIPKGALAAFDRSLRWRVKGVLNLPVNATNRYLYSPTKAGGVGLTHFSQEADILLAAATQRLLHSQDPAVAELAAAELAGAARRRVRRDPTPADLAEYLNGAPMRDDGGGVSCRSTRTRVATTALARRAAVRWRAADPPVLQVGEADVEPRRESRALREAVRQTELAELTRMPQQGKVLACVADQPVSSHYMYNGSFTRFADWRFVHRARLGLVPLNAYSRRAGADRRCRRCGYVQETLPHVTNHCLQAHAGAYQLRHDAILARLERATPVFAGDDVRVNRRVPGIDSALRPDLVVTRGDHVSLVDVTVAFENRPEALRAAAADKERKYAPLVQELRRRGKTASVHALVLGSLGTWVRGNERTLRQLRVSRVYARLMRKLMVSDTLRWSRDIYIEHITGTRQY

SEQ ID NO: 3034 - protein, 932 aa, Cardiocondyla obscurior
MTMMARKEAQLMKSNTPPRFMNQELVRCFPDRTVEAIKGKRKQLAYRNLVTALLDEEDAGEEEIIEYPNTEETDVAEENILKYLESLRKPRCEGYNTEQLCKIIREARSSGKETTLQKAALYIRETFHLPPKRRKKPRQTTIQAEENNRKRRRREYAATQELWKRDRKRCVSNILEDLNNVAQPPRDIMEPYWSAVMSTTADQRPSIRRSQNHEGIWCPITQEDLKWGRLSNTTAAGPDQISARLLRSVPSEVLIRIFNLIMWCGDLPEDLLKSRTVFLPKKKDPESPGDFRPITIPSVLVRSMHKILAKRMDTTLDIDPRQRAFRKTDGCADNTFLLDTLLRAHRRYFKPLYMASLDVAKAFDSVSHEAIEAVLMNAGVPIAMVRYLRKIYQRSSTILEGEEWISRPIHPQRGVRQGDPLSPIIFNVVTHHLLQKVSKDIGVRLGETLINAAAFADDILLFASTSKGLQQLIDEVSTGLEECGMKLNPAKSITLSLKVAPHIKKTAVDETSIFTVYGQRLTPVKRTDQWKYLGIQFTPEGKSQCKPMEMLQPLLNKITRAPLKPQQRLFTLRTFVVPKLHHQLALGATTIGTLNKVDKLLRHAARRWLALPHDVPTAYFHAAVKDGGLGIPSLRWTGPLQRRGRLIAARRTHFQQGFNEFFNSEIEKCTRRLTDHGITYSTPELVAKRWSNKLYASVDGKALEESSKTPHQNQWVADATKLLSGKDFVNCGRLRIGALPTRSRTTRGRNMERRCRGGCTAQETINHVLQHCHRTHAGRIKRHNAVVAYIERNIKKNGYETYNEPHYNTPLGLRKPDLVAILGQTAIIVDAQIVGEQADLRRAHERKITHYSEDGVTQAIKARHQVQTVIQTSATLTWRGIWSPQSAKDLRRLGIIRASDLKILSTRVLIGGLAEFKTFNANTSWKWRSGIG

SEQ ID NO: 3035 - protein, 2136 aa, Apteronemobius asahinai
MSSPGFYGLRTGNKPKKKDQRIPRFEDSTTRVVSHIVGLQSIAPEEPWTPDRRKDRPQSPPPPMSPPPPPPPQECPLSPVKLGPFTSLLPPGPPQQGPADRTPEKSGPMSPKLAGSPPPLPPRRAADRIGSPEGSGPRSPKLAGTPPPLPPRSPANSTPPSSSYRNSSALPDGGSECELPVNLLGLTDSPTNVVPSPVLPPQGLADGASVGNAPVSLNLSEALSPPSPQQLLGVPQTQLSECDDVPQSEAEEVCQSQRGPLGLLLPLMEVVPEVLSPIPSTPPSSSEENEGEDRDEQRLSEKEHVEPTASIWQLMLDSPARVPTPPLEQIDLQAGQHLVRVTPRHPWLSAGVVTVCNPTPAEVICPLCPADAPLLAVGRWKKGAMGVEEHVRTMHGAGVKHTCVGCKGEIPHARCYGLRNVLITTEVASFEPASMEYPRVEVGGGKVLGPQPVLNAARDQNGQWLLPFPTPEAVVCPDCRHPVAAMGEPKKRRDSFIAHVARKHGASTATICLGCRVVMTDLRDHLSRCTASHRCSAPLAPLSLLPVACRFCGLRFLNTRQAKIHARTHRRREAASSIDATPPEHETARTIKCRIKTALAPPAAPVPQPVAAEEAAQDGGKGDKQGSTVSFAEVVVTTAPAPPRLLPLEQQGAELPRAPRTQPAGDAKATCLPARNSKPGKGRKAPPGASWRGPRMRTPQAVVDEERRVPTREEKQLAKLKLSWHQRAVLERAFGPLHQALARSRAVQECEKGTELAGTSASAAVTPPPLMLPSTTAAREGHYASRSSPPKSPPKQQKPNKQGILRHGEDPKKGRKKTVTWGPSPAATPPAQLAASSDGLIGPGDQDLQPAAIRSPEPKSPDPPSEETWKNGKKKKKKKTVTQCPAPSATPPDMLAASSRDPRSPVVPDTQPVVARGPESGAEVSPPIVEPFVRPPSPPAVASAHPGRMPKKPAGRRRRTENQSSVDNNPAPNRATAAAEEDAREGEAAGARATGRKEDEVLRELESTFSRLAGAPTTGGSEREFAEAYEAFVARAQELVRLPPARDFKERGDSVDPDDDAVYLRRLYGRNPRRAIRRILGDNSPRCGLPREVLQAHFEEVMGTAPSCDLEGLYPTVEDRDTIPDAPFTAKEVLKRLAHAVNSAPGADRLTYHHLRSVDPEARVLTAIFNCALHQKKMPEAWRRSRTCLIHKGGEEDVISNWRPIALMPTMAKLWAGLWAARFTAWAEANEVLSSAQKGFRPFDGVLEHNFVLQSTIDRCRQKRKPLCLAFLDLANAFGSTPHAAIMEAARAAGVGETFLEVVADLYSGTSTEVLAGDGSTPPIPAQCGIRQGCPLSCHLFNLAVDVAIREVEELPPAQPSVLAYADDLVLLAASPQELQTRIDRVAACLQRIGVRVNPAKCRTLHLDPPEVRSTKFHVGSDSLPSLRYAEATKYLGRPVGYQVVPTWEELRRAQGVATKLAESSLHPWQQLEAMKRFLAPTLTFPLRMGSFTQKQMASMDAALRPPLKQILRLPETATNSYLYGSRAAGAVGYPEMKREGDIWSVDLGFKILTSRDPQVRSAARAAVEEEATTCLRAPLTPQLLGNYLSGGRTRRGLNATSVWRRVRAASRRLGLEWRFPEAAGEPPTIAIPTSPSSHDELTPEPAEEEDSVSAPIDLTATSSSGGNEEEGAPTAAGDEDASASQSGEAEEEPPTTQMEAVCSEGAPVAQEEEPFKTIPPKHRHLLVKQLRAVGQRGHDAAWRKKPDQGRTAAELQRNGHLSSYFLDDGGGCDWLTWRFANCARVNKLWGLRHKVWANNDPSASACRKGCVTDAGTRCLETLAHVVNECRQHGTQMTLRHNKIVKSLKSAALGAGYTVLGESRAFTDLGLRPDLVVSKGTAAVIYEVAVPWAGYPGCLARRRADKIEKYQSVRTHLLTAGFRDVQIQPVVVGALGEWESGNDAALKIIEPNKRRRRDLSRGMVMNVLVGSRSIYHKHIGRSDLARPEYRRSGRGAATPMEDAAAQDSTTTRASLAAERDAASGLIVAGHQSPPTAPAAGKDGCSAAAEGGIREAVGVGATQNQKCAADSAVPRDSSQAVEESPCSRELETSNQSSPVPLTPNQLYFGKKKINKEKELKKRALRAVFSLFPWQPES

SEQ ID NO: 3036 - protein, 1008 aa, Nephila pilipes
MCPDFSASTITAKRNHIAFHNRQKILENKTPLIVPPSASKTKKQRKKRIQDLSEGLPGDTPLARPQRKSYEQPPAIEEEDLPSQEKIDLEHPSLLDSFIEPLDALFDVDEIDNVLPTFENIVSNIVSVIQDHFHLARPSASNPSAKQTTSKAFDPQDAQRVQKLYHWNRKRCIRNIQNPASSRCSISKVNLVNHFTNIWSPPVVPTDFPSVTPPDLPPVVDFLSPEMVFSCLQGCENSAPGPDLISYKHWREIDPRGIILSKIFNICLKIKKIPPAWKQSSCVLIPKSGDPLNIENWRPISLSSTMYKLFTKCLTRKLQDWCETHGVISNCQKGFTPFDGVVEHNFVIGQHMELARRSHSDCFFVWLDISNAFGAIPHDVLFTALTNHGIDFDFIDIVRDIYLNSFTQILSNEGPTEPIPLLCGVKQGCPLSGLLFNLSINHILFHLQKDFSSHSVLAFADDLVLIGNSRDEIQDLLNVAVSSLHKIGLHLNPAKCASLHLSGAAPTGARPTTLTINSSPIKFLTEAEAYLYLGKPVGFNIVPDYNSINDALKFASSIATSKLAPWQKLDAMKTFFFPSLCFAMRTSQFQKKDWSTVDTAVIREIKDSLYLPSNASNAYLHGNVDSGGCGIPSAAADSDFYLIDTAFKLLTSRDPEVVSMAVGQLNRTIKPRIRRNPADGDLASFMSGSMEDTFSVTTNAASNIWTRARAASRRVGVTWSFSDGFLSLLFDETNISSSSRRRLMKIFHRYFKMTHSNKLIQAPSQGKAMECVGLHKSSSHFIRDGKFTRFADWRFVHKARLNLVPLNANKRWKGENFDKRCRRCGEHDETLPHVINHCMAYSDALQKRHNAIFERVKNAVAFKGKILSQNQAVGESGIRPDLVALINNKIYLLDVTIPFENHARAFEIARQNKIKKYLPLVDFFKKLGYRQVEIVPIIVGSLGSWDPENDRFLRKIATVTFLKFFRKLCVSDCIHWSRDIYIQHLTGKKQYGDLPPSSGVASDAEDED

SEQ ID NO: 3037 - protein, 998 aa, Nephila pilipes
MAKRNHLASHKRQTIVEKNTPLIIPPSSSNIKKKRRQRIQALSEGHPGDTPLARPQNNAAAPIPTEEDENVPLQEKLDLEQPSLLNSFMDPLDALFNVDEIDNMLPTFETVVSDIVSVIQDHFKLSKPTASNTSKNKNSFKPFDPQDAQRVQKLYHWNRKRCVRNLQNPVSSRCSIHKSKLFEHFSKTWSPSPIPLDFPSATPPDLPPVVDFLSPEMVFSCLQGCENSAPGPDLVSYKHWREIDPRGIILSKIFNICIKIKKIPPSWKQSSCVLIPKKGDLSLTENWRPISLSSTIYKLFTKCLTRTLQDWCETHGVISNCQKGFTPFDGVVEHNFVIGQHMELARRSHSDIFFIWLDISNAFGSIPHEVLFKALSNHGIDSDFVDIVHDIYSDTFTQILSNEGPTEPIPLLCGVKQGCPLSGLLFNLSINHILFKLQKNYASHSVLAFADDLVLIGNSRDEVQDLLNDAITSLQKIGLSLNPAKCASLHLSGAAPTGARPTAFSINSSNIKFLSEAEAYLYLGKPVGFNVSPEYNSINDALQFANTISSSKLAPWQKLDALKTFFLPSLCFAMRTSQFPKRDWSTIDTALVKEIKEILYVPSNASNAYLHGAVDSGGCGIPSAAADSDFYLIDTAFKLLTSRDPEVMSMAVGQLNRTIKPRIRRDPADGDLSSFMSGSMEDTFSVTTNAASNIWTRARTASRRVGVSWSFSDGFPSLNFDETVITSSSRRRLMKIFHQFFRMTNSNKLVQAPSQGKAMECVGLHKSSSHFLNDGKFTRFADWRFVHKARLSLVPLNANKKWKGENFDKRCRRCGEHDETLPHVINHCMAYSDALQKRHNAILERVKNAVAFKGKILSQNQAVGESGLRPDLVALIKNKIYLLDVTIPFENRARAFEIARKNKISKYLPLVDFFKKLGYRQVEIVPIIVGSLGSWDPENDRFLRRIATVGFLKLFRKLCVSDCIRWSRDIYIQHLTGKKQYGDLPPSSGVASDAEDED

SEQ ID NO: 3038 - protein, 782 aa, Nephila pilipes
MVFSCLQGCENSAPGPDLISYKHWREIDPRGIVLSKIFNICIKIKKILPAWKQSSCVLIPKKGDPSIIESWRPISLSSTIYKLFTKCLTRRLQDWCETHGVISNCQKGFTPFDGVVEHNFVIGQHMEFARRSHSDCFFVWLDISNAFGSIPHDVLFTALSNHGIDLDFIDIVRDIYLHSFTQILSNEGPTEPIPLLCGVKQGCPLSGLLFNLSINHILFKLQRDFSSHSVLAFADDLVLIGNSRDEIQDLLNIAVSSPQKIGLHLNPAKCASLHLSGAAPTGTRPTVLSINSTPIKFLSEAEAYLYLGKPVGFNIVPDYNSVNDALSFANSIATSKLVPWQKLDALKTFFFPSLCFAMRTAQFPKRDWSTVDTAVIKETKDYLYLPSNASNAYLHGAVDTGGCGIPSAATDSDFYLIDTAFKLLTSRDPEVMSMAVGQLNRTIKPRIRRDPADGDLSSFMSGSMEDTFTITTNAASNIWTRARAASRRVGVTWSFSDGFPSLLFDETNISSSSRRRLMRIFHRSFRTTQSNKLVQAPSQGKAMECVGLHKSSSHFITDGKFTRFADWRFIHKARLNLVPLNANKKWKGDNFDKRCRRCGEHDETLPYVINHCMAYSDALQKRHNAILERLKNAVSFKGKVLSQNQAVGDSGLRPDLVALINNKMFLLDVTIPFENRARAFEIARRNKITKYLPLVDFFKKLGYKQVEIVPIIVGSLGSWDPENDRFLRKIATVGYLKLFRKLCVSDCIHWSRDIYIQHLTGKKQYGDLPPSSGVASDVEDVD

SEQ ID NO: 3039 - protein, 1175 aa, Nephila pilipes
MTVDLKLPKKVSFKLSNNILVPPPTSDAASSPPDILPPPPSFSEIDPDFKTPPARRQANSTTQSSINPVKFVSFENNVLKYFFPIQKKLCCPVPNCSASFGTKLWYLTNSSLKKHLNVFHKSKPSKIEFFCTICDSKISKLPSKHNCLINNLILPPDPIDDDVWVCDLCPDFSASSAIAKRNHLASHKRQTIVEKNTPLIIPPSSSTTKKKRRRRIQDLSEGHPGDTPLACPRNNTSAPSPTEDDDNVPLQEKLDLEQPSLLNSFVEPLDALFDVDEIDNILPTFESVVSDIVSVIQDHFKLSKPTASNSSKKNKPFKPFDPQDAQRVQKLYHWNRKRCVRNLQNPVSSRCAIPKLKLSEHFSKTWSPSSLQIDFPSVTPPDLPPVVDFLSPEMVFSCLQGCENSAPGPDLISYKHWREIDPRGIILSKIFNICIKIKKIPPSWKQSSCVLIPKKGDLSITENWRPISLSSTIYKLFTKCLTRTLQEWCETHGVISNCQKGFTPFDGVVEHNFVIGQHMEMARRSHSDIFLIWLDISNAFGSIPHEVLFRALSNHGIDPDFVDIIRDIYNNSFTQILSNEGPTEPIPLLCGVKQGCPLSGLLFNLSINHILFNLQKNYASHSVLAFADDLVLISNSRDEVQDLLNVAISSLQKIGLSLNPEKCASLHLSGAAPTGARPTIFKINSSNIKFLSEAEAYLYLGKPVGFNISPDYNNLNDALKFANSISSSKLAPWQKLDALKTFYLPSLCFAMRTSQFPKKDWSTIDTALVKELKEILYLPSNASNAYLHGAVDSGGCGVPSAAADSDYYLIDTAFKLLTSRDPEVMSMAVGQLNRTIKPRIRRDPADGDLSSFMSGSMEDTFSVTTNAASNIWTRARTASRRVGVTWSFSDGFPSLNFDETVITSSSRRRLMKIFHQHFRSTNTNKLVQAPSQGKAMECVGLHKSSSHFLKDGKYTRFADWRFVHKARLNLVPLNANKKWRGENFDKRCRRCGEHDETLPHVINHCMAYSDALQKRHNSILERIKNAVAFKGKIMSQNQAVGDSGLRPDLVALVKNKIYLIDVTIPFENRARAFEIARKNKINKYLPLVDFFKKLGYRQVEIVPIIVGSLGSWDPENDRFLRRIATVSFLKLFRKLCVSDCIRWSRDIYIQHLTGKKQYGDLPPSSGVASDAEDVD

SEQ ID NO: 3040 - protein, 1930 aa, Nephila pilipes
MSDSSSSDSPPQGTDFSNKLNKSTTPVALRTRHFSSQVSFRRAAELGQCKICPAQFDSPLRLRKHVINHKSNTKRRKALEAIDSLYQSTPKPDVSSSTQPRSLFEKFKTSFPELFSQEMLRNPDPHSIFDSEASSSQFVSKSNPIVSPIVSPPIQFDSQPSGSPHDDDILSTINKLITSVTEILERPSFIDKELSSRSSLQPISTLPNSSSTRQNIIQTTAYSKSPSYSSSPDASSFHPPTSSLRPADSASPAVVLPCSSLPSPIARVPVVPVLSSPAPSIASPRCPSSPAASSSSVQDSSSVPPAENELLFFDPKPQRRAHDDSSNSSASSEIEKILNSALPDSALSPIVSSLRECVASFPSARVSPDVLDLLLASSPNSDVLSPDSTASSPTKSTKSPPSIPAPLEVKTVPAFPKNTYAQALRKVLAKCPFCELKFYSQRTCDSHVLNLHNPAAIKTNIPNNQEPSVNSEKSSLNPQKIQKKKILAPESNIPSKSSKKVTSEPKVQNPPKNSVKTPNRKSLVHPVTSYQRKILSLGEPEKKPPNVCLFPNLPSYQFFCRHCQEYFPSDQSLAEHIKTNHNLLLNISGQTFQSKIIPATEQASEINLKISSKPKIIDHSQNVIVPIVEDHTDLVSPVKAFIEQLYIPDPEKVKKNPVKKGCLLPNLSKTISDNNSPDHSPPAGEVQVSVEIHKKPASQPSPPKLCNLCDFVAKKKSGLRLHFYKEHRFTIIPPPSHLADLSAAIDVLPSQEDPPPMTVDLEMPKKVSFKLSNNILVPPPTSDAASSPPETLPPPPSFSEIDPDFQTHPARRQTNSTTQSSINPVKFVSFENKILKYFFPLQKKLCCPVPNCSASFGTKLWYLTNSSLKKHLNVFHKSKPSKVEFFCTICDSKISKLPSKHNCLINNLILPPDPIDDDVWVCDLCPDFSASSAIAKRNHLASHKRQTIVEKNTPLIIPPSSSTTKKKRRKRIQDLSEGHPGATPLARPQNNASTIQTEDDDNVPLQEKLDLEQPSLLNSFVEPLDALFDVDEIDNILPTFESVVSDIVSVIQDHFKLSKPAASNSSKNNRPFKPFDPQDAQRVQKLYHWNRKRCVRNLQNPVSSRCAIPKLKLSEHFSKTWSPSSLQIDFPSVTPPDLPPVVDFLSPEMVFSCLQGCENSAPGPDLITYKHWREIDPRGIILSKIFNICIKIKKIPPSWKQSSCVLIPKKGDLSITENWRPISLSSTIYKLFTKCLTRTLQEWCETHGVISNCQKGFTPFDGVVEHNFVIGQHMELARRSHSDIFLIWLDISNAFGSIPHEVLFRALSNHGIDSDFVDIIRDIYNNTFTQILSNEGPTETIPLLCGVKQGCPLSGLLFNLSINHILFNLQKNYASHSVLAFADDLVLISNSRDEVQDLLNVAISSLQKIGLSLNPEKCASLHLSGAAPTGARPTIFKINSSNIKFLSEAEAYLYLGKPVGFNISPDYNNLNDALKFANSISSSKLAPWQKLDALKTFYLPSLCFAMRTSQFPKKDWSTIDTALVKELKEILYLPSNASNAYLHGAVDSGGCGVPSAAADSDFYLIDTAFKLLTSRDPEVMSMAVGQLNRTIKPRIRRDPADGDLSSFMSGSMEDTFSVTTNAASNIWTRARTASRRVGVTWSFSDGFPSLNFDETVITSSSRRRLMKIFHQFFRSTNTAKLVQAPSQGKAMECVGLHKSSSHFLKDGKFTRFADWRFVHKARLNLVPLNANKKWRGENFDKRCRRCGEHDETLPHVINHCMAYSDALQKRHNSILERIKNAVAFKGKIMSQNQAVGDSGLRPDLVALIKNKIYLIDVTIPFENRARAFEIARKNKITKYLPLVDFFKKLGYRQVEIVPIIVGSLGSWDPENDRFLRRIATVSFLKLFRKLCVSDCIRWSRDIYIQHLTGKKQYGDLPPSSGVASDAEDVD

SEQ ID NO: 3041 - protein, 1698 aa, Tetragonula clypearis
MAARRDGDPGDAVVLKYPPGEAVICPHCYRGPLAARTKGIGVYKLHTSLAKHLKLCHPSSYITWVCAECSFAGSGAYPMKSVKLHIEKTHATGRPTPRARNAATTTATTTTATTTTAAGRTSPADAPGGPPPSPGTPELESGGVRTSTTPTGAAATTGPMLTTTRGRKGAATTAARGAPATRRSPTLQTTARTVSTTGMTAATGRATAAATTSCGTRPGATSRAPPARSRASSCPPTPPVAKRRGAPRTPPSTSTMTSAASGAPAGRATPRSSPEATATAASARRTRSSTRAGTYSLPGSPTTPGSSSRRLGTKTPPMKETPPRRDTRALPATGASPPAPTSPPSSTPRPFPRRFASPATTFAEALKGVALSTTATPPCSPAAAVLTTATSTTTTTSGPISSPVVVPTSFGLVPATMTAPPAINTLAGASSPAAAAETLTSPRARTSPLVRSPGTPLRIIEEDTEASAGPEQPSSPTTASAPTHHPREEEPSSPDPGGGDDDCDWEVVQSRLRKLQRQQQQQQHRQVPQRQQQPRRKRQQRQQRTGPPAGNASSDAGRAGRCSRPITARTNAGTCVPRASIVQTSVRPGSSRGCTCRCSCGASADNGRRGVGGHARGSPPPSSSNNRNNNRVQPMDRTRQGTQRTRTGQRRVARRVPGASAAPATSRSESHELIGARNPSSTENNSRSETRGAVFGASLSARVVAARTRASLAEDAEAARNGDDLEAVAARVAQLFPARRVRADADANNNCGATGGRSHTVSGAARPEQSPGSQVDRHEYATEARRIQKLYRANRKRAVGEVLHKDSPFCEVSKENIQRHFTETFARTEGAGPLAQPQETVEPSTESNDALVAPLECSEVLRRLKRMKNSSPGPDGVTYDDLRRADPDAAVLTAVYNACLRLGHIPGGWKESLIVLLHKKGSRDDLSNWRPIAMGDVVVKLFAAVLADRLTRWATANRRLSAAQKGFLHYEGCLEHSFVLHRTLERARDLRREVVVAWLDLADAFGSVPHAVIKRALISAGVPTGIVGIVENLYDGSTVRVRTREGYTDPIPMRAGVRQGCPLSPILFDLVIDPLLRGAAESGAGFDVYGERVTALAYADDIALVTDNPRDMERLLELAESSARPLGLSFNPRKCATLHLGPRGEPIPTVFRIAGENLPVLRDGDSYVHLGVPTGSRIDQGPYRAIGDLVGDLEAVNRSLLAPWQKIETVATFLLPRLDFLLRGYGVYKKTKLAEADRIVRRTVKGWLNLPQRASAEVVYIPPSWGGCGLTPLADLADVTAVAHAFRMLNADDPAVARVARSALENAVRQKIRREPNEGDIAGYLSGSLEGDLALPSSCRVNFWSRTRSAALRSARRFGFRWRWDPTCAELSLECPARGGRRVTVPPAAKRQVIGRLRAAVSEHYRSTLVAKPDQGKVFDATSRHGASNRFMRTGQYLRFADWRFVHRARLDVLPLNGARRWGGGDRRCRRCGYVSETLPHVLCHCGPHAAARQLRHNAVVERLAAASRMPGTVRINQRVPGVDGDLAALRPDIVVTHEPSRTVVLVDVTVSFENKFEALERARLEKISKYKPLADALISKGHVVYVDGFVVGALGAWHPRNESVAKFLRVSPGYAALMRKLMVSETIAWSWDMYVEHVSGIRQYRVPGVVAQEATPPASTRAASPARANAPASGIPNTEVSETAAARTTSDDATRLG

SEQ ID NO: 3042 - protein, 833 aa, Tetragonula clypearis
MKNSSPGPDGVSYDDLKRCDPDAKVLTSLYNACLRLGHIPGGWKESLIVLMHKKGSRDDLSNWRLIAMGDVVIKLFAAVLADRLTRWAIANNRLSAAQKGFLPHEGCLEHSFMLHRVVERARDLKREVVISWLDLADAFGSVPHGVIKSTLVAAGVPTRVVDIVENLYTGSTVRVRTREGYTDPISMRSGVRQGCPLSPILFDLVIDPLIRKAVESGAGFEVYGERVTALAYADDIAFVADSTRSMQQLLEAAESSARPLGLSFNTRKCASLHLGSRGEPIPTVFHLAGEHLPVLKEGDAYLHLGVPTGVNIAGEGPYRTVGNLVADLEAVSRSLLAPWQKVETVATFLLPRLDFLLRGYGAFKKSVLVEADRILRRTVKGWLNLPQRASAEVIYIPPSWGGCGLLPLADLADVTTVAHAFRMLNADDPVVARVARSTLENAVRLKIRRVPTEEEVAGYLSGSLEGVLALPSSSRASFWSRVRSAALRTARRLGFRWRWDPLLAEMSLECQARGGRKVIIPPAAKRQVIGRLRTSIAEHYSSSLSSKPDQGKVYDATCRHGASNRYMRSGQYLRFSDWRFVHRARLDVLPLNGARRWGDGDKRCRKCGYVSETLPHVLCHRGPHSAARQLRHNAVVERLAAASRLPGTVRVNQCVRGVGGDLAALRPDIVVTHEPSGTIVVVDVTIPFENTFEALEKARLEKIEKYKALADALSRRGRVVYVDGFVIGALGAWHPNNDKLTKFLRISARYAGLMSKLMVSETIAWSRDIYVEHVSGIRQYRMPEAAPQEENSTPVSSANLTSENVIASDVRPAIVSETLALPPPRVNPALQCR

SEQ ID NO: 3043 - protein, 1889 aa, Tetragonula clypearis
MATRAEGNAVIIKYPPGECVTCPYCYAGSSTALMKGAGVYKLHSGLTKHLKIHHPSSYVRWECSECNFSVNDMGKYPIKAVKLHFEKSHRSGQSTSHARRTAVTNTTTTTTITVAGTTPPAIPSRYIPPSSPASSPEFEADRVWVQATSTATTTTTTTTSAAGRSSPDIICLTTPSPIFTCDRRKTEATTTATTATTTTKTKAKPKTITAFFEKERRGGEATKAKKAAAKDAPLPKRSPSLQATTSATGKSPPILTTTKATAPTIISTKATALRIKIVTTSGGTSTTRASANPRPESSRPPTPPTLKRTSGGLPVATTTTTSGRGSSPGVPAQGPTPPPPRPSKGSNSTSTRGKTLVRTVSASNVTTRGMATRARLRAASCPPTSPPRPRRSVPRSPMSKTKSKTSPLGASPTTAARGRTTPPGTSRSSPGTSTAATLDQRPRTPPPEGDGKYSPPGTPSTPAPASSRTRGRRTPSRKAKTPRRGARTPPEARASPPPPQPATPPAASPRIFARRLASPTTTFAEAVKGTAPSTAVTSPLPVTAAVLTTATTTTTTTPARPITSPVILPSSFGLVPAAMSSLLFSNIISGASPPAAAAEAPTSAHTRTPPLVRSSGSPLPTILEDPAAPTSPERASPAVTRRTKTPTPPREEPRSPGSGGGAEDTEWTLVQGRQQRQQQQQQQQQQQQRPRQQQQQQQQQRRPQPVQPGRLQPQLQRQQRIRRPAGDPRVTPGNAGRNSRPTYPSFSNAGTCSIRANIRQSSARPGTARGCVCRCSCGASAASGRFPGGGGRVRGHPLPSSNITRNTRGQTTDETRRGARQTGQGRGRAATTVPGTSATPATPLGGRRRSEISGHSEGHETNGTRNPSLTDTISQGELRGAVSGASLSARSLAERTRARLVEDAEAARNSSELEAVAARVAQLFPARRVRVVADARNNRGATGGRPHTENETTRPEQRPGERVNRQECTREATRIQKLYRANPKRAVGEILHKDSPFCEVPKDIVQGHFTECFSRSEGAGPLPQPQETAEPSAESNDALVAPLECSEVLRRLRKMKNSSPGPDGVSYDDLKRCDPEAKVLTSVYNACFRLGHIPDAWKESLIVLLHKKGSRDDLSNWRPIAMGDVVVKLFSAVLADRLTRWAIVNCRLSSAQKGFLPHEGCLEHSFVLHRVIERARDLKKEVVVSWLDLADAFGSVPHGIIRHSLVAAGVPARVVDIVENLYNGSTVRVRTREGYTDPIPMRSGVRQGCPLSPILFNLVIDPLIRKAADSGAGFDVYGERITALAYADDIAFVTDDTRSMEVLLEAAESSARSLGLSFNPRKCASLHLGPRGEPIPTTFHLAGEHLPVLKEGDAYLHLGVPTGANIAGEGPYRTIGNLVADLEAVSRSLLAPWQKVETVATFLLPRLDFLLRGYGAFKKSVLVEADRILRRTVKGWLNLPQRASAEVVYIPPSWGGCGLLPLADLADVTTVAHAFRMLNADDPVVARIARSTLETAVRQKIRREPTEEEVAGYLSGSLEGVLALPSSSRASFWSRVRSAALRTARRLGFRWRWDPLLAEMSLECQARGGRRVTIPPAAKRQVIGRLRTSIAEHYSSSLTSKPDQGKVYDATCRHGASNRFIRSGQYLRFADWRFVHRARLDVLPLNGARRWGDGDKRCRKCGYVSETLPHVLCHCGPHSAARQLRHNAVVERLAAASRLPGTVRVNQCIRGVGGDLAALRPDIVVTHEPSGTIVVVDVTISFENTFEALEKARLEKIEKYRDLADALSRKGHVVYVDGFVIGALGAWHPNNDKLVKFLRISSRYAGLMSKLMVSETIAWSRDIYVEHVSGIRQYRVPEAAPQEENLTPVSVATLTPPECAVASGARPAVVSGTIAPHEIPGNRPQSGTG

SEQ ID NO: 3044 - protein, 1002 aa, Tetragonula clypearis
MNIPGMNPAPETPLGDRRRGENSAPLDDCQRVEARSPPPNAPRGRRGPHGVVSGESTAGTRAHLLEKATAARTIEDLETVAANVTRLFPARRIIRANANVTASNNRGASGGQPHMANETTRPEQRTQVEETLPSRRKWIRDNGCARIRRLYRTDRKRAVKEILHKDSPFCELPKETIQNHFTETFAWKEGSGPLPFFRNMAEPSAESNDALVAPLKRSEVFCRLRRRHKSSPGPDGVTYDDLKRGDPEAAVLTALFNACFRIGHIPLDWKESLIVLIYKKGSRENLTNWRPIAMGNVVVRLFAAVLFDRLTRWASVNNRISPAQKGFLPHEGCLEHSFMLQRTMECARSQKREIVIAWLDLADAFGSVPHGVIKRTLVNAAVPTRVVDIVSSLYNGSTIRVKTRDGYTDPIPMLSGMRQGCPLSPILFNLVIDSLVREAMESGAGFEVFGKRVTTLAYADDITLVAASPRSMEQLLSSVESVVTSLGLSFNPRKCATLYIGAKGEPISTAFHLAGECLPVLKQGESYVHLGVPTGVRINQTMHRVVKDLIADLEAVSASLLAPWQKIETVATFLLPRLDFLLRGGAIRKSWLAEADRILRRTVKGWLNLPQRASVEVVYLPPSWGGCGLLPLADLADVTAVAHAFKMLNADDPAVARVARSTFENAVRQEIRRMPNEEDIAGYLSGSLEGELALPSSSRASFWSRVRSAALRSARRFGFRWHWNPDQREFSLECPARGGRRVIIPPAAKRQVVGHLRAAVSEHYMSVLIAKPDQGKVFDAISRHRASNYFMRTGQYLRLVDWHFVHRARLNVLPLNGARRRGDGDRRCRQCGYQSETLPHVLCHCGPHAAARELRHNAIVKRLVAAARLPGEMRVNECIPGIGGDLAALRPDIVVTQEPSRTVVIVDVTVPFENAFEALEKARLEKIAKYMPLADAIRGRGYIVHVDGFVVGALGAWHPHNERINTLLSVSSGYAALMRKLMVSETIAWSRNMYVEHVSRIQ

SEQ ID NO: 3045 - protein, 1018 aa, Actinopyga echinites
MLTPVEIENIQRTVTEKQPVEEIQQDREHEPTHQVPEPEMTQVPEPTVPQIPPEGTLAREILNEMVATKSKEARSPVRIYQRSNPQLHQMLKEANLAVQGIPTNNITETNLLMYATARVIEKKIHGPKKSQPPQRVPPWRRRLETKIISTRKNISRLVAAKQGRGGATVDLKRKYWLEQRGYDHAIEDAKQRLTALSHRLQRYNARIEQYRINKMFREQPGRVYHNLRRNGDTVSQPVPEKGDTEDFWRGIWGVQKRHKTDAKWIRDFNSNHEDVLPQPRTEITEEAVRTKTRKMSNWKSPGPDQVQGFWLKKMTALHHRIANQLQQIVDNPTTVPKWMTNGRTTLIQKDPAKGNAPSNYRPITCLPTTWKLLSGILADGVMAHLTQQNLLAEEQKGARPGSRGTKDQLIIDKVVCKDSRTRRTNLAMAWIDYQKAYDSVPHSWIIEAMRMHKIDENICSLVEESMQNWVTNLTASGQHLATIPIKCGIFQGDALSPLLFCVALNPLSHILRNSRRGYTLRSGHTIHHLLYMDDLKLYGKNERDIDSMINTVRIFSDDIGMKFGLEKCGRLIIRRGRVEATQGLLLDIGRIRDIQVEKGYKYLGILQGMENLQEKVKTDTIKTYRKRVRQVLKTKLNGQNKIQALNTYAMPVISYTAGIIEWTQNEMSELDRGTRKLLNIHGGLHPRADVHRLYLPRHQGGRGLKEVEATIRGEIVGLSEYITLKKETEPLLQAVWQATQQQEVMGKKEWKAGWSRMYNSKWREKPLHGQYPRQIEEVTKIEMAYKWLSCTGLKIETEALITAAQDQALNTKMHQAVIMKTSNDSKCRMCKTADETVSHLVAGCQQLAAGEYLRRHNKVAAALHMTICQHYGIPTTEHPWLHEPESVEETHKVKILWDFEVRTDRIVTARRPDLIVIDKQEKKATIIDVAIPLDKNIKDKEQEKIEKYQDLKLELQRLWDVKVEVIPVVIGALGAVSTSLEGHLTRIPGGHDMRKLIKQAILGSAHIIRRVLDIPGSG

SEQ ID NO: 3046 - protein, 1116 aa, Actinopyga echinites
MEKESDELTIPAQTSPGIKRSAPAAVSLGRAGEKWATETTRRKKWTQEENTEVMWCYFLSEPTRRGYRKRMHNIWQQRNPSAPISEQRLADQRHAIHRAGILTPVEIESIQRQLTCQEVPTDEEQQPLHHQVPRQHMPVVEPTLTVSPEGTLTREIMHEMATMRMVEARSSVQIYKRSDPQLFQLVKEANIAVQSIPTENITETNLLVYSTAKVIARKIQGPERTKRATNPQAPPWKRRLQTKIAQSRKDISRLEAAKRGRTKLTDDLKRKYWVEQRGYNHAIEDAKQRLTALAHRLSRYNASNEQYRINKMFREQPGRVYQNLRGNANKEPPPVPDKGETETFWRRIWGEKKHHRTEAKWIKDFSAKHEAVSPQPPVTITEEVVRAKIKKMSNWKSPGPDQVQGFWLKKLTSLHHRMATQLQEIIDDPTTLPKWLTNGRTTLIQKDPSKGNAPANYRPITCLPTTWKLLSGIMADGIMTHLTQQSLMAEEQKGIKPGSRGTKDQLIIDKAVCKDSRTRRTNLAVAWIDYQKAYDSVPHSWILEAMRMHKIDNKICTLVEESMSNWATDLTASREHLARIPIRCGIFQGDALSPLLFCVALNPLSHILRNSRRGYTLRSGHTIHHLLYMDDLKLYGKNEREIDSMINTVRIFSDDIGMKFGLEKCGRLIVKRGKVETTQGLLLDIGKIRDVEVEKGYKYLGILQGMENLQKQVKANTLKTYTKRIRQVLKTKLSGQNKIQAINTYAMPVVSYTAGIIDWTQTEMKDLDRKTRKLLNMHGGLHPRADVHRLYLPRSQGGRGLKEVEATVTGESVGLDEYIQRMKDVEPLLQAVWQARQQHEVVKKDEWKAGWARTYKSKWKEKPLHGQYPQQVEEVTSTEMAYKWLSCTGLKIETEALITAAQDQALNTKSHQANIMKLTKDSKCRMCTEADETVNHLVAGCQKLAASEYLQRHNKVAAALHLEICRHYSIPTPEQQPWLHKPETVNENEQVKILWDFEVRTDRIITARRPDIIVIDKQEKTAKIIDVAIPLDKNIRGKEAEKVQKYQDLKIEIQRLWNVKAEVIPVVIGALGAVSTNLEGHLQRTPGVHDMRKLMKEAILGSAHILRRVLDFPGSG

SEQ ID NO: 3047 - protein, 1336 aa, Stegodyphus mimosarum
MTSDIVPSSASPVCHHTRSRAANGHACSSTPAPHPTTIAPTCSTSFTPSMSTGILSCNPDPPVPAPASTSHLAAGSSSTTSPSCFPCKECGKSFSSRRPLRFHWNRQHRRSIPSSSPSADDFIAPLPSSPSPVVSSPHVVNSSSSATDPAPSFGPIHPPSTSRIDSTLHLVFPVHDVFMCTENSCSLLFRSGSWSSMKRSLVRHLLQEHQIHVTSTMKWCSVCHELMADGVSLHECFRSSPLVLPSGSTFRWKCNACPFSCPSIKGLFNHKALHLRATRNATANSIALPLPDPQRRRSRRQHPSSTAPATTSTVPAHLPDVSTAPTNVDASASTLTPVLSPPGSPDAASPVHPVAVSPVHPRPSPVATSGTPTSPARGSSPSASLVSPSYSSPALSLSAPVDDVLDDSLLGDGSTLPSNDLLDSANVPPFDSLLPPDSPLLQFNETLLRLSSAPDDHTTWSEFETCLEDIISCASIHVKLPPPVPPHDSEFRRTPDASNPRVIQRIYRVNRRRALRLITQRDNSFYSIPAEDLAAHFSEKYSLRQADTSIYNQNASDRPPVDMSPFTPAEVRSKLMACENSAPGPDRLSYRHWRDIDPECKALCAIFNLCLKLRRIPSSWKSSRTFLIFKDGDPSIIDNWRPIALSSCISRLFAGCMARRFSGWLSTHDVLSPCQKGFLAHDGVFEHNFILNSQLQLARRSRSELCLAFLDISNAFGSVPHSAIYAALSDSGVGDDFISIIRSFYSGSTTSFISSDGTSCPVDIHAGVRQGCPLSGLLFNLVIDPVLRCVESTSPVPRILAYADDLLLMAPSPENLQDDILKIHDACSKLSLLLNPKKCRSFHFSAARSSRVLPTAFHISGVPIPALKESEFFMFLGKPIGFNLPPARAQLRDFLSLAKCISESKLAPWQRIDALKTFFFPSLLFHMRTSQFSKGDWKKIDDFLKPAIKRTLNLSPEASNNYLYGLSGKGSFGIPLAAEDSDIAAVDGAFKLLTSRDPLVRKLAWDDLCGYIRARIQISPSSSLVSLFLSASDEAPFAATCNPISSLWSAARAASRRLNIAWTIDNDGCPSISCGSSTIFPSNRNSIFKSFRQLRSCRLQDLVSLPNQGKSMECVSAARASSHFFHEGSFTRFADWRFIHRARLNLVPLNASKPWDRSRRACRRCPFPEETLPHVICLCMRYSRLFKDRHNAIVRRIKDAAAGRWHVLSENLTVDGSSLRPDLVLAKDDSCLIIDVTVTFENRLASFQNARTEKETKYRPVADLLRKKFRNVRTEAIVVGALGSWDPANDRIVRRLCTNKYANLMRKLIVSETISASRDIYIEHLTGIRQNNQTSR

SEQ ID NO: 3048 - protein, 1267 aa, Trichuris trichiura
MNSTANRNPTHDPERTAGGDGANFVAATYPGPFRCPLCATIIAVGHNFLEHMRVHGKEVHFLCGKCSKSWPTIHSVACHYSKCGRQITRSVRQPPVAVEDRPHTVVCTDCGDQFTTARGLQLHRRNAHIEQFNADRPREKKARWSQFEVLALAKLEVQLPSNIVNINQVLSKLLFEKHGLTRNVEMIKGQRRKSRYKELISSLQSANGQADAASTEAARSHEYGSVIRVESAAPAERNVLADGTHILPDGSTFPVSDHVLPMKRDVLPTLPDVPCCRHILPGELAVATPADVSLLQHPVSSGQSAASSRDHVLPDQSTIPTSGVLSTACSVLSRPSAIVLPSQPTVLPNGTAHAADVNGQQAALANSEGELLAHLAAVLREASCHEAPAGSLLQALSLLAGQALEGRGILDDTAEAVLKCIAPPPRRTAKPAKHSALPVATGTLRQQKQLRYRQFKRLYNTNRTRLAEAVLDGASPVEHEVPLPQCTAFYTEAFGTCSPSDNAPCLPKQFQRNPRAQQSRLICPISAQEVRTALSKITRKSAAGPDRVTVDHVRSLQEAELVLLFNIWLFYLDVPARFKICRTVLIPKKSEVRGPGDYRPITIASVFYRLFTKILANRLSAMVELNIRQKGFTRKTDGCSENIFMLNAALALSRGEHRELSLATLDIAKAFDSVSHNSVRRALLRQGVGASDVQLITNLLANSFTQIEHSSGTSDLIPLRRGVKQGDPLSPLLFSLVVDELLDELAQNGGGFTFTNAVEVNCLAFADDLLLLSDSKAGLQSNLLVCYRFFTARSLSLNVQKCCSLRLYKVPRCRTVALTMEPQFYLDPTQPQTVLPVFTAAEFFKYLGVEFNPFGRRRDQIAGARALLDRACKAELKPQQKLELIRTHLLPRLLYTLTVGNPLSQTAATIDKMVRQAVKRVLHLPVSTLCNDFIYLARKKGGLGFINLQETADRTTIRLLLKMSRSSDTAAQSVSELWFNQRRRSQLMRRQGVATFDIAGLNAAKTARATAREAKFMATYQGVGYKEFRDWRSNGWIAGDGMTGHNFIAALKVRTSLVPTRLQALRGRAEPGDRRVLCRKCGVVSGAAESLIHISQNCAFTGGLIVRRHNDILNKLMQSAEASGFHLVHEPVIRVEGDTFKPDLLLTRGDSCWIIDVAIPWETTDSLNRRHVEKCRKYECLKEAACKLTGAKNFGTGAVVIGARGGWCSRNDDTFKLLDWNVSERLKALLCTIALERTVQLVNWFMRSSTQLAFRADRRGRSIHNRT

SEQ ID NO: 3049 - protein, 828 aa, Trichuris suis
MPSTVRQQKRVRFPQLKKLFNTNKKRLAEVVPDGAPPVEHEVPLKDCVEFYTEAFGNCSAADKASYRQKELRSSMQVPTNLLVLPILPNDIKAALSKIPRRSAGGPDKITVDHVRGLKEAELLLLLNLWLFYQDVPAYFKVCRTVLIPKKSQVRGPTDYRPVTIASVFYRLFTKIVASRLSSMVQLNIRQKGFTKKTDGCGENIFMLNAALSLPRTEHREPSLATLDVAKAFDTVSHDSVRRALERQGFRSAGIRLIVNLLANPFTRIEHSSGTSALIPMRRGVKQGDPMSPLLFSLVMDELPDDFARNGGGFTFASGVQVNCLAFADDLLLLSDSKAGLQSNLLLSYRFFTARSLSLNVQKCCSLKLYKVPKCRTVALTVEPQFYLDPAQPDTVLPVFTAAQFFKYLGVEFNPFRRRRDQLLGARALLDRACKAELKPQQKIELVRTHLLPRLLYTLTVGNPLSHTASSIDIMVRQAVKRILHLPVSSLSNDFIHLSRKKEGLGFINLQETADPCTIGLLLSMSTSAEEAARRISELWLNQRRRSRLMRRQGVQTFDQAGIHAAKISRAAAREDRFMASYQGAGYKEFRDWRSNGWITGEGMTGHSFIAAVKVRTSLVPTRLQTLRGRAEPGDQRVLCRKCGAVSGAPESVVHISQNCAFTGGLIIRRHNDIMEKLMQSAEASGFHLVHEPVIRLGEETFKPDLLLTKEDFCWVLDVAVTWESNDSLNRRHAEKCRKYERLKEAACKLTGGKDFGTGAVVIGARGGWCSQNDVTFQKLGWNISERLTTLLCTMALERTVQLVNWFTRSTTELAFRAGRRGRHAQNRT

SEQ ID NO: 3050 - protein, 1154 aa, Trichuris suis
MTSTNRSTPMRDPERTAGGDGADTVAVDYPGPFRCPVCERIDAVAHSFVEHLRRHNVEPSFACARCRRMFPTIHGVATHHSKCGRTVRRRRPSECQKEDEPPLRFVCPECGAAFSKATGLQLHRRSAHIQEFMSERPRELRKRWSEFEKHALAALEAKLPESVYNVNQVLSQQLFEEHGLTRNVEMIKGQRRLESYKRLVLSLRSEALEASAAPGVSGSAAGFTGQQALSAEAEQHEQVLPVSADFDLSTAHTAPGLQSASSLHDAVLPFLSELACLQAEEGSLQHALQMLAQRAVQGESILNDTVLPVLSSIDPPPRRSRTALRRPPAATATSNRKRKQARFRQLRRLYNQNKNRLAEVVLDGAGADTHDVPLETCYEFYLKAFGTESPADDEAVNLKPRATVFGEPRETLFQPIQTNEIITALAKIPRKSAPGPDNVTVDHVRSLKPVELQTLLNIWLFYRDVPESFKQCRTVLIPKKIPARGPADYRPITIASVFYRLFTKIVSSRLSWSAELNHRQKGFIKKVDGCGENIFILNAALTLSRSQHRELCLATLDVAKAFDTVSHHSIRRALLRQGVSESGIQLITNLLSNSFTVIEHSSGVSAPIPLRRGVKQGDPMSPLLFSLVIDELLDDLDARGGGFTLGPGVQPNCLAFADDLLLLSDSKAGLQSNLLACYRYFTARSLVLNVQKSCSLRLYKVPRCRTVGLSMEPQFYLDPAQPDTVLPVFTAAEFFRYLGVDFNPFGRRRDQVTGARALLDRVCKAQLKPQQKIELIRSHVLPRFLYTLTVGNPVSRAAAQIDVLVRQAVKRILHLPVSTLCNDFIFLPKKHGGLGFICLQDTADFTTLKLLLKMSRSSDLAAQCVSELYFNQRRKSRLMRRQNVFTFDEKGLHAAKEARAAAHEARFLATYQGIGYKEFRDKHSNEWITGERMTGHNFIAAIKARTSLVPTRLQTHRGRADPGDQRVKCRKCGAISGASESLSHISQNCAFTGGLIVRRHNDVLNKLIDSAEASGFHPIREPVIRVGDDAYKPDLLLSKDNSCWVLDVAIPWETQDALNRRHADKCRKYERLKEAACKLTETKDFHTGAIVIGARGAWCSKNDLTLKQMNWSFTSKMKSFICLMTLERTLQIINWFMRSSQQLSFRPQHRGRND

SEQ ID NO: 3051 - protein, 734 aa, Pelodiscus sinensis
MTVLLYKKGDCTDPENWRPISLGSTLYKLYASCLAARITDWAVHGGAISSTQKGFMTCEGCYERNFVLQAALRETRKSRGQCAIAWLDLANAFGSVPHQHIADTLTDFGAPDTFLRILRDLYTDCTTTIRATTGETAPIDIHRGVKQGCPLSPIIFNLAMEPILRAISQGPDGLDLHGVRVDVLAYADDLVLIADSAEGLQRMLQIAGWAAEWTGLRFNARKCASLHVDGSLRTLTRPTAFSIQEQPMACLQEGQFYQHLGTPTGIRVEATPTDTLHKILRDAELLDQSLLTPWQKIDAINTFLIPRISFTLRGSAVAKVPLNKADSAIRALVRKWLYLPQRACTDIVYIPHRQGGANVPRLGDLCDVASITHAFRLLTCPDVRVRTIAENALRVVRTRIARDPTAADITTYLSGSLEGDFRRDGGDLSFLWSRARNATRRLGKRIGCRWVWSEARTELSVVLPRITAQGHTTVTPAARALLERILKGTIRRHYADALAKKPDQGKVFEVTSKQEASNHFLRAGNFTRFADWRFIHRARLNCVPLNGTIPHGTRDTRCRRCGYPLETLPHVLCGCTTRSEAWRRHHDAIQNRLVKALPLALGAVAVDSPIPGTNSHLRPDIVVTDEQAKTILLIDVTVPFENRMTAFRVAREKKLSKYVQLADNLRSRGYSVAVHALLVGALGAWDPENDAVLEACEVGPRYTGLMRRLMVSDAIRWSRDIYTEHITGHCQYNI

SEQ ID NO: 3052 - protein, 890 aa, Carettochelys insculpta
MTPRLAPGGRAGRRGDAGRQDDPVTATRLRGLYRSDRRRAMREILEGAPMHCSVPAEELHSYFSAVFEGGPPRDQPRPDCLPQLPRIHADNALDVDFMPHEVLARLQRTANTAPGKDGIRYSRLKQRDPGCLVLAALFTACKKLWRIPEAWKRSMTVLLYKRGDRNDPGNWRPITLSSTLYKLYASCLAARVTDWAVGGGALSSAQKGFLSCEGCYEHNFFLQVAIAETRRSRGQCAVAWLDLANAFGSVPHQHIFDVLAEFGIPDSFLIILRDLYKDCVTTIRAATGETASIHNHRGVKQGCPLSPIIFNLAMEPLLRAISSGGDGLDLFGVRVDVLAYADDLVLIADSDEALQQMLHIAGLAAKWMGLRFNAKKCASLHVDGSLKTLARPTVFSVQGQPMIPLEEGQFYQHLGMPTGVRIQVTPEGTICGILKDAERLDDSLLTPWQKIDALNTFLIPRICFTLRGSAVAKVPLNKADKTIRHLVRKWMYLPPRAATDIIYISNRQGGANILRMGDLCDVASITHAFRLLTCPDPRVRTVAENALRGTTRRRIGRAPTAQDLATYLSGSLEGEFGRDGRDLSSLWSRARNASRRLGKRISCRWVWSEERRELGILIPHIATEGHTIVTPSAQTLLERLLKSTICHQYAEALRKKPDQGKVFDVTSRWDASNHFLRAGNFTRFADWRFIHRARLNCVPLNGAVHHGTRDKRCRRCGYPLETLPHVLCGCMVHLAAWQRRHNAIQDRLVKALPPTLGSVTVDSSIPGTDSLLLPDIVVMDERSKKILIVDITVPFENRMAAFRDARAKKLQKYALLADTLRSRGYSVEVHALLVGALGAWDPLNDEVLEACEVSRYYARMMRRLMVSDAIRWSRDIYTEHITGHRQYSDS

SEQ ID NO: 3053 - protein, 1091 aa, Branchiostoma floridae
MGCLKTQSLEQRTRTFDLGETAEVPRQDDNHSPRDHQARDREQPDTQGIEPVPEERERMEEPSQESGGPERPVETERVGRQEPRKSQIKWPPSNADKAWEQLDEDLEGILESVLAGSVERKIEAMAEMVYSVGLERFGEKPSGGGRKRSEQPNRRERERRQIRKDLKALSNRWKRAEQSEKEALSKLREDLRTRLNSLSKAERTRKKRKERERRRAAFISNPFRFTKRMLGTKTSGKLTCSVEEVEDYLRITHGDSNRETEIGDLEELQDPQPPTQEMDCSEIKLAEVRAIIRKARAGSAPGPSGTTYQVYKKCPKLTIRLWKLIRVLWRKRKVPNSWKRAEGVFCPKQENAESIGQFRTISLLSVEGKVFFAIIARRLLNYMMRNHYINTSIQKGGVPGFSGCLEHTSMLTQMLEEARAGKKDLAIVWLDLENAYGSVPHQLIKTALAKYHIPEQARRVITQYLDGLQIRLTVNGMTTSWQNLERGIVTGCTISVILFVAAMNLLIEPSTRQSRGPKTRSGVRQPPIRAFMDDLTLSTESVLGARHMLRSLDRAATWARMRFKAKKCRKLVLRKGKLCDMLQLEIQGEKIPSVSDQPVKSLGKKFDKTLADVQNVKEFRKQAGEGLRKIEESNLPGKYKLWCYQYGLLPRLTWPMTMYNIPLTTMEQVDKKISKYIRKWLGVPPGLTSVGLYSTTAKLQLPLTSALEEYKVAKVRAQATLDNSKDAIVREAGIKLRSGRKWSVAEAAESARSRLRHKDIVGVVAQGRLGLGAGTTAGQRWKDAAPIVRRKMLQGEIRRQEEEKRRAQAVSQGVQGAWVKWEQARERKVTWKELWSWEPLRTQFLLKSVYDLLPTPANLKRWGKESEEKCVLCGKRGTLSHLLTGCAVALGQGRYRWRHDRVLRVLAAALEEKRVQMSGRKQRRLRFVEFVKEGGKGKRRGKSAIDEGLGILASAGDWDLRVDLDRKLTFPEEITTTNQRPDIVILSAKTRQVVIMELTVPWEDRMEEAFERKAEKYNELKQSCIEKGWKTWYYPIEVGCRGFVGQSTWRGLGAVGIKGRKRKVVTKNLAEAAEAASRWLWMKSKEHTWKI

SEQ ID NO: 3054 - protein, 1091 aa, Branchiostoma floridae
MGCLKTQSLEQRTRTFDLGETAEVPRQDDNHSPRDHQARDREQPDTQGIEPVPEERERMEEPSQESGGPERPVETERVGRQEPRKSQIKWPPSNADKAWEQLDEDLEGILESVLAGSAERKIEAMAEMVYSVGLERFGEKPSGGGRKRSEQPNRRERERRQIRKDLKALSNRWKRAEQSEKEALSKLREDLRTRLNSLSKAERTRKKRKERERRRAAFTSNPFRFTKRMLGTKTSGKLTCSVEEVEDYLRITHGDSNRETEIGDLEELLDPQPPTQEMDCSEIKLAEVRAIIRKARAGSAPGPSGTTYQVYKKCPKLTIRLWKLIRVLWRKRKVPNSWKRAEGVFCPKQENAESIGQFRTISLLSVEGKVFFAIIARRLLNYMMGNHYINTSIQKGGVPGFSGCLEHTSMLTQMLEEARAGKKDLAIVWLDLENAYGSVPHQLIKTALAKYHIPEQASRVITQYLDGLQIRFTVNGMTTSWQNLERGIVTGCTISVILFVAAMNLLIEPSTRQSRGPKTRSGVRQPPIRAFMDDLTLSTESVLGARHMLRSLDRAATWARMRFKAKKCRKLVLRKGKLCDKLQLEIQGEKIPSVSDQPVKSLGKKFDKTLADVQNVKEFRKQAEEGLRKIEESNLPGKYKLWCYQYGLLPRLTWPMTMYNIPLTTMEQVDKKISKYIRKWLGVPPGLTSVGLYSTTAKLQLPLTSALEEYKVAKVRAQATLDNSKDAIVREAGIKLRSGRKWSAAEAAESARSRLRHKDIVGVVAQGRLGLGAGTTAGQRWKDAAPIVRRKMLQGEIRRQEEEKRRAQAVSQGVQGAWVKWEQARERKVTWKELWSWEPLRTQFLLKSVYDLLPTPANLKRWGKESEEKCVLCGKRGTLSHLLTGCAVALGQGRYRWRHDRVLRVLAAALEEKRVQMSGRKQRRLRFVEFVKEGGKGKRRGKSAIDEGLGILASAGDWDLRVDLDRKLTFPEEITTTNQRPDIVILSSKTRQVVIMELTVPWEDRMEEAFERKAEKYNELKQSCIEKGWKTWYYPIEVGCRGFVGQSTWRGLGAVGIKGRKRKVVTKNLAEAAEAASRWLWMKSKEHTWKI

SEQ ID NO: 3055 - protein, 1091 aa, unidentified
MGCLKTQSLEQRTRTFDLGETAEVPRQDDNHSPRDHQARDREQPDTQGIEPVPEERERMEEPSQESGGPERPVETERVGRQEPRKSQIKWPPSNADKAWEQLDEDLEGILESVLAGSAERKIEAMAEMVYSVGLERFGEKPSGGGRKRSEQPNRRERERRQIRKDLKALSNRWKRAEQSEKEALSKLREDLRTRLNSLSKAERTRKKRKERERRRAAFISNPFRFTKRMLGTKTSGKLTCSVEEVEDYLRITHGDSNRETEIGDLEELQDPQPPTQEMDCSEIKLAEVRAIIRKARAGSAPGPSGTTYQVYKKCPKLTIRLWKLIRVLWRKRKVPNSWKRAEGVFCPKQEYAESIGQFRTISLLSVEGKVFFAIIARRLLNYMMGNHYINTSIQKGGVPGFSGCLEHTSMLTQMLEEARAGKKDLAIVWLDLENAYGSVPHQLIKTALAKYHIPEQARRVITQYLDGLQIRFTVNGMTTSWQNLERGIVTGCTISVILFVAAMNLLIEPSTRQSRGPKTRSGVRQPPIRAFMDDLTLSTESVLGARHMLRSLDRAATWARMRFKAKKCRKLVLRKGKLCDKLQLEIQGEKIPSVSDQPVKSLGKKFDKTLADVQNVKEFRKQAEEGLRKIEESNLPGKYKLWCYQYGLLPRLTWPMTMYNIPLTTMEQVDKKISKYIRKWLGVPPGLTSVGLYSTTAKLQLPLTSALEEYKVAKVRAQATLDNSKDAIVREAGIKLRSGRKWSAAEAAESARSRLRHKDIVGVVAQGRLGLGAGTTAGQRWKDAAPIVRRKMLQGEIRRQEEEKRRAQAVSQGVQGAWVKWEQARERKVTWKELWSWEPLRTQFLLKSVYDLLPTPANLKRWGKESEEKCVLCGKRGTLSHLLTGCAVALGQGRYRWRHDRVLRVLAAALEEKRVQMSGRKQRRLRFVEFVKEGGKGKRRGKSAIDEGLGILASAGDWDLRVDLDRKLTFPEEITTTNQRPDIVILSAKTRQVVIMELTVPWEDRMEEAFERKAEKYNELKQSCIEKGWKAWYYPIEVGCRGFVGQSTWRGLGAVGIKGRKRKVVTKNLAEAAEAASRWLWMKSKEHTWKI

SEQ ID NO: 3056 - protein, 1089 aa, unidentified
MGCLKTQSLEQRTRTFDLGETVEVPRQDDNHSPRDHQARDREQPDTQGTEPIPERERIEEPSQEIGGPGRPVESERGRQEPRKSQIKWPPSNADKVWEQLDDDLEGILESVLAGSAERKIEAMAEMVYSVGLERFGEKPSGCGRKTSEQPNRRERERRQIRKDLKALRKRWKRAKRSEKEALSRLREDLRIRLNSLSKAERTRKKRKERERRRAAFISNPFRFTKRMLGTKTSGKLTCSVEEVEDYLRMTHGDNNRETEIGDLEELQDPQLPTQEMDCSEIKLAEVRAIIRKARAGSAPGPSGITYQVYKKCPKLTIRLWKLIRVLWRKRKVPNSWKRAEGVFCPKQENAESIGQFRTISLLSVEGKVFLAIIAKRLLNYMMGNHYINTSIQKGGVPGFSGCLEHTSMLTQMIEEARAGKKDLAIVWLDLENAYGSVPHQLIKTALAKYHIPDQAREVITQYLDGLQIRFTVNGMTTTWQNLERGIVTGCTISVILFVAAMNLLIEPSTRQSRGPKTRSGVRQPPIRAFMDDLTLSTESALGARYMLRSLEKAATWARMRFKAKKCRKLVLRKGKLCDKLQLEIQGEKIPSVSDQPVKSLGKKFDKTLGDVQNVKEFRKQAEEGLRKIEESNLPGKYKLWCYQYGLLPRLTWPMTMYNIPLTTMEQVDKKISKYIRKWLGVPPGLTSVGLYSTSAKLQLPLTSALEEYKVAKVRAQATLDNSKDGIVREAGIKLRSGRKWSAAEAAESARSRLRHKDIVGVVAQGRLGLGAGTSAGQRWKDAAPIVRRKMLQGEIRRQEEEQRRAQAVSQGVQGAWVKWEQARERKITWKELWSWEPLRTQFLLKSVYDLLPTPANLKRWGKESEEKCVLCGKRGTLSHLLTGCAIALGQGRYRWRHDKVLRVLAAALEEKRAQMRGRKQRRLRFVEFVKEGGEGKRRGKSALDEGLGILATAGDWDLRVDLDRKLTFPEEITTTNKRPDIVIWSAKTRQVVILELTVPWEDRLEEAFERKAEKYSELKQSCIEKGWKTWYYPIEVGCRGFVGQSAWRGLGACGIKGRKRKAVTKNLAEAAESASRWLWMKSKEYTWKT

SEQ ID NO: 3057 - protein, 1105 aa, unidentified
MGCLKTRSLEQRSRTFDLGETVEVPRQDDNHSPRDHQARDIEQPDTQGIESGPEEIVRNEEPSQESIGPERPAETESQESIGPERPAETERVGKQEPRKSQIKWPPSNADKVWEQLDDDLEGILESVLAGSAERKIEAMTEMVYNVGLERFGEKPSGASRKRPEQPNRRERERRQIRKDLKALRKRWKRAKQSEKEALSKLREDLRVRLKSLSAAERTRKKRKERERRRAAFISNPFRFTKRMLGTKTSGKLTCSINEVEDYLRSTHGDSYREIEMGELEELQDPQQPTHTMDCSEIKLAEVRDIVKKARAGSAPGPSGLTYQVYKKCPKLTRRLWKLMRVLWRKRKVPDSWKKAEGVFCPKQENAELIGQFRTISLLSVEGKIFFAIIARRLLNYMMKNQYINTSIQKGGVPGFSGCLEHTSMLTQMIEEARAGKKDLAIVWLDLENAYGSVPHQLIKAALAKYHVPEHAREVIKQYLDGLQIRFTVNGMTTTWQDLQRGIVTGCTVSVILFVAAMNLLIEPSTKQSRGPKTKSGARQPPLRAFMDDLTLSTESVLGARHMLRSLDRAATWARMRFKAKKCRKLVLRKGKLCDKLQLEIQGEKIPSVSDQPVKSLGKKFDKTLGDVQNVKEFRKQAEEGLRKIEESNLPGKYKLWCYQYGLLPRLTWPMTMYNIPLSIMEQVDRKISRYIRKWLGVPPGLTSVGLYSTTTKLQLPLSSALEEYKVAKVRAQTTLENSKDEIVREAGITLRSGRKWSAAEAAESARSRLRHKDIVGVVAQGRLGLGAGSITTQRWKDAEPKLRRKLIQSEIRRQVEEQRRAQAVSQGVQGAWVKWEQAIERKVTWKELWSWEPLRTQFLLKSVYDLLPTPANLKRWGKESEEKCVLCGKRGTLSHLLTGCAIALGQGRYRWRHDRVLRVLAAALEEKRAQMSGRKQRGLRFVDFVKEGGKGQRRGKRAPDEGLGILPSAGDWVLQVDLDRKLVFPEEIAVTNQRPDAVIWSAKTRQVVMIELTVPWEDRMEEAFERKAERYSDLKQTCSKKKWKTWCFPVEVGCRGFVGQSMWRMLGALGIKGNKRKQVTKNLTEAAESASRWLWLKRNEGTWKI

SEQ ID NO: 3058 - protein, 1058 aa, unidentified
MVHSTRDREQPDTQGIEPVPEERERMEEPSQESGGPERPVETERVGRQEPRKSQIKWPPSNADKAWEQLDEDLEGILESVLAGSAERKIEALAEMVYSVGLERFGEKPSGGGRKRSEQPNRRERERRQIRKDLKALSNRWKRAEQSEKEALSKLREDLRTRLNSLSKAERTRKKRKERERRRAAFISNPFRFTKRMLGTKTSGKLSCSVQEVEDYLRITHGDSNRETEIGDLEELLDPQPPTQEMDCSEIKLAEVRAIIRKARAGSAPGPSGTTYQVYKKCPKLTIRLWKLIRVLWRKRKVPNSWKRAEGVFCPKQENAESIGQFRTISLLSVEGKVFFAIIARRLLNYMMGNHYINTSIQKGGVPGFSGCLEHTSMLTQMLEEARAGKKDLAIVWLDLENAYGSVPHQLIKTALAKYHIPEQARRVITQYLDGLQIRFTVNGMTTSWQNLERGIVTGCTISVILFVAAMNLLIEPSTRQSRGPKTRSGVRQPPIRAFMDDLTLSTESVLGARHMLRSLDRAATWARMRFKAKKCRKLVLRKGKLCDKLQLEIQGEKIPSVSDQPVKSLGKKFDKTLADVQNVKEFRKQAEEGLRKIEESNLPGKYKLWCYQYGLLPRLTWPMTMYNIPLTTMEQVDKKISKYIRKWLGVPPGLTSVGLYSTTAKLQLPLTSALEEYKVAKVRAQATLDNSKDAIVREAGIKLRSGRKWSAAEAAESARSRLRHKDIVGVVAQGRLGLGAGTTAGQRWKDAAPIVRRKMLQGEIRRQEEEKRRAQAVSQGVQGAWVKWEQARERKVTWKELWSWEPLRTQFLLKSVYDLLPTPANLKRWGKESEEKCVLCGKRGTLSHLLTGCAVALGQGRYRWRHDRVLRVLAAALEEKRVQMSGRKQRRLRFVEFVKEGGKGKRGGKSAIDEGLGILASAGDWDLRVDLDRKLTFPEEITTTNQRPDIVILSAKTRQVVIMELTVPWEDRMEEAFERKAEKYNELKQSCIEKGWKTWYYPIEVGCRGFVGQSTWRGLGAVGIKGRKRKVVTKNLAEAAEAASRWLWMKSKEHTWKI

SEQ ID NO: 3059 - protein, 922 aa, Trichogramma pretiosum
MQILAKEEARAAIDGVRFLNQPLCRRFNVDLVRVQGLRRKDTYKQMVHDYKAVLQASSDANDNTLASSSSSSVEVIVTPRNIDSNNNEVDGSSSGCDSFRQRSIFEAIGALIRRSANITTHKADVIRGIAEAVLREDQISSVDVCVWLDQVFPSATTPYPRRRCYSRRQRKKISKRRASDGWRKRRREYAKMQELFGSKMSAAAKLVLDGLIRSVFPSMEEMVSFWEPILTTPFKELDGVTAVENRDLQRIADPVSMRELLACEVPLSSAPSPDIFTSRQWRSIPISFRALFLNVILALGSFPSDPLLSRTIFIPKKDGSSLPSEFRPISVSSVVVRHLHKVFASRLMQANLVDERQRDMHDGCAENITVLSTILRDAKSSLKELHVISLDVAKAFDSVCLHTITSTLKRLGLPSAFVRYIEDTYRSSSTVLTIKRLKSEPIRVTRGVRQGDPLSSLLFSLVVDRVLTSLLSSVGYHLGEHKIDALAYADDIVLFSSSILGMKEMLRTAGDEASKYGLQFNAAECIAMSILISSKRKTYKVSTAESFQIGGEPIRQLGPTEHFSYLGVHFSPRGIRKPGGTLVRELANIASAPLKPQQRLKILRCFLVPRFYHQLVLSRCHLQTLKSLDRQVRAAVRKWLRLPKDVSIGYFHARCLDGGLGIPSFRTAIPTLVHSRPSDMAESSCAAVRGVFCHRSVQASIRWAEMVLSFHGRPLIGQETRGKYWASLLHQANDGKELSECARVRASHSWVDRNSAALSGRDYVQFHRVRVNTLPTRIRTSRGRRVVGGPPIECRAGCGTTETAAHVIQGCHRTHGGRVLRYDAICRIAVSSLRQLGWSVRQEPHFHTRGGLRKPDIVAVKDQVVKVIDAQVISASSSLDDSHRRKVAKYDTPDIRHQVASEYGVENDNISFSSITIYWRGI

SEQ ID NO: 3060 - protein, 1071 aa, Trichogramma pretiosum
MNNSRNFCGSSDPPLADPRVNRIASPAAANTRDDAEAPEAERAAVNFTCTVCSRVFTTQRGLSVHFRQHPNEANARIEISSRGKHWKEDEMQLLAKEEARAAIDGVHFINKHLCRRFNVDLVRVQGLRRKDTYKQMVRDYKAVLQASSDANDNTLASSSSSSVEVIVTPRNIDSNNNEVDGSSSGCDSFRQRSIFEAIGALIRRSANITTHKADVIRGIAEAVLREDQISSVDVCVWLDQVFPSSTTPYPRRRCYSRRQRKKISKRRASDGWRKRRREYAKMQELFGSKMSAAAKLVLDGPIRSVFPSMEEMVSFWEPILTTPSKELDGVTAVENRDLQWIADPVSMRELLACEVPLSSAPGPDSITSRQWRSVPISLRALFLNVILALGGFPSDRLLSRTIFIPKKDGSSLPSEFRPISVSSVVVRHLHKVFASRLMRANLVDERQRGMHDGCAENITVLSTILRDAKSSLKELHVVSLDVAKAFDSVSHHAITSTLKRLGLPSAFVRYIEDTYRSSSTVLTIKRSKSEPIRVTRGVRQGDPLSSLLFSLVVDRVLTSLPSSVGYHLGEHKIDALAYADDIVLFSSSILGMKEMLRTAGDEASKYGLQFNAAKCIAMSILISTKRKTYKVSTAESFQIGGGPIRQLGPTEHFRYLGVHFSPLGIRKPGGTLVRELANIASAPLKPQQRLKILRCFLVPRFYHQLVLSRCHLQTLKSLDRQVRAAVRKWLRLPKDVPIGYFHARCLDGGLGIPSFRTAIPALVHSRLSDMAESSCAAVRGVFCHRSVQASIRWAETALSFHGRPLIGQEARGKYWASLLHQANDGKELSECARVRASHSWVDRNSAALSGRDYVQFHHVRVNTLPTRVRTSRGRRVVGGPPIECRAGCGTNETAAHVIQGCHRTHGGRILRHDAICRIAVSSLRQLGWSVRQEPHFHTREGLRKPDIVAVKDQVVKVIDAQVISASSSLDDSHRRKVAKYDTPDIRHQVASEYGVENDNISFSSITISWRGIWSAASAASLCELGLSKCLDSITFRALRGSYMNWLRWNKMTTHISGYTGINSAGRREGIG

SEQ ID NO: 3061 - protein, 1008 aa, Periplaneta americana
MSTNIPLCTPSESTNISSVTCNLCGKSFTHRGINTHVSRCHTSEDSSLDITPSAAGSSSDISTHISAITEPDEYIPCPHCPSGDTRLFRGTRGLRIHHSRVHSDIQDAIPSSNITHEELHSILIQCKKSVAVIRRIPKGARPLAADRLRHLIDLCISFNSEAHWVNLMLYAYIALRVPEKSTNKSLISKIKENINNFQNPSFTESIRTKKKSPHISLAQRIERKIAEGDIRNAVRILSSDMGIAEYNQLTYEELLSKHPPPSRPSTFPDAPVTTANHPSFSESDVLHAIKSFPQGSASGIDGLRPQHLVDLVSISAGDSGKKLLSSITNLCNFLSQGKLNDNVRTNFFGASLLAVNKPGGGIRPIAIGNTFRRLVSKIICHAIKIESGHIFRPHQLGFGSPKGCESVIHSVRSFLHTYDNSDKILLKIDFKNAFNSIERDIMLNSFLEKFPSFYPFVWQSYRYSSNLFFNSKIILSQTGCQQGDPLGPLLFSLTVHSLIQKLTSDLNLFYLDDGTLAGDSHDVLCDLQKIIHLGSELGLEINPNKCEIYFCSAINPNILSSFQNIAPGIKTVTKSNLSVLGSPIFLDSVDEIATQKLELLKTLFGRLEHFHPQVSYFIVKNCLLIPKFTYFLRTTPLFLFPTFLQQADDLLKQSLQSILNTSFDNNSWVQASLPIKLGGLGIRTLTDICIPAFLSSVFGVIDFIKFIFPIYSDAVDICYVPEALNKWYEKTNNFAPPQNPAIQKAWDEIIAGQILDSLISSFTSDKDIARIKALQEKESGSWLHALPSSYVGTLMDGKSFQIATALRLGCKICHVHQCICGETVDSFGHHALSCARSKGRLPRHSAINNIISRSLTSCDIPTLLEPSGISRSDGKRPDGLTLIPWSKGKSLIWDFTCVDTLALSHLKSSVNCAGSAAESAYHAKRRKYEHLTSNYIFVAFAVETFGPWCRDAKDLLTQIGTRLLSRTGDPRCINFLRQRIGIAVQRGNAASILGSFPNSASLEEIFLI

SEQ ID NO: 3062 - protein, 841 aa, Periplaneta americana
MLYAYIALRVPEKSTNKSLISKIKENINNFQNPSFTESIRTKKKSPHISLAQRIERKIAEGDIRNAVRILSSDMGIAEYNQLTYEELLSKHPPPSRPSTFPDAPVTTANHPSFSESDVLHAIKSFPQGSASGIDGLRPQHLVDLVSISAGDSGKKLLSSITNLCNFLSQGKLNDNVRTNFFGASLLAVNKPGGGIRPIAIGNTFRRLVSKIICHAIKIESGHIFRPHQLGFGSPKGCESVIHSVRSFLHTYDNSDKILLKIDFKNAFNSIERDIMLNSFLEKFPSFYPFVWQSYRYSSNLFFNSKIILSQTGCQQGDPLGPLLFSLTVHSLIQKLTSDLNLFYLDDGTLAGDSHDVLCDLQKIIHLGSELGLEINPNKCEIYFCSAINPNILSSFQNIAPGIKTVTKSNLSVLGSPIFLDSVDEIATQKLELLKTLFGRLEHFHPQVSYFIVKNCLLIPKFTYFLRTTPLFLFPTFLQQADDLLKQSLQSILNTSFDNNSWVQASLPIKLGGLGIRTLTDICIPAFLSSVFGVIDFIKFIFPIYSDAVDICYVPEALNKWYEKTNNFAPPQNPAIQKAWDEIIAGQILDSLISSFTSDKDIARIKALQEKESGSWLHALPSSYVGTLMDGKSFQIATALRLGCKICHVHQCICGETVDSFGHHALSCARSKGRLPRHSAINNIISRSLTSCDIPTLLEPSGISRSDGKRPDGLTLIPWSKGKSLIWDFTCVDTLALSHLKSSVNCAGSAAESAYHAKRRKYEHLTSNYIFVAFAVETFGPWCRDAKDLLTQIGTRLLSRTGDPRCINFLRQRIGIAVQRGNAASILGSFPNSISLEEIFLI

SEQ ID NO: 3063 - protein, 1008 aa, Periplaneta americana
MSTNIPLCTPSESTNISSVTCNLCGKSFTHRGINTHVSRCHTSEDSSLDISPSAAGSSSDISTHISATTEPDEYIPCPHCPSGDTRLFRGTRGLRIHHSRVHSDIQDAIPSSNITHEELHSILIQCKKSVAVIRRIPKGARPLAADRLRHLIDLCISFNSEAHWVNLMLYAYIALRVPEKSTNKSLISKIKENINNFQNPSFTESIRTKKKSPHISLAQRIERKIAEGDIRNAVRILSSDMGIAEYNQLTYEELLSKHPPPSRPSTFPDAPVTTANHPSFSESDVLHAIKSFPQGSASGIDGLRPQHLVDLVSISAGDSGKKLLSSITNLCNFLSQGKLNDNVRTNFFGASLLAVNKPGGGIRPIAIGNTFRRLVSKIICHAIKIESGHIFRPHQLGFGSPKGCESVIHSVRSFLHTYDNSDKILLKIDFKNAFNSIERDIMLNSFLEKFPSFYPFVWQSYRYSSNLFFNSKIILSQTGCQQGDPLGPLLFSLTVHSLIQKLTSDLNLFYLDDGTLAGDSHDVLCDLQKIIHLGSELGLEINPNKCEIYFCSAINPNILSSFQNIAPGIKTVTKSNLSVLGSPIFLDSVDEIATQKLELLKTLFGRLEHFHPQVSYFIVKNCLLIPKFTYFLRTTPLFLFPTFLQQADDLLKQSLQSILNTSFDNNSWVQASLPIKLGGLGIRTLTDICIPAFLSSVFGVIDFIKFIFPIYSDAVDICYVPEALNKWYEKTNNFAPPQNPAIQKAWDEIIAGQILDSLISSFTSDKDIARIKALQEKESGSWLHALPSSYVGTLMDGKSFQIATALRLGCKICHVHQCICGETVDSFGHHALSCARSKGRLPRHSAINNIISRSLTSCDIPTLLEPSGISRSDGKRPDGLTLIPWSKGKSLIWDFTCVDTLALSHLKSSVNCAGSAAESAYHAKRRKYEHLTSNYIFVAFAVETFGPWCRDAKDLLTQIGTRLLSRTGDPRCINFLRQRIGIAVQRGNAASILGSFPNSISLEEIFLI

SEQ ID NO: 3064 - protein, 1007 aa, Periplaneta americana
MSTNIPLCTPESTNISSVTCNLCGKSFTHRGINTHVSRCHTSEDSSLDITPSAAESSSDISTHISAITEPDEYIPCPHCPSGDTRLFRGTRGLRIHHSRVHSDIQDAIPSLNITHEELHSILIQCKKSVAVIRRIPKGARPLAADRLRHLIDLCISFNAEAHWINLMLYAYIALRIPEKSTNKSLISKIKENINNFQNPSFTESIRTKKKSPHISLAQRIERKIAEGDIRNAVRILSSDMGIAEYNQLTYEELLSKHPPPSRPSTFPDAPVTTANHPSFSESDVLHAIKSFPQGSASGIDGLRPQHLVDLVSISAGDSGKKLLSSITNLCNFLSQGKLNDNVRTNFFGASLLAVNKPGGGIRPIAIGNTFRRLVSKIICHAIKIESGHIFRPHQLGFGSPKGCESVIHSVRSFLHTYDNSDKILLKIDFKNAFNSIERDIMLNSFLEKFPSFYPFVWQSYRYSSNLFFNSKIILSQTGCQQGDPLGPLLFSLTVHSLIQKLTSDLNLFYLDDGTLAGDSHDVLCDLQKIIHLGSELGLEINPNKCEIYFCSAINPNILSSFQNIAPGIKTVTKSNLSVLGSPIFLDSVDEIATQKLELLKTLFGRLEHFHPQVSYFIVKNCLLIPKFTYFLRTTPLFLFPTFLQQADDLLKQSLQSILNTSFDNNSWVQASLPIKLGGLGIRTLTDICIPAFLSSVFGVIDFIKFIFPIYSDAVDICYVPEALNKWYEKTNNFAPPQNPAIQKAWDEIIAGQILDSLISSFTSDKDIARIKALQEKESGSWLHALPSSYVGTLMDGKSFQIATALRLGCKICHVHQCICGETVDSFGHHALSCARSKGRLPRHSAINNIISRSLTSCDIPTLLEPSGISRSDGKRPDGLTLIPWSKGKSLIWDFTCVDTLALSHLKSSVNCAGSAAESAYHAKRRKYEHLTSNYIFVAFAVETFGPWCRDAKDLLTQIGTRLLSRTGDPRCINFLRQRIGIAVQRGNAASILGSFPNSISLEEIFLI

SEQ ID NO: 3065 - protein, 978 aa, Periplaneta americana
MIFSYRKIKCHTSEDSSLDITPSAAGSSSDISTHISAITEPDEYIPCPHCPSGDTRLFRGTHGLRIHHSCVHSDIQDAIPSSNITHEELHSILIQCKKSVAVIRRIPKGARPLAADRLRHLIDLCISFNSEAHWVNLMLYAYIALRVPEKSTNKSLISKIKENINNFQNPSFTESIRTKKKSPHISLAQRIERKIAEGDIRNAVRILSSDMGIAEYNQLTYEELLSKHPPPSRPSTFPDAPVTTANHPSFSESDVLHAIKSFPQGSASGIDGLRPQHLVDLVSISAGDSGKKLLSSITNLCNFLSQGKLNDNVRTNFFGASLLAVNKPGGGIRPIAIGNTFRRLVSKIICHAIKIESGHIFRPHQLGFGSPKGCESVIHSVRSFLHTYDNSDKILLKIDFKNAFNSIERDIMLNSFLEKFPSFYPFVWQSYRYSSNLFFNSKIILSQTGCQQGDPLGPLLFSLTVHSLIQKLTSDLNLFYLDDGTLAGDSHDVLCDLQKIIHLGSELGLEINPNKCEIYFCSAINPNILSSFQNIAPGIKTVTKSNLSVLGSPIFLDSVDEIATQKLELLKTLFGRLEHFHPQVSYFIVKNCLLIPKFTYFLRTTPLFLFPTFLQQADDLLKQSLQSILNTSFDNNSWVQASLPIKLGGLGIRTLTDICIPAFLSSVFGVIDFIKFIFPIYSDAVDICYVPEALNKWYEKTNNFAPPQNPAIQKAWDEIIAGQILDSLISSFTSDKDIARIKALQEKESGSWLHALPSSYVGTLMDGKSFQIATALRLGCKICHVHQCICGETVDSFGHHALSCARSKGRLPRHSAINNIISRSLTSCDIPTLLEPSGISRSDGKRPDGLTLIPWSKGKSLIWDFTCVDTLALSHLKSSVNCAGSAAESAYHAKRRKYEHLTSNYIFVAFAVETFGPWCRDAKDLLTQIGTRLLSRTGDPRCINFLRQRIGIAVQRGNAASILGSFPNSISLEEIFLI

SEQ ID NO: 3066 - protein, 1008 aa, Periplaneta americana
MSTNIPLCTPSESTNISSVTCNLCGNSFTHRGINTHVSRCHTSEDSSLDITPSAAGSSSDISTHISATTEPDEYIPCPHCPSGDTRLFRGTRGLRIHHSRVHSDIQDAIPSSNITHEELHSILIQCKKSVAVIRRIPKGARPLAADRLRHLIDLCISFNSEAHWVNLMLYAYIALRVPEKSTNKSLISKIKENINNFQNPSFTESIRTKKKSPHISLAQRIERKIAEGDIRNAVRILSSDMGIAEYNQLTYEELLSKHPPPSRPSTFPDAPVTTANHPSFSESDVLHAIKSFPQGSASGIDGLRPQHLVDLVSISAGDSGKKLLSSITNLCNFLSQGKLNDNVRTNFFGASLLAVNKPGGGIRPIAIGNTFRRLVSKIICHAIKIESGHIFRPHQLGFGSPKGCESVIHSVRSFLHTYDNSDKILLKIDFKNAFNSIERDIMLNSFLEKFPSFYPFVWQSYRYSSNLFFNSKIILSQTGCQQGDPLGPLLFSLTVHSLIQKLTSDLNLFYLDDGTLAGDSHDVLCDLQKIIHLGSELGLEINPNKCEIYFCSAINPNILSSFQNIAPGIKTVTKSNLSVLGSPIFLDSVDEIATQKLELLKTLFGRLEHFHPQVSYFIVKNCLLIPKFTYFLRTTPLFLFPTFLQQADDLLKQSLQSILNTSFDNNSWVQASLPIKLGGLGIRTLTDICIPAFLSSVFGVIDFIKFIFPIYSDAVDICYVPEALNKWYEKTNNFAPPQNPAIQKAWDEIIAGQILDSLISSFTSDKDIARIKALQEKESGSWLHALPSSYVGTLMDGKSFQIATALRLGCKICHVHQCICGETVDSFGHHALSCARSKGRLPRHSAINNIISRSLTSCDIPTLLEPSGISRSDGKRPDGLTLIPWSKGKSLIWDFTCVDTLALSHLKSSVNCAGSAAESAYHAKRRKYEHLTSNYIFVAFAVETFGPWCRDAKDLLTQIGTRLLSRTGDPRCINFLRQRIGIAVQRGNAASILGSFPNSISLEEIFLI

SEQ ID NO: 3067 - protein, 1008 aa, Periplaneta americana
MSAKIPLCTPSESTNISSVTCNLCGKSFTHRGIKTHVSRCHTSEDSSLDITPSAAGSSSDISTHISAITEPDEYIPCPHCPSGDTRLFRGTRGVRIHHSRVHSDIQDAIPSSNITHEELHSILIQCKKSVAVIRRIPKGARPLAADRLRHLIDLCISFNSEAHWVNLMLYSYIALRVPEKSTNKSLISKIKENINNFQNPSFTESIRTKKKSPHISLAQRLERKIAEGDIRNAVRILSSDMGIAEYNQLTYEELLSKHPPPSRPSTFPDAPVTTANHPSFSESDVLHAIKSFPQGSASGIDGLRPQHLVDLVSISAGDSGKKLLSSITNLCNFLSQGKLNDNVRTNFFGASLLAVNKPGGGIRPIAIGNTFRRLVSKIICHAIKIESGHIFRPHQLGFGSPKGCESVIHSVRSFLHTYDNSDKILLKIDFKNAFNSIERDIMLNSFLEKFPSFYPFVWQSYRYSSNLFFNSKIILSQTGCQQGDPLGPLLFSLTVHSLIQKLTSDLNLFYLDDGTLAGDSHDVLCDLQKIIHLGSELGLEINPNKCEIYFCSAINPNILSSFQNIAPGIKTVTKSNLSVLGSPIFLDSVDEIATQKLELLKTLFGRLEHFHPQVSYFIVKNCLLIPKFTYFLRTTPLFLFPTFLQQADDLLKQSLQSILNTSFDNNSWVQASLPIKLGGLGIRTLTDICIPAFLSSVFGVIDFIKFIFPIYSDAVDICYVPEALNKWYEKTNNFAPPQNPAIQKAWDEIIAGQILDSLISSFTSDKDIARIKALQEKESGSWLHALPSSYVGTLMDGKSFQIATALRLGCKICHVHQCICGETVDSFGHHALSCARSKGRLPRHSAINNIISRSLTSCDIPTLLEPSGISRSDGKRPDGLTLIPWSKGKSLIWDFTCVDTLALSHLKSSVNCAGSAAESAYHAKRRKYEHLTSNYIFVAFAVETFGPWCRDAKDLLTQIGTRLLSRTGDPRCINFLRQRIGIAVQRGNAASILGSFPNSISLEEIFLI

SEQ ID NO: 3068 - protein, 921 aa, Periplaneta americana
MSTNIPLCTPSESTNISSVTCNLCGKSFTHRGINTHVSRCHTSEDSSLDITPSAAGSSSDISTHISATTEPDEYIPCPHCPSGDTRLFRGTRGLRIHHSRVHSDIQDAIPSSNITHEELHSILIQCKKSVAVIRRIPKGARPLAADRLRHLIDLCISFNSEAHWVNLMLYAYIALRVPEKSTNKSLISKIKENINNFQNPSFTESIRTKKKSPHISLAQRIERKIAEGDIRNAVRILSSDMGIAEYNQLTYEELLSKHPPPSRPSTFPDAPVTTANHPSFSESDVLHAIKSFPQGSASGIDGLRPQHLVDLVSISAGDSGKKLLSSITNLCNFLSQGKLNDNVRTNFFGASLLAVNKPGGGIRPIAIGNTFRRLVSKIICHAIKIESGHIFRPHQLGFGSPKGCESVIHSVRSFLHTYDNSDKILLKIDFKNAFNSIERDIMLNSFLEKFPSFYPFVWQSYRYSSNLFFNSKIILSQTGCQQGDPLGPLLFSLTVHSLIQKLTSDLNLFYLDDGTLAGDSHDVLCDLQKIIHLGSELGLEINPNKCEIYFCSAINPNILSSFQNIAPGIKTVTKSNLSVLGSPIFLDSVDEIATQKLELLKTLFGRLEHFHPQVSYFIVKNCLLIPKFTYFLRTTPLFLFPTFLQQADDLLKQSLQSILNTSFDNNSWVQASLPIKLGGLGIRTLTDICIPAFLSSVFGVIDFIKFIFPIYSDAVDICYVPEALNKWYEKTNNFAPPQNPAIQKAWDEIIAGQILDSLISSFTSDKDIARIKALQEKESGSWLHALPSSYVGTLMDGKSFQIATALRLGCKICHVHQCICGETVDSFGHHALSCARSKGRLPRHSAINNIISRSLTSCDIPTLLEPSGISRSDGKRPDGLTLIPWSKGKSLIWDFTCVDTLALSHLKSSVNCAGSAAAVLE

SEQ ID NO: 3069 - protein, 1007 aa, Periplaneta americana
MSTNIPLCTPESTNISSVTCNLCGKSFTHRGINTHVSRCHTSEDSSLDITPSAAESSSDISTHISAITEPDEYIPCPHCPSGDTRLFRGTRGLRIHHSRVHSDIQDAIPSLNITHEELHSILIQCKKSVAVIRRIPKGARPLAADRLRHLIDLCISFNAEAHWINLMLYAYIALRIPEKSTNKSLISKIKENINNFQNPSFTESIRTKKKSPHISLAQRIERKIAEGDIRNAVRILSSDMGIAEYNQLTYEELLSKHPPPSRPSTFPDAPVTTANHPSFSESDVLHAIKSFPQGSASGIDGLRPQHLVDLVSISAGDSGKKLLSSITNLCNFLSQGKLNDNVRTNFFGASLLAVNKPGGGIRPIAIGNTFRRLVSKIICHAIKIESGHIFRPHQLGFGSPKGCESVIHSVRSFLHTYDNSDKILLKIDFKNAFNSIERDIMLNSFLEKFPSFYPFVWQSYRYSSNLFFNSKIILSQTGCQQGDPLGPLLFSLTVHSLIQKLTSDLNLFYLDDGTLAGDSHDVLCDLQKIIHLGSELGLEINPNKCEIYFCSAINPNILSSFQNIAPGIKTVTKSNLSVLGSPIFLDSVDEIATQKLELLKTLFGRLEHFHPQVSYFIVKNCLLIPKFTYFLRTTPLFLFPTFLQQADDLLKQSLQSILNTSFDNNSWVQASLPIKLGGLGIRTLTDICIPAFLSSVFGVIDFIKFIFPIYSDAVDICYVPEALNKWYEKTNNFAPPQNPAIQKAWDEIIAGQILDSLISSFTSDKDIARIKALQEKESGSWLHALPSSYVGTLMDGKSFQIATALRLGCKICHVHQCICGETVDSFGHHALSCARSKGRLPRHSAINNIISRSLTSCDIPTLLEPSGISRSDGKRPDGLTLIPWSKGKSLIWDFTCVDTLALSHLKSSVNCAGSAAESAYHAKRRKYEHLTSNYIFVAFAVETFGPWCRDAKDLLTRIGTRLLSRTGDPRCINFLRQRIGIAVQRGNAASILGSFPNSVSLEEIFLI

SEQ ID NO: 3070 - protein, 1053 aa, Periplaneta americana
MDDTPTTSNSMHNTKSFVNCKICHKQFTTRGIHIHINRCHNNDSLSQAVSNEETTLNTQNSDKNVSPKNLRKCEICGRLFKSVNRHIVRAHPEVHRNIINHSYNDPVLNNEFTNSSSQPVPSTSSTSEVRGNILNQSYNDPVLNNEFTNSSSQPVSSTSSTSDSLHDNFDLQYWDTQFNTLACLDVSDNAVFDKCVEKYCHYLKQSVSQCKGPQHPATTYYKKRQARKNNPDGITYKQSSNPKNRSKKNSERRKNKYAYDLAQFNYYFQRRKIVQHVLSSKGPMQCKLPVSSVYEYYNNLYGVANNCTLDNYQSSSVSNYSDPDNIIITPEDIAFACKGIKVDTAPGEDGVRMKVIKELRLYKSLSLIATYMLRWGHVPPCLRRARTILIYKDGDPDILKNWRPITIYSVLRRIIERVLDIKLRSYLDLNLNQRGFMSGPGVFLNSSIVNGCLKDSKVNKKDCCVVFLDISKAFDHVSHQHIEQTLNAMPIPPKLKTLITSLLIGNSTTITINKTTKTAPIMIKQGVAQGAPLSPILFNVAIDFVMKELSESNISGEYGYNISPQLNNLSILAFADDLVLLCKNKSAAQYSTSLTMNSLARIGLEVNPHKSNVIHLRKGCLCSDSLTLIDGQEISCIKSDEVIRYLGITFNDEIKFNAAQLIEKLTKNLNQLVTSPLLMPDQKINILNQYIWPQLVYPFQCAPLKDLKVKFLSDIDKLIRSAVKEIINIPTDTPDAMLYAPRRLRGLGVFKAQWEAYLQHLNICQRLLHVDNPHVAATRNLPNEIEHCIKQLPITFDCSERISSQKLRKALREDSFHQWSKLKSKGLGVVFYSHWKKGNSWISTKKGLSSSQWTQAIKMNCNTIPVRTLPGRTLDSTRCRRCDEQETLPHVLGFCHHGELLRINRHNTVRSLIAASIRQNASYEVYEEVGCVSSDGSTRRADIIIIDRQKDKGVILDPTIRFEMHEQQPQEVCREKQVIYEPCCQHLGAQYHITHWTVFGLMFGARGTSPRETLNQLKQYKISDATIDAVGSHVLKSSLAIISNHLYPTKFLL

SEQ ID NO: 3071 - protein, 1053 aa, Periplaneta americana
MADTPTTSNSMHNTKSFVNCKICHKQFTTRGIHIHINRCYNNDSLSQAVSNEETTLNTQNSDKNLSHKNLRKREICGRIFKSVNRHIVRGHPEVHRNIINHSYNNPVLNNEFTNSSSQPVPSTSSTSKVRGNILNQSYNDPVLNNEFTNSSSQPVSYTSSTSDSLHDNFDLQYWDTQFNTLACLDVSDNAVFDKCVEKYCHYLKQSVSQCKGPQHPATTYYKKRQARKNNPDGITYKQSSNPKNRSKKNSERRKNKYAYDLAQFNYYFQRRKIVQHVLSSKGPMQCKLPVSSVYEYYNNLYGVANNCTLDNYQSSSVSNYSDPDNIIITPEDIAFACKGIKVDTAPGEDGVRMKVIKELRLYKSLSLIATYMLRWGHVPPCLRRARTILIYKDGDPDILKNWRPITIYSVLRRIIERVLDIKLRSYLDLNLNQRGFMSGPGVFLNSSIVNGCLKDSKVNKKDCCVVFLDISKAFDHVSHQHIEQTLNAMPIPPKLKTLITSLLIGNSTTITINKTTKTAPIMIKQGVAQGAPLSPILFNVAIDFVMKELSESNISGEYGYNISPQLNNLSILAFADDLVLLCKNKSAAQYSTSLTMNSLARIGLEVNPHKSNVIHLRKGCLCSDSLTLIDGQEISCIKSDEVIRYLGITFNDEIKFNAAQLIEKLTKNLNQLVTSPLLMPDQKINILNQYIWPQLVYPFQCAPLKDLKVKFLSDIDKLIRSAVKEIINIPTDTPDAMLYAPRRLRGLGVFKAQWEAYLQHLNICQRLLHVDNPHVAATRNLPNEIEHCIKQLPITFDCSERISSQKLRKALREDSFHQWSKLKSKGLGVVFYSHWKKGNSWISTKKGLSSSQWTQAIKMNCNTIPVRTLPGRTLDSTRCRRCDEQETLPHVLGFCHHGELLRINRHNTVRSLIAASIRQNASYEVYEEVGCVSSDGSTRRADIIIIDWQKDKGVILDPTIRFEMHEQQPQEVCREKQVIYEPCCQHLGAQYHVTHWTVFGLMFGARGTIPRETLNQLKQYKISDAAIAAIGSHVLKSSLAIISNHLYPTKFLL

SEQ ID NO: 3072 - protein, 1053 aa, Periplaneta americana
MDDTPTTSNSMHNTKSFVNCKICHKQFTTRGIHIHINRCHNNDSLSQAVSNEETTLNTQNSDKNVSPKNLRKCEICGRLFKSVNRHIVRAHPEVHRNIINHSYNDPVLNNEFTNSSSQPVPSTSSTSEVRGNILNQSYNDPVLDSEFTNSSSPPVSSTSFTSDSLHDNFDLQYWDKQFNTLACLDVSDNAVFDKCVEKYCHYLKQSVSQCKGPQHPATTYYKKRQARKNNPDGITYKQSSNPKNRSKKNSERRKNKYAYDLAQFNYYFQRRKIVQHVLSSKGPMQCKLPVSSVYEYYNNLYGVANNCTLDNYQSSSVSNYSDPDNIIITPEDIAFACKGIKVDTAPGEDGVRMKVIKELRLYKSLSLIATYMLRWGHVPPCLRRARTILIYKDGDPDILKNWRPITIYSVLRRIIERVLDIKLRSYLDLNLNQRGFMSGPGVFLNSSIVNGCLKDSKVNKKDCCVVFLDISKAFDHVSHQHIEQTLNAMPIPPKLKTLITSLLIGNSTTITINKTTKTAPIMIKQGVAQGAPLSPILFNVAIDFVMKELSESNISGEYGYNISPQLNNLSILAFADDLVLLCKNKSAAQYSTSLTMNSLARIGLEVNPHKSNVIHLRKGCLCSDSLTLIDGQEISCIKSDEVIRYLGITFNDEIKFNAAQLIEKLTKNLNQLVTSPLLMPDQKINILNQYIWPQLVYPFQCAPLKDLKVKFLSDIDKLIRSAVKEIINIPTDTPDAMLYAPRRLRGLGVFKAQWEAYLQHLNICQRLLHVDNPHVAATRNLPNEIEHCIKQLPITFDCSERISSQKLRKALREDSFHQWSKLKSKGLGVVFYSHWKKGNSWISTKKGLSSSQWTQAIKMNCNTIPVRTLPGRTLDSTRCRRCDEQETLPHVLGFCHHGELLRINRHNTVRSLIAASIRQNASYEVYEEVGCVSSDGSTRRADIIIIDRQKDKGVILDPTIRFEMHEQQPQEVCREKQVIYEPCCQHLGAQYHITHWTVFGLMFGARGTIPRETLNQLKQYKISDATIDAIGSHVLKSSLAIISNHLYPTKFLL

SEQ ID NO: 3073 - protein, 1053 aa, Periplaneta americana
MDDTPTTSNSMHNTKSFVNCKICHKQFTTRGIHIHINRCHNNDSLSQAVSNEETTLNTQNSDKNVSPKNLRKCEICGRLFKSVNRHIVRAHPEVHRNIINHSYNDPVLNNEFTNSSSQPVPSTSSTSEVRGNILNQSYNDPVLNNEFTNSSSQPVSSTSSTSDSLHDNFDLQYWDTQFNTLACLDVSDNAVFDKCVEKYCHYLKQSVSQCKGPQHPATTYYKKRQARKNNPDGITYKQSSNPKNRSKKNSERRKNKYAYDLAQFNYYFQRRKIVQHVLSSKGPMQCKLPVSSVYEYYNNLYGVANNCTLDNYQSSSVSNYSDPDNIIITPEDIAFACKGIKVDTAPGEDGVRMKVIKELRLYKSLSLIATYMLRWGHVPPCLRRARTILIYKDGDPDILKNWRPITIYSVLRRIIERVLDIKLRSYLDLNLNQRGFMSGPGVFLNSSIVNGCLKDSKVNKKDCCVVFLDISKAFDHVSHQHIEQTLNAMPIPPKLKTLITSLLIGNSTTITINKTTKTAPIMIKQGVAQGAPLSPILFNVAIDFVMKELSESNISGEYGYNISPQLNNLSILAFADDLVLLCKNKSAAQYSTSLTMNSLARIGLEVNPHKSNVIHLRKGCLCSDSLTLIDGQEISCIKSDEVIRYLGITFNDEIKFNAAQLIEKLTKNLNQLVTSPLLMPDQKINILNQYIWPQLVYPFQCAPLKDLKVKFLSDIDKLIRSAVKEIINIPTDTPDAMLYAPRRLRGLGVFKAQWEAYLQHLNICQRLLHVDNPHVAATRNLPNEIEHCIKQLPITFDCSERISSQKLRKALREDSFHQWSKLKSKGLGVVFYSHWKKGNSWISTKKGLSSSQWTQAIKMNCNTIPVRTLPGRTLDSTRCRRCDEQETLPHVLGFCHHGELLRINRHNTVRSLIAASIRQNASYEVYEEVGCVSSDGSTRRADIIIIDRQKDKGVILDPTIRFEMHEQQPQEVCREKQVIYEPCCQHLGAQYHITHWTVFGLMFGARGTIPRETLNQLKQYKISDATIDAIGSHVLKSSLAIISNHLYPTKFLL

SEQ ID NO: 3074 - protein, 770 aa, Periplaneta americana
MQCKLPVSSVYEYYNNLYGVANNCTLDNYQSSSVSNYSDPDNIIITPEDIAFACKGIKVDTAPGEDGVRMKVIKELRLYKSLSLIATYMLRWGHVPPCLRRARTILIYKDGDPDILKNWRPITIYSVLRRIIERVLDIKLRSYLDLNLNQRGFMSGPGVFLNSSIVNGCLKDSKVNKKDCCVVFLDISKAFDHVSHQHIEQTLNAMPIPPKLKTLITSLLIGNSTTITINKTTKTAPIMIKQGVAQGAPLSPILFNVAIDFVMKELSESNISGEYGYNISPQLNNLSILAFADDLVLLCKNKSAAQYSTSLTMNSLARIGLEVNPHKSNVIHLRKGCLCSDSLTLIDGQEISCIKSDEVIRYLGITFNDEIKFNAAQLIEKLTKNLNQLVTSPLLMPDQKINILNQYIWPQLVYPFQCAPLKDLKVKFLSDIDKLIRSAVKEIINIPTDTPDAMLYAPRRLRGLGVFKAQWEAYLQHLNICQRLLHVDNPHVAATRNLPNEIEHCIKQLPITFDCSERISSQKLRKALREDSFHQWSKLKSKGLGVVFYSHWKKGNSWISTKKGLSSSQWTQAIKMNCNTIPVRTLPGRTLDSTRCRRCDEQETLPHVLGFCHHGELLRINRHNTVRSLIAASIRQNASYEVYEEVGCVSSDGSTRRADIIIIDRQKDKGVILDPTIRFEMHEQQPQEVCREKQVIYEPCCQHLGAQYHITHWTVLELMFGARATIPRETLNQLKQYKISDATIDAIGSHVLTSSLAIISNHLYPTKFLL

SEQ ID NO: 3075 - protein, 770 aa, Periplaneta americana
MQCKLPVSSVYEYYNNLYGVANNCTLDNYQSSSVSNYSDPDNIIITPEDIAFACKGIKVDTAPGEDGVRMKVIKELRLYKSLSLIATYMLRWGHVPPCLRRARTIPIYKDGDRDILKNWRPITIYSVLRGIIERVLDIKLQSYLDLNLNQRGFMSGPGVFLNSSIVNGCLKDSKVNKKDCCVVFLDISKAFDHVSHQHIEQTLNAMPIPPKLKTLITSLLIGNSTTITINKTTKTAPIMIKQGVAQGAPLSPILFNVAIDFVMKELSESNISGEYGYNISPQLNNLSILAFADDLVLLCKNKSAAQYSTSLTMNSLARIGLEVNPHKSNVIHLRKGCLCSDSLTLIDGQEISCIKSDEVIRYLGITFNDEIKFNAAQLIEKLTKNLNQLVTSPLLMPDQKINILNQYIWPQLVYPFQCAPLKDLKVKFLSDIDKLIRSAVKEIINIPTDTPDAMLYAPRRLRGLGVFKAQWEAYLQHLNICQRLLHVDNPHVAATRNLPNEIEHCIKQLPITFDCSEHISSQKLRKALREDSFHQWSKLKSKGLGVVFYSHWKKGNSWISTKKGLSSSQWTQAIKMNCNTIPVRTPPGRTLDSTRCRRCDEQETLPHVLGFCNHGELLQINRHNTVRFLIAASIRQNASFEVYEEVGCISSDGSTRRTDIIIIDRQKDKGIILDPTIRFEIHEQQPQEVCREKQVIYEPCCQHLGAQYHITHWTVFGLMFGARGTIPRETLNQLKQYKISDATIDAIGSHVLKSSLAIISNHLYPTKFLL

SEQ ID NO: 3076 - protein, 1051 aa, Periplaneta americana
MDDTPTTSNSMHNTKSFVNCKICHKQFTTRGIHIHINRCHNNDSLSQAVSNEETTLNTQNSDKNVSPKNLRKCEICGRLFKSVNRHIVRAHPEVHRNIINHSYNDPVLNNEFTNSSSQPVPSTSSTSEVRGNILNQSYNDPVLNNEFTNSSSQPVSSTSSTSDSLHDNFDLQYWDTQFNTLACLDVSDNAVFDKCVEKYCHYLKQSVSQCKGPQHPATTYYKKRQARKNNPDGITYKQSSNPKNRSKKNSERRKNKYAYDLAQFNYYFQRRKIVQHVLSSKGPMQCKLPVSSVYEYYNNLYGVANNCTLDNYQSSSVSNYSDPDNIIITPEDIAFACKGIKVDTAPGEDGVRMKVIKELRLYKSLSLIATYMLRWGHVPPCLRRARTILIYKDGDPDILKNWRPITIYSVLRRIIERVLDIKLRSYLDLNLNQRGFMSGPGVFLNSSIVNGCLKDSKVNKKDCCVVFLDISKAFDHVSHQHIEQTLNAMPIPPKLKTLITSLLIGNSTTITINKTTKTAPIMIKQGVAQGAPLSPILFNVAIDFVMKELSESNISGEYGYNISPQLNNLSILAFADDLVLLCKNKSAAQYSTSLTMNSLARIGLEVNPHKSNVIHLRKGCLCSDSLTLIDGQEISCIKSDEVIRYLGITFNDEIKFNAAQLIEKLTKNLNQLVTSPLLMPDQKINILNQYIWPQLVYPFQCAPLKDLKVKFLSDIDKLIRSAVKEIINIPTDTPDAMLYAPRRLRGLGVFKAQWEAYLQHLNICQRLLHVDNPHVAATRNLPNEIEHCIKQLPITFDCSERISSQKLRKALREDSFHQWSKLKSKGLGVVFYSHWKKGNSWISTKKGLSSSQWTQAIKMNCNTIPVRTLPGRTLDSTRCRRCDEQETLPHVLGFCHHGELLRINRHNTVRSLIAASIRQNASYEVYEEVGCVSFDGSTRQADIIDRQKDKGVILDPTIRFEMHEQQPQEVCREKQVIYEPCCQHLGAQYHITHWTVFGLMFGARGTIPLETLDQLKQYKISDATIDAIGSHVLKSSLAIIRNHLYPTKFLL

SEQ ID NO: 3077 - protein, 1053 aa, Periplaneta americana
MDDTPTTSYSMHNTKSFVNCKICHKQFTTRGIHIHINRCHNHDSLSQAVSNEETTLNTQNSDKNVSPKNLRKCEICGRLFKSVNRHIVRAHPEVHRNIINHSYNDPVLNNEFTNSSSQPVPSTSSTSEVRGNILNQSYNDPVLNNEFTNSSSQPVSSTSSTSDSLHDNFDLQYWDTQFNTLACLDVSDNAVFDKCVEKYCHYLKQSVSQCKGPQHPATTYYKKRQARKNNPDGITYKQSSNPKNRSKKNSERRKNKYAYDLAQFNYYFQRRKIVQHVLSSKGPMQCKLPVSSVYEYYNNLYGVANNCTLDNYQSSSVSNYSDPDNIIITPEDIAFACKGIKVDTAPGEDGVRMKVIKELRLYKSLSLIATYMLRWGHVPPCLRRARTILIYKDGDPDILKNWRPITIYSVLRRIIERVLDIKLRSYLDLNLNQRGFMSGPGVFLNSSIVNGCLKDSKVNKKDCCVVFLDISKAFDHVSHQHIEQTLNAMPIPPKLKTLITSLLIGNSTTITINKTTKTAPIMIKQGVAQGAPLSPILFNVAIDFVMKELSESNISGEYGYNISPQLNNLSILAFADDLVLLCKNKSAAQYSTSLTMNSLARIGLEVNPHKSNVIHLRKGCLCSDSLTLIDGQEISCIKSDEVIRYLGITFNDEIKFNAAQLIEKLTKNLNQLVTSPLLMPDQKINILNQYIWPQLVYPFQCAPLKDLKVKFLSDIDKLIRSAVKEIINIPTDTPDAMLYAPRRLRGLGVFKAQWEAYLQHLNICQRLLHVDNPHVAATRNLPNEIEHCIKQLPITFDCSERISSQKLRKALREDSFHQWSKLKSKGLGVVFYSHWKKGNSWISTKKGLSSSQWTQAIKMNCNTIPVRTLPGRTLDSTRCRRCDEQETLPHVLGFCHHGELLRINRHNTVRSLIAASIRQNASYEVYEEVGCVSSDGSTRRADIIIIDRQKDKGVILDPTIRFEMHEQQPQEVCREKQVIYEPCCQHLGAQYHITHWTVFGLMFGARGTIPRETLNQLKQYKISDATIDAIGSHVLKSSLAIISNHLYPTKFLL

SEQ ID NO: 3078 - protein, 770 aa, Periplaneta americana
MQCKLPVSSVYEYYNNLYGVANNCTLDNYQSSSVSNYSDPDNIIITPEDIAFACKGIKVDTAPGEDGVRMKVIKELRLYKSLSLIATYMLRWGHVPPCLRRARTILIYKDGDPDILKNWRPITIYSVLRRIIERVLDIKLRSYLDLNLNQRGFMSGPGVFLNSSIVNGCLKDSKVNKKDCCVVFLDISKAFDHVSHQHIEQTLNAMPIPPKLKTLITSLLIGNSTTITINKTTKTAPIMIKQGVAQGAPLSPILFNVAIDFVMKELSESNISGEYGYNISPQLNNLSILAFADDLVLLCKNKSAAQYSTSLTMNSLARIGLEVNPHKSNVIHLRKGCLCSDSLTLIDGQEISCIKSDEVIRYLGITFNDEIKFNAAQLIEKLTKNLNQLVTSPLLMPDQKINILNQYIWPQLVYPFQCAPLKDLKVKFLSDIDKLIRSAVKEIINIPTDTPDAMLYAPRRLRGLGVFKAQWEAYLQHLNICQRLLHVDNPHVAATRNLPNEIEHCIKQLPITFDCSERISSQKLRKALREDSFHQWSKLKSKGLGVVFYSHWKKGNSWISTKKGLSSSQWTQAIKMNCNTIPVRTLPGRTLDSTRCRRCDEQETLPHVLGFCHHGELLRINRHNTVRSLIAASIRQNASYEVYEEVGCVSSDGSTRRADIIIIDRQKDKGVILDPTIRFEIHEQQPQEVCREKQVIYEPCCQHLGAQYHITHWTVFGLMFGARGTIPRKTLNQLKQYKISDATIDAIGSHVLKSSLAIISNHLYPTKFLL

SEQ ID NO: 3079 - protein, 770 aa, Periplaneta americana
MQCKLPVSSVYEYYNNLYGVANNCTLDNYQSSSVSNYSDPDNIIITPEDIAFACKGIKVDTAPGEDGVRMKVIKELRLYKSLSLIATYMLRWGHVPPCLRRARTILIYKDGDPDILKNWRPITIYSVLRRIIERVLDIKLRSYLDLNLNQRGFMSGPGVFLNSSIVNGCLKDSKVNKKDCCVVFLDISKAFDHVSHQHIEQTLNAMPIPPKLKTLITSLLIGNSTTITINKTTKTAPIMIKQGVAQGAPLSPILFNVAIDFVMKELSESNISGEYGYNISPQLNNLSILAFADDLVLLCKNKSAAQYSTSLTMNSLARIGLEVNPHKSNVIHLRKGCLCSDSLTLIDGQEISCIKSDEVIRYLGITFNDEIKFNAAQLIEKLTKNLNQLVTSPLLMPDQKINILNQYIWPQLVYPFQCAPLKDLKVKFLSDIDKLIRSAVKEIINIPTDTPDAMLYAPRRLRGLGVFKAQWEAYLQHLNICQRLLHVDNPHVAATRNLPNEIEHCIKQLPITFDCSERISSQKLRKALREDSFHQWSKLKSKGLGVVFYSHWKKGNSWISTKKGLSSSQWTQAIKMNCNTIPVRTLPGRTLDSTRCRRCDEQETLPHVLGFCHHGELLRINRHNTVRSLIAASIRQNASYEVYEEVGCVSSDGSTRRADIIIIDRQKDKGVILDPTIRFEMHEQQPQEVCREKQVIYEPCCQHLGAQYHITHWTVFGLMFGARGTIPRETLNQLKQYKISDATIDAIGSHVLKSSLAIISNHLYPTKFLL

SEQ ID NO: 3080 - protein, 1053 aa, Periplaneta americana
MDDTPTTSNSMYNTKSFVNCKICRKQFTTRGIHIHINRCHNNDSLSQAVSNEESTLNTQNSDKNVSPKNLRKCEICGRLFKSVNRHIVRAHPEVHRNIINHSYNDPVLNNEFTNSSSQPVPSTSSTSEVRGNILNQSYNDPVLNNEFTNSSSQPVSSTSSTSDSLHDNFDLQYWDTQFNTLACLDVSDNAVFDKCVEKYCHYLKQSVSQCKGPQHPATTYYKKRQARKNNPDGITYKQSSNPKNRSKKNSERRKNKYAYDLAQFNYYFQRRKIVQHVLSSKGPMQCKLPVSSVYEYYNNLYGVANNCTLDNYQSSSVSNYSDPDNIIITPEDIAFACKGIKVDTAPGEDGVRMKVIKELRLYKSLSLIATYMLRWGHVPPCLRRARTILIYKDGDPDILKNWRPITIYSVLRRIIERVLDIKLRSYLDLNLNQRGFMSGPGVFLNSSIVNGCLKDSKVNKKDCCVVFLDISKAFDHVSHQHIEQTLNAMPIPPKLKTLITSLLIGNSTTITINKTTKTAPIMIKQGVAQGAPLSPILFNVAIDFVMKELSESNISGEYGYNISPQLNNLSILAFADDLVLLCKNKSAAQYSTSLTMNSLARIGLEVNPHKSNVIHLRKGCLCSDSLTLIDGQEISCIKSDEVIRYLGITFNDEIKFNAAQLIEKLTKNLNQLVTSPLLMPDQKINILNQYIWPQLVYPFQCAPLKDLKVKFLSDIDKLIRSAVKEIINIPTDTPDAMLYAPRRLRGLGVFKAQWEAYLQHLNICQRLLHVDNPHVAATRNLPNEIEHCIKQLPITFDCSERISSQKLRKALREDSFHQWSKLKSKGLGVVFYSHWKKGNSWISTKKGLSSSQWTQAIKMNCNTIPVRTLPGRTLDSTRCRRCDEQETLPHVLGFCHHGELLRINRHNTVRSLIAASIRQNASYEVYEEVGCVSSDGSTRRADIIIIDRQKDKGVILDPTIRFEMHEQQPQEVCREKQVIYEPCCQHLGAQYHITHWTVFGLMFGARGTIPRETLNQLKQYKISDATIDAIGSHVLKSSLAIISNHLYPTKFLL

SEQ ID NO: 3081 - protein, 1007 aa, Periplaneta americana
MSQDSTNEEAARCLICRKLCKSNAGINIHVGKAHPEERRKKLAHRYTTTFSHSSDFNNASNILPNRNITDTSATYQQSLQKPLETTNRNSVVVNNQDPVQVFQQSEDVISYPENTQSDHIRFHPMKEWEEKLCHIQSVGTSEDFEALMEDVRHFLTQQMTELPGPQHPAVKHYQARKVSKINSKCNYQTTSNPQKKSKRQRMKNRQKYEYELTQYQFYNQRRKVARKVLHNLNHKATCKISTRLITEHFEHVFSTTNNSSPLSDEDEDSIQFPEDIVITESDIHKALFGIKVDTSPGPDRITVRVLRHLKATKFLTLLANTMLHFNHVPKFMKLARTILIHKGDDVNDLKHWRPITIHSVIRRVIERALDIKLRSYIVLNAHQRGFINIPGTHINASLINGCLQSSKLNKKDCCVVFLDVSKAFDSVGHEHILRALKSSGVPQNLFRLIGSLLTNNTIQIETNHTKTKPISVKRGVAQGSPLSPILFNLALNCVLENLTDHEISNQYGFTLSNDLQNLSAFAFADDLALVGKDEKSATALIDMAESKLDELGLEINTIKSKCIILERGVLTKGALISLHGSAIHSTDDKSETIRYLGVDFRDKIFLDKKKIITNLTRDLNNLTQTPLLKPDQKLKIVNEYIWPGLIYPLQCAPLDQLPDSFLKDLDKVIRSAVKEMISLPDDTPNDMLYSSKKVRGLGLIKAEWEANIQHFNICKRLSQVSDDHLLLVRNLEEEKKTALKRLKIPEANITPRTTGIHLRDELRKRSFDSWCQLPHKGKGVVIYEEYPRANSWVSTKRNLSSSEYINAIKMSCNLTAVRSVPGRAFSTTRCRQPGCNETETLGHVLGFCRKGELLRNNRHHRVRGAIACLLRNKGWEVHEEVHCISEDDSHRRADIIAINRQQQKAIIIDPTIRMERDLNQAHQVDQEKRAIYEPCIPYLSAKYNIPLFNWSVTGLFFGARSSLPKFTYHFLKQLSISSFEIQKIISQILKDSLQIIQFHLYHSEGFN

SEQ ID NO: 3082 - protein, 1007 aa, Periplaneta americana
MSQDSTNEEAARCLICRKLCKSNAGINIHMGKAHPEERRKKLAHRYTTAFSHSSDFNNASNILPNKNITDTSATYQQSLQKLLETTNRNSVVVNNQDPVQVFQQSEDVISYPENTQSDHISFHPMKEWEEKLCHIQSVGTSEDFEALMEDVRHFLTQQMTELPGPQHPAVKHYQARKVSKINSKCNYQTTSNPQKKSKRQRMKNRQKYEYELTQYQFYNQRRKVARKVLHNLNHKATCKISTRLITEHFEHVFSTTNNSSPLSDEDEDSIQFPEDIVITESDIHKALFGIKVDTSPGPDRITVRVLRHLKATKFLTLLANTMLHFNHVPKFMKLARTILIHKGDDVNDLKHWRPITIHSVIRRVIERALDIKLRSYIVLNAHQRGFINIPGTHINASLINGCLQSSKLNKKDCCVVFLDVSKAFDSVGHEHILRALKSSGVPQNLFRLIGSLLTNNTIQIETNHTKTKPISVKRGVAQGSPLSPILFNLALNCVLENLTDHEISNQYGFTLSNDLQNLSAFAFADDLALVGKDEKSATALIDMAESKLDELGLEINTIKSKCIILERGVLTKGALISLHGSAIHSTDDKSETIRYLGVDFRDKIFLDKKKIITNLTRDLNNLTQTPLLKPDQKLKIVNEYIWPGLIYPLQCAPLDQLPDSFLKDLDKVIRSAVKEMISLPDDTPNDMLYSSKKVRGLGLIKAEWEANIQHFNICKRLSQVSDDHLLLVRNLEEEKKTALKRLKIPEANITPRTTGIHLRDELRKRSFDSWCQLPHKGKGVVIYEEYPRANSWVSTKRNLSSSEYINAIKMSCNLTAVRSVPGRAFSTTRCRQPGCNETETLGHVLGFCRKGELLRNNRHHRVRGAIACLLRNKGWEVHEEVHCISEDDSHRRADIIAINRQQQKAIIIDPTIRMERDLNQAHQVDQEKRAIYEPCIPYLSAKYNIPLFNWSVTGLFFGARSSLPKFTYHFLKQLSISSFEIQKIISQILKDSLQIIQFHLYHSEGLN

SEQ ID NO: 3083 - protein, 1007 aa, Periplaneta americana
MSQDSTNEEAARCLICRKLCKSNAGINIHMGKAHPLERRKKLAHRYTTAFSHSSDFNNASNILPNKNITDTSATYQQSLQKPLETTNRNSVVVNNQDPVQVFQQSEDVISYPENTQSDHISFHPMKEWEEKLCHIQSVGTSEDFEALMEDVRHFLTQQMTELPGPQHPAVKHYQARKVSKINSKCNYQTTSNPQKKSKRQRMKNRQKYEYELTQYQFYNQRRKVARKVLHNLNHKATCKISTRLITEHFEHVFSTTNNSSPLSDEDEDSIQFPEDIVITESDIHKALFGIKVDTSPGPDRITVRVLRHLKATKFLTLLANTMLHFNHVPKFMKLARTILIHKGDDVNDLKHWRPITIHSVIRRVIERALDIKLRSYIVLNAHQRGFINIPGTHINASLINGCLQSSKLNKKDCCVVFLDVSKAFDSVGHEHILRALKSSGVPQNLFRLIGSLLTNNTIQIETNHTKTKPISVKRGVAQGSPLSPILFNLALNCVLENLTDHEISNQYGFTLSNDLQNLSAFAFADDLALVGKDEKSATALIDMAESKLDELGLEINTIKSKCIILERGVLTKGALISLHGSAIHSTDDKSETIRYLGVDFRDKIFLDKKKIITNLTRDLNNLTQTPLLKPDQKLKIVNEYIWPGLIYPLQCAPLDQLPDSFLKDLDKVIRSAVKEMISLPDDTPNDMLYSSKKIRGLGLIKAEWEANIQHFNICKRLSQVSDDHLLLVRNLEEEKKTALKRLKIPEANITPRTTGIHLRDELRKRSFDSWCQLPHKGKGVVIYEEYPRANSWVSTKRNLSSSEYINAIKMSCNLTAVRSVPGRAFSTTRCRQPGCNETETLGHVLGFCRKGELLRNNRHHRVRGAIACLLRNKGWEVHEEVHCISEDDSHRRADIIAINRQQQKAIIIDPTIRMERDLNQAHQVDQEKRAIYEPCIPYLSAKYNIPLFNWSVTGLFFGARSSLPKFTYHFLKQLSISSFEIQKIISQILKDSLQIIQFHLYHSEGRN

SEQ ID NO: 3084 - protein, 1007 aa, Periplaneta americana
MSQDSTNEEAARCLICGKLCKSNAGINIHMSKAHPEERRKKLAHRYTTAFSHSSDFNNASNILPNKNITDTSATYQQSWQKPLETTNRNSVVVNNQDPVQVFQQSEDVISYPENTQSDHISFHPMKEWEEKLCHIQSVGTSEDFEALMEDVRHFLTQQMTELPGPQHPAVKHYQARKVSKINSKCNYQTTSNPQKKSKRQRMKNRQKYEYELTQYQFYNQRRKVARKVLHNLNHKATCKISTRLITEHFEHVFSTTNNSSPLSDEDEDSIQFPEDIVITESDIHKALFGIKVDTSPGPDRITVRVLRHLKATKFLTLLANTMLHFNHVPKFMKLARTILIHKGDDVNDLKHWRPITIHSVIRRVIERALDIKLRSYIVLNAHQRGFINIPGTHINASLINGCLQSSKLKKKDCCVVFLDVSKAFNSVAHEHILRALKSSGVPQNLFRLIGSLLTNNTIQIETNHTKTKPISVKRGVAQGSPLSPILFNLALNCVLENLTDHEISNQYGFTLSNDLQNLSAFAFADDLALVGKDEKSATALIDMAESKLDELGLEINTIKSKCIILERGVLTKGALISLHGSAIHSTDDKSETIRYLGVDFRDKIFLDKKKIITNLTRDLNNLTQTPLLKPDQKLKIVNEYIWPGLIYPLQCAPLDQLPDSFLKDLDKVIRSAVKEMISLPDDTPNDMLYSSKKVRGLGLIKAEWEANIQHFNICKRLSQVSDDHLLLVRNLEEEKKTALKRLKIPEANITPRTTGIHLRDELRKRSFDSWCQLPHKGKGVVIYEEYPRANSWVSTKRNLSSSEYINAIKMSCNLTAVRSVPGRAFSTTRCRQPGCNETETLGHVLGFCRKGELLRNNRHHRVRGAIACLLRNKGWEVHEEVHCISEDDSHRRADIIAINRQQQKAIIIDPTIRMERDLNQAHQVDQEKRAIYEPCIPYLSAKYNIPLFNWSVTGLFFGARSSLPKFTYHFLKQLSISSFEIQKIISQILKDSLQIIQFHLYHSEGLN

SEQ ID NO: 3085 - protein, 818 aa, Sitophilus oryzae
MKFNTSQRAYYRNLKINSNQPVGPLPTEEEIENYWSSIWSQPVNHNTDSTWIRDIEAELFHLPTMEPITITSDLVAEVIRLTQNWKAAGPDGIHNFWVKRLKSTHTYIAKYFTTFIESPETIPEFLGRGNTYLLPKSERLNNPTKYRPITCLCTLYKILTACIAKSIYKHVEDNKLLSEEQKGCVKKSQGCKEQLIIDSVILEQAANKRRNIYTAFIDYKKAFDSVPHSWLLKVLQIYKIDHKIINMLQHLMSTWNTVLEINQNQGIVISQPISVQRGIFQGDSLSPLWFCLALNPLSSILNKTGYGFHIKYDKTQHHVISHLMYMDDIKLFAGNEKQLQHLLEITKTFSKDIQMSFGLDKCKLLNIKQGRIISSGFDLGDGDIIESLEEHETYKYLGLAQGKRLQHKDIKEKITSIYISRLTNILKSKLNGKNTFTAINSYAIPIISYTFGTIKWTKTELENIQIKTRTTLTKFRAHHPKAAVERLTLPRNKGGRGLIDLRFLHAKQIYGLQQYFLHQASGLHRAVVRADNKHTPLDLQHAVDIRLPSDVIYEREKVEEWTRKVLHGRFPHELNQTYVDQDASNKWLSQADLFLETEGFMLSIQDQVIATRNYRKFILKEPNVVDQCRRCHEPGETIQHVTAGCRVLAPTSYLQRHDQVAKIIHQKLATLCHLKEDITPYYRYEPENVLENAHFKLYWNRSILTDKTTPHNRPDLTFTIKERALTYLIDVGIPNTHNLQSTWSEKLSKYTALAEQVKSLWKQNEVNIVPIIISSTGVIPKALHHSLKKLDLPPLLYIQLQKAVVLQTAAIVRRHLNL

SEQ ID NO: 3086 - protein, 902 aa, Sitophilus oryzae
MRLEIGIASIRADIGRIHQYIEGNKSKKQEKSILKIKEKHKKHAERNPDNETLHEILDTLKQKLKAKAGRIRRYRESTQRRKQNMKFNTSQRAYYRNLKINSNQPVGPLPTEEEIENYWSSIWSQPVNHNTDSTWIRDIEAELFHLPTMEPITITSDLVAEVIRLTQNWKAAGPDGIHNFWVKRLKSTHTYIAKYFTTFIESPETIPEFLGRGNTYLLPKSERLNNPTKYRPITCLCTLYKILTACIAKSIYKHVEDNKLLSEEQKGCVKKSQGCKEQLIIDSVILEQAANKRRNIYTAFIDYKKAFDSVPHSWLLKVLQIYKIDHKIINMLQHLMSTWNTVLEINQNQGIVISQPISVQRGIFQGDSLSPLWFCLALNPLSSILNKTGYGFHIKYDKTQHHVISHLMYMDDIKLFAGNEKQLQHLLEITKTFSKDIQMSFGLDKCKLLNIKQGRIISSGFDLGDGDIIESLEEHETYKYLGLAQGKRLQHKDIKEKITSIYISRLTNILKSKLNGKNTFTAINSYAIPIISYTFGTIKWTKTELENIQIKTRTTLTKFRAHHPKAAVERLTLPRNKGGRGLIDLRFLHAKQIYGLQQYFLHQASGLHRAVVRADNKHTPLDLQHAVDIRLPSDVIYEREKVEEWTRKVLHGRFPHELNQTYVDQDASNKWLSQADLFLETEGFMLSIQDQVIATRNYRKFILKEPNVVDQCRRCHEPGETIQHVTAGCRVLAPTSYLQRHDQVAKIIHQKLATLCHLKEDITPYYRYEPENVLENAHFKLYWNRSILTDKTTPHNRPDLTFTIKERALTYLIDVGIPNTHNLQSTWSEKLSKYTALAEQVKSLWKQNEVNIVPIIISSTGVIPKALHHSLKKLDLPPLLYIQLQKAVVLQTTAIVRRHLNL

SEQ ID NO: 3087 - protein, 1130 aa, Sitophilus oryzae
MKWTDTMNLHVMRCYYTTTNLETTPLVRSELLKMFLRKFPDYTNITEQRLVDQKRIIITKKYISELHLEELKHEVAEELNLSQPNLAFDEISNEKEPETEINLDINQATNQLDTQSIPTLPARVELTQITDIDEKHLETEFQTLLIEYTNMNPICRPKLPKQNNSRKLIRYTKIMDENILPKYLPHITNFLDLHTHIYAAAAAIIKASGGRIQNIERKHNKDQKEPWEMRLEIGIASIRADIGRIHQYIEGNKSKKQEKSILKIKEKHKKHAERNPDNETLHEILDTLKQKLKAKAGRIRRYRESTQRRKQNMKFNTSQRAYYRNLKINSNQPVGPLPTEEEIENYWSSIWSQPVNHNTDSTWIRDIEAELFHLPTMEPITITSDLVAEVIRLTQNWKAAGPDGIHNFWVKRLKSTHTYIAKYFTTFIESPETIPEFLGRGNTYLLPKSERLNNPTKYRPITCLCTLYKILTACIAKSIYKHVEDNKLLSEEQKGCVKKSQGCKEQLIIDSVILEQAANKRRNIYTAFIDYKKAFDSVPHSWLLKVLQIYKIDHKIINMLQHLMSTWNTVLEINQNQGIVISQPISVQRGIFQGDSLSPLWFCLALNPLSSILNKTGYGFHIKYDKTQHHVISHLMYMDDIKLFAGNEKQLQHLLEITKTFSKDIQMSFGLDKCKLLNIKQGRIISSGFDLGDGDIIESLEEHETYKYLGLAQGKRLQHKDIKEKITSIYISRLTNILKSKLNGKNTFTAINSYAIPIISYTFGTIKWTKTELENIQIKTRTTLTKFRAHHPKAAVERLTLPRNKGGRGLIDLRFLHAKQIYGLQQYFLHQASGLHRAVVRADNKHTPLDLQHAVDIRLPSDVIYEREKVEEWTRKVLHGRFPHELNQTYVDQDASNKWLSQADLFLETEGFMLSIQDQVIATRNYRKFILKEPNVVDQCRRCHEPGETIQHVTAGCRVLAPTSYLQRHDQVAKIIHQKLATLCHLKEDITPYYRYEPENVLENAHFKLYWNRSILTDKTTPHNRPDLTFTIKERALTYLIDVGIPNTHNLQSTWSEKLSKYTALAEQVKSLWKQNEVNIVPIIISSTGVIPKALHHSLKKLDLPPLLYIQLQKAVVLQTAAIVRRHLNL

SEQ ID NO: 3088 - protein, 1101 aa, Sitophilus oryzae
MKWTDTMNLHVMRCYYTTTNLETTPLVRSELLKMFLRKFPDYTNITEQRLVDQKRIIITKKYISELHLEELKHEVAEELNLSQPNLAFDEISNEKEPETEINLDINQATNQLDTQSIPTLPARVELTQITDIDEKHLETEFQTLLIEYTNMNPICRPKLPKQNNSRKLIRYTKIMDENILPKYLPHITNFLDLHTHIYAAAAAIIKASGGRIQNIERKHNKDQKEPWEMRLEIGIASIRADIGRIHQYIEGNKSKKQEKSILKIKEKHKKHAERNPDNETLHEILDTLKQKLKAKAGRIRRYRESTQRRKQNMKFNTSQRAYYRNLKINSNQPVGPLPTEEEIENYWSSIWSQPVNHNTDSTWIRDIEAELFHLPTMEPITITSDLVAEVIRLTQNWKAAGPDGIHNFWVKRLKSTHTYIAKYFTTFIESPETIPEFLGRGNTYLLPKSERLNNPTKYRPITCLCTLYKILTACIAKSIYKHVEDNKLLSEEQKGCVKKSQGCKEQLIIDSVILEQAANKRRNIYTAFIDYKKAFDSVPHSWLLKVLQIYKIDHKIINMLQHLMSTWNTVLEINQNQGIVISQPISVQRGIFQGDSLSPLWFCLALNPLSSILNKTGYGFHIKYDKTQHHVISHLMYMDDIKLFAGNEKQLQHLLEITKTFSKDIQMSFGLDKCKLLNIKQGRIISSGFDLGDGDIIESLEEHETYKYLGLAQGKRLQHKDIKEKITSIYISRLTNILKSKLNGKNTFTAINSYAIPIISYTFGTIKWTKTELENIQIKTRTTLTKFRAHHPKAAVERLTLPRNKGGRGLIDLRFLHAKQIYGLQQYFLHQASGLHRAVVRADNKHTPLDLQHAVDIRLPSDVIYEREKVEEWTRKVLHGRFPHELNQTYVDQDASNKWLSQADLFLETEGFMLSIQDQVIATRNYRKFILKEPNVVDQCRRCHEPGETIQHVTAGCRVLAPTSYLQRHDQVAKIIHQKLATLCHLKEDITPYYRYEPENVLENAHFKLYWNRSILTDKTTPHNRPDLTFTIKERALTYLIDVGIPNTHNLQSTWSEKLSKYTALAEQVKSLWKQNEVNIVPIIISSTGVIPKALHHSLKS

SEQ ID NO: 3089 - protein, 965 aa, Cydia splendana
MSTSCSQADSQGYSQSQQEFTKCPHCIHPKFFKGIRGLQIHIGKSHKSINSQPSVPILVHQSSSPSTSRHISASLSSTLSDLKRSFPVIKRIPRGARFTVASSLSKTINDCVSENSPSSWENLFLFAYKTLHVSKKDSRRSLTSKIKLNCSQPNSNCFDVTQNTSLHISKPRERDITKVVEAKINDGDLKGAAQILFSSDTSAPETPETLTILQSKHPAAPSTPNYPDPPNPSLPYMQATEDAIMAAIMSFRNGSAGGLDGITPQHLKDLILGSPGGRNDDLLKSITCLVNLMLSGKVNDEVVPTLYGANLCALGKKDGGVRPIAIGSTFRRLTSKVGCKYITKDLEPLFQPTQLGFGSKGGCEAAVHACRTYLESCKEQVLVKVDIKNAFNSVNRNALLTEIQKNIPGLYPYLWQCYRHPSNLMYTHHQIPSSVGCQQGDPLGPAIFSLAIHPIISALNSKFNIWYLDDGTIGGDANSVLADLRFLVTKFSEIGLELNMSKCELFVSPDVQNDTQIINDFRNNCPGIKLLTKSSLHLLGAPVFEESIPEYIDTQIHRFSEISDRLLQINSHMAFFIIRFCLFVPKFTYVMRCSPLFKYPQLCQKVDEIIHIEIQKIININIDNRQFIHATLPIRFGGLGIRQISSVALPAFLSSVHGTLSLVGKILTPSLRDFEVVYLSEAENAWRLACPNKDMPAEKSTQRFWDEPLCHQVQNWLLNSAQSNTEKARLLASSQHESGFWLHAFPSINCATLLDNNSFRLAVGLRLGAEIVVPHSCPCGTEVDSLGSHGLSCRRSAGRLSRHASLNDVIRRAFVSVGVPAALEPAGLARDDGKRPDGITLIPWQMGRPLIWDATCVDTLAPSHLVATSQRAGDAAAAAETLKRRKYAGLTNNHIFAAFAVETLGPWCRDAHNLFKGLKKRLLETTGDPRAGSFLGQRIGIAIQRGNVASLMGTLPQGTDLGDLR

SEQ ID NO: 3090 - protein, 962 aa, Notocelia uddmanniana
MSVPCSQIDSQRNSQSQDEFVKCPHCIHPKFLKGNRGLQIHIGKCHKPVNSQTSTSAIHQSPSSSTPRHVPAPLSSNLSDHKRSFPVIKRIPRGARFTVATSLSKAINECVSKNSPSSWETLLLFAFKTLYVPKKDPRRSLTSKIKFNCSHPNVLDATQGTFVHSSRTRDRDLTEVVEAKVNDGDLKGAAQILFSTDTSAPDTPETLSTLQNKHPAAPSTPNFPDPPDPALPCLQATEDAVMTAIMSFKNGSAGGLDGLTPQHLKDLIFGSPGGRNDDLLSSITRLVNLMLSGKVNAEVVPTLYGANLCALRKKDGGIRPIAIGSTLRRLTSKVGCKYIAQDLEPTFQPTQLGFGSKGGCEAAVHACRAFLYNCKEQVLLKVDIKNAFNSVNRSALLTEIQKNIPGLYPYLWQCYRHPSNLMYRHHQISSAVGCQQGDPLGPAIFSLAIHPIISALNSKFNTWYLDDGTIGGEANSVLDDLHFLVTKFSEIGLELNMSKCELFISPDTPNRSQILQDFQNNCPGIKLMTKSSLHLLGAPIFEDSIPDYIDNQIQRFSELSDRLLQINSHMALFIIRFCLFVPKFTYAMRCSPFFRFPDLCQKVDSIIHLKIQKIINININERQFIHASLPIRFGGLGIRQISSVALPAFLSSVHSTLSLVGKILDPSLRDFEVAYLSETENAWRSACPGKEIPSKKHIQRLWDEPLCHQVQNWLLDSASSNSEKARLLASSQHESGFWLHAFPSRTCATLLDNNSLRLAVGLRLGANLVVPHRCPCGSEVDSLGCHGLSCQRSAGRLSRHASLNDVIRRAFVSAGVPAALEPPGLGRDDGKRLDGMTLIPWQMGRPLIWDATCVDTLAPSHLASTSMRAGGAAAAAEALKRRKYANLTHNYIFAAFAVETLGPWSQGAHTLFQNLKKRLLETTHDPRAGSFLGQRIGIAIQRGNAASLMGTLPQGTDLGDLT

SEQ ID NO: 3091 - protein, 962 aa, Notocelia uddmanniana
MSVPCSQIDSQRNSKSQDEFVKCPHCIHPKFLKGNRGLQIHIGKCHKPVNSQTSTSAIHQSPSSSTPRHVPAPLSSNLSDHKRSFPVIKRIPRGARFTVATSLSKAINECVSKNSPSSWETLLLFAFKTLYVPKKDPRRSLTSKIKFNCSHPNVLDTTQGTFVHSSRTRDRDLTEVVEAKVNDGDLKGAAQILFSTDTSAPDTPETLSTLQNKHPAAPSTPNFPDPPDPALPCLQATEDAVMTAIMSFKNGSAGGLDGLTPQHLKDLIFGSPGGRNDDLLSSITRLVNLMLSGKVNAEVVPTLYGANWCALRKKDGGIRPIAIGSTLRRLTSKVGCKYIAQDLEPTFQPTQLGFGSKGGCEAAVHACRTFLYNCKEQVLLKVDIKNAFNSVNRSALLTEIQKNIPGLYPYLWQCYRHPSNLMYRHHQISSAVGCQQGDPLGPAIFSLAIHPIISALNFKFNTWYLDDGTIGGEANSVLDDLHFLVTKFSEIGLELNMSKCELFISPDTPNRSQILQDFQNNCPGIKLMTKSSLHLLGAPIFEDSIPDYIDNQIQRFSELSDRLLQINSHMALFIIRFCLFVPKFTYAMRCSPFFRFPDLCQKVDSIIHLKIQKIINININERQFIHASLPIRFGGLGIRQISSVALPAFLSSVHSTLSLVGKILDPSLRDFEVAYLSETENAWRSACPGKEIPSKKHIQRLWDEPLCHQVQNWLLDSASSNSEKARLLASSQHESGFWLHAFPSRTCATLLDNNSLRLAVGLRLGANLVVPHRCPCGSEVDSLGCHGLSCQRSAGRLSRHASLNDDIRRAFVSAGVPAALEPPGLGRDDGKRPDGMTLIPWQMGRPLIWDATCVDTLAPSHLASTSMRAGGAAAAAEALKRRKYANLTHNYIFAAFAVETLGPWSQGAHTLFQNLKKRLLETTHDPRAGSFLGQRIGIAIQRGNAASLMGTLPQGTDLGDLT

SEQ ID NO: 3092 - protein, 959 aa, Pammene fasciana
MSSPCSQADSQRNSQSQHESVKCPLCIHPKFFNGRRGLQIHIGKCHKSVSSQPSIPIHHPSTASTSHHIPVPLSSNLSDYKKSFPVIKRIPRGARFTVATSLSKTINDCLDENSPSSWESLLLFAYKTLHVPTKDLRRSLTSKIKLNCSQPNQFNITQNTSVHATRTRDLTEIVETKVNDGDLKGAAQILFSSDTAAPDTPETLRILQSKHPAAPSSLNYPDPPDPAFPCLQATQDAVMAAIMSFKNGSAGGLDGITPQHLKDLILGSPGGKNEDLLTSITRLVNFMLAGKVNAEVVPTLYGANLCALRKKDGGIRPIAIGTTFRRLTSKIGCKYIAKDLQPLFQPSQLGFGSKGGCEAAVHACRTFLDRSKNQVLVKVDIKNAFNSVSRSAMLTEIQKNIPGLYPYLWQCYRNPSNLMYRHNKIPSTVGCQQGDPLGPAIFSLAINPIISALNSKFNIWYLDDGTIGGEASSVLDDLCSLVTKFGEIGLELNMTKCELFIGPEIQNKSQILNAFSNNCPGIKLMTKSSLHLLGAPVFEDSIPDYIDNQIRLFSELSDRLIQINSHMALFIIRFCLFVPKFTYAMRCSPFFRYPDLCQKIDSIIYIEIQKIINININDRQFIQATLPVRFGGLGIRKISSVALPAFLSSAHGTLSLVGKILQPSLRDFEVTYLSEAENNWQLGCPGKEMPSKTSIQRLWDEPLCRQTQTWLLDTASSNTEKARLLASNQHESGFWLHAFPSTNYATLLDNNSLRLAVGLRLGAQVVVPHRCPCGTEVDSLGYHGLSCRRSAGRLSRHASLNDVIRQALASANVPAALEPPGLARDDGKRPDGMTLIPWQMGRPLVWDATCVDTLAPSHLASTSKKAGGAAAAAEALKRRKYADLTRNHIFTAFAVETLGPWSQDAHIFFKLFKKKLFEATRDPRAGSFLGQRIGIAIQRGNVASLMGSLPQGSDLGDLA

SEQ ID NO: 3093 - protein, 961 aa, Cydia splendana
MSTSCSQADSQVNSQSQHESTKCPYCIHPKFFKGNRGLQIHIGKSHKLVNSQPSVPILQASPPSTSRQIPASLSSNLSDHKGSFPVIKRIPRGARFTVATSLSKTINDCVSENSPSSWENLLLFAYKTLHVSKKDSRRRSLTSKIKLNCSQPNSDITQNISLHTSKSCKRDIIKVVETKVNDGDLKGAAQILFSSDTSAPDTPETLTTLQSKHPAAPSTLNYPDPPTPALPCLQATEDAVMAAILSFRNGSAGGLDGITPQHLKDLILGAPGGRNDELLKSVTCLVNLMLSGKVNDEVVPTIYGANLCALRKKDGGIRPIAIGSTLRRLTSKVGCKYIAQDLEPLFQPTQLGFGSKGGCEAAVHACRTFLDSCKEPVLVKVDIKNAFNSVNRSALLTEIQKNIPGLYPYLWQCYRSPSNLMYRHHQISSSVGCQQGDPLGPAIFSLAIHPIISALNSKFNIWYLDDGTIGGEASSVLDDLRSLVTNFNQIGLEFNMSKCELFISPDVQDKSHILNEFTNSCPGIKLLTKSSLHLLGAPVFEDSIPDYIDTQINHFSELSDRLLQINSHMAFFIIRFCLFVPKFTYAMRCSPFFKFPHLCQKVDDIIHTEIQKIINININNRQFIHATLPIRFGGLGIRQISSVALPAFLSSVHGTLSLVGKILIPSLRDFEVAHLSEAENAWRSACPDKDMPTEKSTQRLWDEPLCRQVQNWLLNSTHSRTEKARLLASSQHESGFWLHAFPSSTCATLLDNNSFRLAVGLRLGAEIVVPHRCPCGTEVDGLGSHGLSCRRSAGRLSRHASLNDVIRRALVSVGVPAALEPPGLARDDGKRPDGITLIPWKMGRPLIWDATCVDTLAPSHLAATSLKAGGAAAEAEGLKRRKYAGLSNNHIFAAFAVETLGPWSSDAHILFQEIKKKLLETSGDPRAGSFLGQRVGIAIQRGNVASLMGTLPQGTDLGDLS

SEQ ID NO: 3094 - protein, 932 aa, Pammene fasciana
MSSPCSQADSQRNSQSQHESVKCPLCIHPKFFNGRRGLQIHIGKCHKSVSSQPSIPIHHPSTASTSHHIPVPLSSNLSDYKKSFPVIKRIPRGARFTVATSLSKTINDCLDENSPSSWESLLLFAYKTLHVPTKDLRRSLTSKIKLNCSQPNQFNITQNTSVHATRTRDLTEIVETKVNDGDLKGAAQILFSSDTAAPDTPETLRILQSKHPAAPSSLNYPDPPDPAFPCLQATQDAVMAAIMSFKNGSAGGLDGITPQHLKDLILGSPGGKNEDLLTSITRLVNFMLAGKVNAEVVPTLYGANLCALRKKDGGIRPIAIGTTFRRLTSKIGCKYIAKDLQPLFQPSQLGFGSKGGCEAAVHACRTFLDRSKNQVLVKVDIKNAFNSVSRSAMLTEIQKNIPGLYPYLWQCYRNPSNLMYRHNKIPSTVGCQQGDPLGPAIFSLAINPIISALNSKFNIWYLDDGTIGGEASSVLDDLCSLVTKFGEIGLELNMTKCELFIGPEIQNKSQILNAFSNNCPGIKLMTKSSLHLLGAPVFEDSIPDYIDNQIRLFSELSDRLIQINSHMALFIIRFCLFVPKFTYAMRCSPFFRYPDLCQKIDSIIYIEIQKIINININDRQFIQATLPVRFGGLGIRKISSVALPAFLSSAHGTLSLVGKILQPSLRDFEVTYLSEAENNWQLGCPGKEMPSKTSIQRLWDEPLCRQTQTWLLDTASSNTEKARLLASNQHESGFWLHAFPSTNYATLLDNNSLRLAVGLRLGAQVVVPHRCPCGTEVDSLGYHGLSCRRSAGRLSRHASLNDVIRRALASANVPAALEPPGLARDDGKRPDGMTLIPWQMGRPLVWDATCVDTLAPSHLASTSKKAGGAAAAAEALKRRKYADLTRNHIFTAFAVETLGPWSQDAHIFFKLLKKNFLKQPVTLGLAHSSGKE

SEQ ID NO: 3095 - protein, 916 aa, Notocelia uddmanniana
MSVPCSQIDSQRNSQSQDEFVKCPHCIHPKFLKGNRGLQIHIGKCHKPVNSQTSTSAIHQSPSSSTPRHVPAPLSSNLSDHKRSFPVIKRIPRGARFTVATSLSKAINECVSKNSPSSWETLLLFAFKTLYVPKKDPRRSLTSKIKFNCSHPNVLDTTQGTFVHSSRTRDRDLTEVVEAKVNDGDLKGAAQILFSTDTSAPDTPETLSTLQNKHPAAPSTPNFPDPPDPALPCLQATEDAVMTAIMSFKNGSAGGLDGLTPQHLKDLIFGSPGGRNDDLLSSITRLVNLMLSGKVNAEVVPTLYGANLCALRKKDGGIRPIAIGSTLRRLTSKVGCKYIAQDLEPTFQPTQLGFGSKGGCEAAVHACRTFLYNCKEQVLLKVDIKNAFNSVNRSALLTEIQKNIPGLYPYLWQCYRHPSNLMYRHHQISSAVGCQQGDPLGPAIFSLAIHPIISALNSKFNTWYLDDGTIGGEANSVLDDLHFLVTKFSEIGLELNMSKCELFISPDTPNRSQILQDFQNNCPGIKLMTKSSLHLLGAPIFEDSIPDYIDNQIQRFSELSGRLLQINSHMALFIIRFCLFVPKFTYAMRCSPFFRFPDLCQKVDSIIHLKIQKIINININERQFIHASLPIRFGGLGIRQISSVALPAFLSSVHSTLSLVGKILDPSLRDFEVAYLSETENAWRSACPGKEIPSKKHIQRLWDEPLCHQVQNWLLDSASSNSEKARLLASSQHESGFWLHAFPSRTCATLLDNNSLRLAVGLRLGANLVVPHRCPCGSEVDSLGCHGLSCQRSAGRLSRHASLNDVIRRAFVSAGVPAALEPPGLGRDDGKRPDGMTLIPWQMGRPLIWDATCVDTLAPSHLASTSMRAGGAAAAAEALKRRKYANLTHNYIFAAFAVETLGPWSQGAHTLFQNLK

SEQ ID NO: 3096 - protein, 917 aa, Pammene fasciana
MSSPCSQADSQRNSQSQHESVKCPLCIHPKFFNGRRGLQIHIGKCHKSVSSQPSIPIHHPSTASTSHHIPVPLSSNLSDYKKYFPVIKRIPRGARFTVATSLSKTINDCLDENSPSSWESLLLFAYKTLHVPTKDLRRSLTSKIKLNCSQPNQFNITQNTSIHATRTRDLTEIVETKVNDGDLKGAAQILFSSDTAAPDTPETLRILQSKHPAAPSSLNYPDPPDPAFPCLQATQDAVMAAIMSFKNGSAGGLDGITPQHLKDLILGSPGGKNEDLLTSITRLVNFMLAGKVNAEVVPTLYGANLCALRKKDGGIRPIAIGTTFRRLTSKIGCKYIAKDLQPLFQPSQLGFGSKGGCEAAVHACRTFLDRSKNQVLVKVDIKNAFNSVSRSAMLTEIQKNIPGLYPYLWQCYRNPSNLMYRHNKIPSTVGCQQGDPLGPAIFSLAINPIISALNSKFNIWYLDDGTIGGEASSVLDDLCSLVTKFGEIGLELNMTKCELFIGPEIQNKSQILNAFSNNCPGIKLMTKSSLHLLGAPVFEDSIPDYIDNQIRLFSELSDRLIQINSHMALFIIRFCLFVPKFTYAMRCSPFFRYPDLCQKIDSIIYIEIQKIINININDRQFIQATLPVRFGGLGIRKISSVALPAFLSSAHGTLSLVGKILQPSLRDFEVTYLSEAENNWQLGCPGKEMPSKTSIQRLWDEPLCRQTQTWLLDTASSNTEKARLLASNQHESGFWLHAFPSTNYATLLDNNSLRLAVGLRLGAQVVVPHRCPCGTEVDSLGYHGLSCRRSAGRLSRHASLNDVIRRALASANVPAALEPPGLARDDGKRPNGMTLIPWQMGRPLVWDATCVDTLAPSHLASTSKKAGGAAAAAEALKRRKYADLTRNHIFTAFAVETLGPWSQDAHIFFKLLKKKTF

SEQ ID NO: 3097 - protein, 721 aa, Pammene fasciana
MAAIMSFKNGSAGGLDGITPQHLKDLILGSPGGKNEDLLTSITRLVNFMLAGKVNAEVVPTLYGANLCALRKKDGGIRPIAIGTTFRRLTSKIGCKYIAKDLQPLFQPSQLGFGSKGGCEAAVHACRTFLDRSKNQVLVKVDIKNAFNSVSRSAMLTEIQKNIPGLYPYLWQCYRNPSNLMYRHNKIPSTVGCQQGDPLGPAIFSLAINPIISALNSKFNIWYLDDGTIGGEASSVLDDLCSLVTKFGEIGLELNMTKCELFIGPEIQNKSQILNAFSNNCPGIKLMTKSSLHLLGAPVFEDSIPDYIDNQIRLFSELSDRLIQINSHMALFIIRFCLFVPKFTYAMRCSPFFRYPDLCQKIDSIIYIEIQKIINININDRQFIQATLPVRFGGLGIRKISSVALPAFLSSAHGTLSLVGKILQPSLRDFEVTYLSEAENNWQLGCPGKEMPSKTSIQRLWDEPLCRQTQTWLLDTASSNTEKARLLASNQHESGFWLHAFPSTNYATLLDNNSLRLAVGLRLGAQVVVPHRCPCGTEVDSLGYHGLSCRRSAGRLSRHASLNDVIRRALASANVPAALEPPGLARDDGKRPDGMTLIPWQMGRPLVWDATCVDTLAPSHLASTSKKAGGAAAAAEALKRRKYADLTRNHIFTAFAVETLGPWSQDAHIFFKLLKKKLFEATRDPRAGSFLGQRIGIAIQRGNVASLMGTLPQGSDLGDLA

SEQ ID NO: 3098 - protein, 965 aa, Cydia splendana
MSTSCSQADSQGYSQSQQEFTKCPHCIHPKFFKGIRGLQIHIGKSHKSINSQPSVSILVHQSSSPSTSRHIPASLSSTLSDLKRSFPVIKRIPRGARFTVASSLSKTINDCVSENSPSSWENLFLFAYKTLHVSKKDSRRSLTSKIKLNCSQPNSNCFDVTQNTSLHISKPRERDITKVVEAKINDGDLKGAAQILFSSDTSAPDTPETLTILQSKHPAAPSTPNYPDPPNPSLPYMQATEDAIMAAIMSFRNGSAGGLDGITPQHLKDLILGSPGGRNDDLLKSITCLVNLMLSGKVNDEVVPTLYGANLCALGKKDGGVRPIAIGSTFRRLTSKVGCKYITKDLEPLFQPTQLGFGSKGGCEAAVHACRTYLESCKEQVLVKVDIKNAFNSVNRNALLTEIQKNIPGLYPYLWQCYRHPSNLMYTHHQIPSSVGCQQGDPLGPAIFSLAIHPIISALNSKFNIWYLDDGTIGGDANSVLADLRFLVTKFSEIGLELNMSKCELFVSPDVQNDTQIINDFRNNCPGIKLLTKSSLHLLGAPVFEESIPEYIDTQIHRFSEISDRLLQINSHMAFFIIRFCLFVPKFTYVMRCSPLFKYPQLCQKVDEIIHIEIQKIININIDNRQFIHATLPIRFGGLGIRQISSVALPAFLSSVHGTLSLVGKILTPSLRDFEVVYLSEAENAWRLACPNKDMPAEKTTQRFWDEPLCHQVQNWLLNSAQSNTEKARLLATSQHESGFWLHAFPSINCATLLDNNSFRLAVGLRLGAEIVVPHSCPCGTEVDSLGSHGLSCRRSAGRLSRHASLNDVIRRAFVSVGVPAALEPAGLARDDGKRPDGITLIPWQMGRPLIWDATCVDTLAPSHLVATSQRAGDAAAAAETLKRRKYAGLTNNHIFAAFAVETLGPWCRDAHNLFKGLKKRLLETTGDPRAGSFLGQRIGIAIQRGNVASLMGTLPQGTDLGDLR

SEQ ID NO: 3099 - protein, 940 aa, Notocelia uddmanniana
MSVPCSQIDSQRNSQSQDEFVKCPHCIHPKFLKGNRGLQIHIGKCHKPVNSQTSTSAIHQSPSSSTPRHVPAPLSSNLSDHKRSFPVIKRIPRGARFTVATSLSKAINECVSKNSPSSWETLHLFAFKTLYVPKKDPRRSLTSKIKFNCSHPNVLDATQGTFVHSSRTRDRDLTEVVEAKVNDGDLKGAAQILFSTDTSAPDTPETLSTLQNKHPAAPSTPNFPDPPDPALPCLQATEDAVMTAIMSFKNGSAGGLDGLTPQHLKDLIFGSPGGRNDDLLSSITRLVNLMLSGKVNAEVVPTLYGANLCALRKKDGGIRPIAIGSTLRRLTSKVGCKYIAQDLEPTFQPTQLGFGSKGGCEAAVHACRTFLYNCKEQVLLKVDIKNAFNSVNRSALLTEIQKNIPGLYPYLWQCYRHPSNLMYRHHQISSAVGCQQGDPLGPAIFSLAIHPIISALNSKFNTWYLDDGTIGGEANSVLDDLHFLFTKFSEIGLELNMSKCELFISPDTPNRSQILQDFQNNCPGIKLMTKSSLHLLGAPIFEDSIPDYIDNQIQRFSELSDRLLQINSHMALFIIRFCLFVPKFTFAMRCSPFFRFPDLCQKVDSIIYLKIQKIINININERQFIHASLPIRFGGLGIRQISSVALPAFLSSVHSTLSLVGKILDPSLRDFEVAYLSETENAWRSACPGKEIPSKKHIQRLWDEPLCHQVQNWLLDSASSNSEKARLLASSQHESGFWLHAFPSRTCATLLDNNSLRLAVGLPLGANLVVPHRCPCGSEVDSLGCHGLSCQRSAGRLSRHASLNDVIRRAFVSAGVPAALEPPGLGRDDGKRPDGMTLIPWQMGRPLIWDATCVDTLAPSHLASTSMRAGGAAAAAEALKRRKYANLTHNYIFAAFAVETLGPWSQGAHTLFQNLQKRLLETTHDPRAGSFLGQRIGIAI

SEQ ID NO: 3100 - protein, 959 aa, Pammene fasciana
MSSPCSQADSQRNSQSQHESVKCPLCIHPKFFNGRRGLQIHIGKCHKSVSSQPSIPIHHPSTASTSHHIPVPLSSNLSDYKKSFPVIKRIPRGARFTVATSLSKTINDCLDENSPSSWESLLLFAYKTLHVPTKDLRRSLTSKIKLNCSQPNQFNITQNTSVHATRTRDLTEIVETKVNDGDLKGAAQILFSSDTAAPDTPETLRILQSKHPAAPSSLNYPDPPDPAFPCLQATQDAVMAAIMSFKNGSAGGLDGITPQHLKDLILGSPGGKNEDLLTSITRLVNFMLAGKVNAEVVPTLYGANLCALRKKDGGIRPIAIGTTFRRLTSKIGCKYIAKDLQPLFQPSQLGFGSKGGCEAAVHACRTFLDRSKNQVLVKVDIKNAFNSVSRSAMLTEIQKNIPGLYPYLWQCYRNPSNLMYRHNKIPSTVGCQQGDPLGPAIFSLAINPIISALNSKFNIWYLDDGTIGGEASSVLDDLCSLVTKFGEIGLELNMTKCELFIGPEIQNKRQILNAFSNNCPGIKLMTKSSLHLLGAPVFEDSIPDYIDNQIRLFSELSDRLIQINSHMALFIIRFCLFVPKFTYAMRCSPFFRYPDLCQKIDSIIYIEIQKIINININDRQFIQATLPVRFGGLGIRKISSVALPAFLSSAHGTLSLVGKILQPSLRDFEVTYLSEAENNWQLGCPGKEMPSKTSIQRLWDEPLCRQTQTWLLDTASSNTEKARLLASNQHESGFWLHAFPSTNYATLLDNNSLRLAVGLRLGAQVVVPHRCPCGTEVDSLGYHGLSCRRSAGRLSRHASLNDVIRRALASANVPAALEPPGLARDDGKRPDGMTLIPWQMGRPLVWDATCVDTLAPSHLASTSKKAGGAAAAAEALKRRKYADLTRNHIFTAFAVETLGPWSQDAHIFFKLLKKKLFEATRDPRAGSFLGQRIGIAIQRGNVASLMGTLPQGSDLGDLA

SEQ ID NO: 3101 - protein, 965 aa, Cydia splendana
MSTSCSQADSHGYSQSQQEFTKCPHCIHPKFFKGIRGLQIHIGKSHKSINSQPSVPILVHQSSSPSTSRHISASLSSTLSDLKRSFPVIKRIPRGARFTVASSLSKTINDCVSENSPSSWENLFLFAYKTLHVSKKDSRRSLTSKIKLNCSQPNSNCFDVTQNTSLHISKPRERDITKVVEAKINDGDLKGAAQILFSSDTSAPETPETLTILQSKHPAAPSTPNYPDPPNPSLPYMQATEDAIMAAIMSFRNGSAGGLDGITPQHLKDLILGSPGGRNDDLLKSITCLVNLMLSGKVNDEVVPTLYGANLCALGKKDGGVRPIAIGSTFRRLTSKVGCKYITKDLEPLFQPTQLGFGSKGGCEAAVHACRTYLESCKEQVLVKVDIKNAFNSVNRNALLTEIQKNIPGLYPYLWQCYRHPSNLMYTHHQIPSSVGCQQGDPLGPAIFSLAIHPIISALNSKFNIWYLDDGTIGGDANSVLADLRFLVTKFSEIGLELNMSKCELFVSPDVQNDTQIINDFRNNCPGIKLLTKSSLHLLGAPVFEESIPEYIDTQIHRFSEISDRLLQINSHMAFFIIRFCLFVPKFTYVMRCSPLFKYPQLCQKVDEIIHIEIQKIININIDNRQFIHATLPIRFGGLGIRQISSVALPAFLSSVHGTLSLVGKILTPSLRDFEVVYLSEAENAWRLACPNKDMPAEKSTQRFWDEPLCHQVQNWLLNSAQSNTEKARLLASSQHESGFWLHAFPSINCATLLDNNSFRLAVGLRLGAEIVVPHSCPCGTEVDSLGSHGLSCRRSAGRLSRHASLNDVIRRAFVSVGVPAALEPAGLARDDGKRPDGITLIPWQMGRPLIWDATCVDTLAPSHLVATSQRAGDAAAAAETLKRRKYAGLTNNHIFAAFAVETLGPWCRDAHNLFKGLKKRLLETTGDPRAGSFLGQRIGIAIQRGNVASLMGTLPQGTDLGDLR

SEQ ID NO: 3102 - protein, 926 aa, Notocelia uddmanniana
MYQQKIKLNAVMPNSQTSTSAIHQSPSSSTPHHVPAPLSSNLSDHKRSFPVIKRIPRGARFTVATSLSKAINECVSKNSPSSWETLLLFAFKTLYVPKKDPRRSLTSKIKYNCSHPNVLDTTQGTFVHSSRTRDRDLTEVVEAKVNDGDLKGAAQILFSTDTSAPDTPETLSTLQNKHPAAPSTPNFPDPPDPALPCLQATEDAVMTAIMSFKNGSAGGLDGLTPQHLKDLIFGSPGGRNDDLLSSITRLVNLMLSGKVNAEVVPTLYGANLCALRKKDGGIRPIAIGSTLRRLTSKVGCKYIAQDLEPTFQPTQLGFGSKGGCEAAVHACRTFLYNCKEQVLLKVDIKNAFNSVNRSALLTEIQKNIPGLYPYLWQCYRHPSNLMYRHHQISSAVGCQQGDPLGPAIFSLAIHPIISALNSKFNTWYLDDGTIGGEVNSVLDDLHFLVTKFSEIGLELNMSKCELFISPDTPNRSQILQDFQNNCPGIKLMTKSSLHLLGAPIFEDSIPDYIDNQIQRFSELSDRLLQINSHMALFIIRFCLFVPKFTYAMRCSPFFRFPDLCQKVDSIIHLKIQKIINININERQFIHASLPIRFGGLGIRQISSVALPAFLSSVHSTLSLVGKILDPSLRDFEVAYLSETENAWRSACPGKEIPSKKHIQRLWDEPLCHQVQNWLLDSASSNSEKARLLASSQHESGFWLHAFPSRTCATLLDNNSLRLAVGLRLGANLVVPHRCPCGSEVDSLGCHGLSCQRSAGRLSRHASLNDVIRRAFVSAGVPAALEPPGLGRDDGKRPDGMTLIPWQMGRPLIWDATCVDTLAPSHLASTSMRAGGAAAAAEALKRRKYANLTHNYIFAAFAVETLGPWSQGAHTLFQNLKKRLLETTHDPRAGSFLGQRIGIAIQRGNAASLMGTLPQGTDLGDLT

SEQ ID NO: 3103 - protein, 962 aa, Notocelia uddmanniana
MSVPCSQIDSQRNSQSQDEFVKCPHCIHPKFLKGNRGLQIHIGKCHKPVNSQTSTSAIHQSPSSSTPRHVPAPLSSNLSDHKRSFPVIKRIPRGARFTVATSLSKAINECVSKNSPSSWETLLLFAFKTLYVPKKDPRRSLTSKIKFNCSHPNVLDATQGTFVHSSRTRDRDLTEVVEAKVNDGDLKGAAQILFSTDTSAPDTPETLSTLQNKHPAAPSTPNFPDPPDPALPCLQATEDAVMTAIMSFKNGSAGGLDGLTPQHLKDLIFGSPGGRNDDLLSSITRLVNLMLSGKVNAEVVPTLYGANLCALRKKDGGIRPIAIGSTLRRLTSKVGCKYIAQDLEPTFQPTQLGFGSKGGCEAAVHACRTFLYNCKEQVLLKVDIKNAFNSVNRSALLTEIQKNIPGLYPYLWQCYRHPSNLMYRHHQISSAVGCQQGDPLGPAIFSLAIHPIISALNSKFNTWYLDDGTIGGEANSVLDDLHFLVTKFSEIGLELNMSKCELFISPDTPNRSQILQDFQNNCPGIKLMTKSSLHLLGAPIFEDSIPDYIDNQIQRFSELSDRLLQINSHMALFIIRFCLFVPKFTYAMRCSPFFRFPDLCQKVDSIIHLKIQKIINININERQFIHASLPIRFGGLGIRQISSVVLPAFLSSVHSTLSLVGKILDPSLRDFEVAYLSETENAWRSACPGKEIPSKKHIQRLWDEPLCHQVQNWLLDSASSNSEKARLLASSQHKSGFWLHAFPSRTCATLLDNNSLRLAVGLRLGANLVVPHRCPCGSKVDSLGCHGLSCQRSAGRLSRHASLNDVIRRAFVSAGVPAALEPPGLGRDDGKRPDGMTLIPWQMGRPLIWDATCVDTLAPSHLASTSMRAGGAAAAAEALKRRKYANLTHNYIFAAFAVETLGPWSQGAHTLFQNLKKRLLETTHDPRAGSFLGQRIGIAIQRGNAASLMGTLPQGTDLGDLT

SEQ ID NO: 3104 - protein, 960 aa, Notocelia uddmanniana
MSTLPSLTDSQPVAQCSQEYIQCPHCTYPKLLKGRRGLQIHLGKSHKLNNSNNIPISHASTSANSLNSPLSTTLSSYKKAFPVIKRIPRGARPAVASSLAKLIDNCLSDNSASSWESLLLFAFNTLHVAKNNNRQSLTSKIKSNCSRSSTIDASCIDFHPKHYSRDVFKVVEGKVNDGDLKGAAQILFSSDISAPDTPDTLATLQGKHPPAPAVLNYPDPPSSALPCLQASEDAVMASLMSFKNGSAGGLDGITPQHLKDLIVGVPGSRNNVLLSSITRLVNFMLAGKVDTGIASTLYGANLCALGKKDGGIRPIAIGATYRRLTSKVCCRYIVQDLEPKFKPTQLGFGSKGGCEAAVHACRTFLCNSKDQILLKVDVKNAFNSVSRVAMLTEIQKEIPNLYPYLWQCYSSPSNLMYNNHSIFSAVGCQQGDPLGPAIFSLAIHPIISALKSKFNIWYLDDGSLGGEASCVLDDLSFLIAKFHEIGLDLNMSKCELYVSQENTNKCKIINDFQNICPDIKIMTKNSLHLLGAPIFEDSIPDFIDSQINRFSEYSDRLLKINSHMALSILRFCLFAPKFTYLMRCSPLWKFPVSCQKIDSILHSQIQKTLNIQLNDRQFLHASLPIRYGGLGIRQISSVVLPAFLSSVHSTISLIGKILAPSPRDIEVSCLTEAENAWKTACPGKDLPFSKGVQRTWDEPLCRQVHDWLLDSAASASEKARLLACSEKESGFWLHAYPSAHCATLLDNNSLRLAVGLRLGSNIVVPHRCPCGVEVHRLGHHGLSCQKSAGRFARHACLNDIIRRALANINIPAVLEPPGLARDDGKRPDGMTLIPWQVGRPLVWDATCVDTLAPSHLPTTSQRAGAAAASAEAAKHRKYTGLAGNHVFAAFGVETLGPWGPDAQKLYRDLKKRLFEHTADHKAGLFLGQRIGIAIQRGNVAGLMGTLPQSADLGDYFVGNL

SEQ ID NO: 3105 - protein, 960 aa, Notocelia uddmanniana
MSTLPSLTDSQPVAQCSQEYIQCPHCTYPKLLKGRRGLQIHLGKAHKLNNSNNIPISHASTSANSLNSPLSTTLSSYKKAFPVIKRIPRGARPAVASSLAKLIDNCLSDNSASSWESLLLFAFNTLHVAKNNNRQSLTSKIKSNCSRSSNIDASCIYFLPKHYSRDVFKVVEGKVNDGDLKGAAQILFSSDISAPDTPDTLATLQGKHPPAPAVLNYPDPPSSALPCLQASEDAVMASLMSFKNGSAGGLDGITPQHLKDLIVGVPGSRNNVLLSSITRLVNFMLAGKVDTGIASTLYGANLCALGKKDGGIRPIAIGATYRRLTSKVCCRYIVQDLEPKFKPTQLGFGSKGGCEAAVHACRTFLCNSKDQILLKVDVKNAFNSVSRVAMLTEIQKEIPNLYPYLWQCYSSPSNLMYNNHSIFSAVGCQQGDPLGPAIFSLAIHPIISALKSKFNIWYLDDGSLGGEGSCVLDDLSFLIAKFHEIGLDLNMSKCELYVSQENTNKCKIINDFQNICPDIKIMTKNSLHLLGAPIFEDSIPDFIDSQINRFSEYSDRLLKINSHMALSILRFCLFAPKFTYLMRCSPLWKFPVSCQKIDSILHSQIQKTLNIQLNDRQFLHASLPIRYGGLGIRQISSVVLPAFLSSVHSTISLIGKILAPSLRDIEVSCLTEAENAWKTACPGKDLPFSKGVQRTWDEPLCRQVHDWLLDSAASASEKARLLACSEKESGFWLHAYPSAHCATLLDNNSLRLAVGLRLGSNIVVPHRCPCGVEVDRLGHHGLSCQKSAGRFARHACLNDIIRRALANINIPAVLEPPGLARDDGKRPDGMTLIPWQVGRPLVWDATCVDTLAPSRLPTTSQRAGAAAASAEAAKHRKYTGLAGNHVFAAFGVETLGPWGPDAQKLYRDLKKRLFEHTADHRAGLFLGQRIGIAIQRGNVASLMGTLPQSADLGDYFVGNL

SEQ ID NO: 3106 - protein, 918 aa, Notocelia uddmanniana
MSTLPSLTDSQPVAQCSQEYIQCPHCTYPKLLKGRRGLQIHLGKAHKLNNSNNIPISHASTSANSLNSPLSTTLSSYKKAFPVIKRIPRGARPAVASSLAKLIDNCLSDNSASSWESLLLFAFNTLHVAKNNNRQSLTSKIKSNCSRSSTIDASCIDFLPKHYSRDVFKVVEGKVNDGDLKGAAQILFSSDISAPDTPDTLATLQGKHPPAPAVLNYPDPPSSALPCLQASEDAVMASLMSFKNGSAGGLDGITPQHLKDLIVGVPGSRNNVLLSSITRLVNFMLAGKVDTGIASTLYGANLCALGKKDGGIRPIAIGATYRRLTSKVCCRYIVQDLEPKFKPTQLGFGSKGGCEAAVHACRTFLCNSKDQILLKVDVKNAFNSVSRVAMLTEIQKEIPNLYPYLWQCYSSPSNLMYNNHSIFSAVGCQQGDPLGPAIFSLAIHPIISALKSKFNIWYLDDGSLGGEASCVLDDLSFLIAKFHEIGLDLNMSKCELYVSQENTNKCKIINDFQNICPDIKIMTKNSLHLLGAPIFEDSIPDFIDSQINRFSEYSDRLLKINSHMALSILRFCLFAPKFTYLMRCSPLWKFPVSCQKIDSILHSQIQKTLNIQLNDRQFLHASLPIRYGGLGIRQISSVVLPAFLSSVHSTISLIGKILAPSLRDIEVSCLTEAENAWKTACPGKDLPFSKGVQRTWDEPLCRQVHDWLLDSAASASEKARLLACSEKESGFWLHAYPSAHCATLLDNNSLRLAVGLRLGSNIVVPHRCPCGVEVDRLGHHGLSCQKSAGRFARHACLNDIIRRALANINIPAVLEPPGLARDDGKRPDGMTLIPWQVGRPLVWDATCVDTLAPSHLPTTSQRAGAAAASAEAAKHRKYTGLAGNHVFAAFGVETLGPWGPDAQKLYRDLKKTALRAHG

SEQ ID NO: 3107 - protein, 960 aa, Notocelia uddmanniana
MSTLPTLTDSQPVAQCSQEYIQCPHCTYPKLLKGRRGLQIHLGKSHKLNNSNNIPISHASTSANSLNSPLSTTLSSYKKAFPVIKRIPRGARPAVASSLAKLIDNCLSVNSASSWESLLLFAFNTLHVAKNNNRQSLTSKIKSNCSRSSTIDASCIDFHPKHYSRDVFKVVEGKVNDGDLKGAAQILFSSDISAPDTPDTLATLQGKHPPAPAVLNYPDPPSSAMPCLQASEDEVMASLMSFKNGSAGGLDGITPQHLKDLIVGVPGSLNNVLLSSITRLVNFMLAGKVDTGIASTLYGANLRALGKKDGGIRPIAIGATYRRLTSKVCCRYIVQDLEPKFKPTQLGFGSKGGCEAAVHACRTFLCNSKDQILLKVDVKNAFNSVSRVAMLTEIQKEIPNLYPYLWQCYSSPSNLMYNNHSIFSAVGGQQGDPLGPAIFSLAIHPIISALKSKFNIWYLDDGSLRGEASCVLDDLSFLIAKFHEIGLDLNMSKCELYVSQENTNKCKIINDFQNICPDIKIMTKNSFHLLGAPIFEDSIPDFIDSQINRFSEYSDRLLKINSHMALSILRFCLFAPKFTYLMRCSPLWKFPVSCQKIDSILHSQIQKTLNIQLNDRQFLHASLPIRYGGLGIRQISSVVLPAFLSSVHSTISLIGKILAPSLRDIEVSCLTEAENAWKTACPGKDLPFSKGVQRTWDEPLCRQVHDWLLDSAASASEKARLLACSEKESGFWLHAYPSAHCATLLDNNSLRLAVGLRLGSNIVVPHRCPCGVEVDRLGHHGLSCQKSAGRFARHACMNDIIRRALANINIPAVLEPPGLARDDGKRPDGMTLIPWQVGRPLVWDATCVDTLAPSHLSTTSQRAGAAAASAEAAKHRKYTGLAGNHVFAAFGVETLGPWGPDAQKLYRDLKKRLFEHTADHRAGLFLGQRIGIAIQRGNVASLMGTLPQSADLGDYFVGNL

SEQ ID NO: 3108 - protein, 675 aa, Notocelia uddmanniana
MSFKNGSAGGLDAITPQHLKDLIIGAPGGRNNDLLSSITRLVNLMLSGKVHAEVISTLYGANLCALGKKDGGIRPIAIGSTFRRLTSKVCCKNIVEDLKPIFQPIQLGFGSKGGCEAAVHACRTYLHHSKEQVLLKVDVKNAFNSVNRAALLTEVQKNIPNLYPYLWQCYSSPSHLMYKNHKLLSAVGCQQGDPLGPAIFSLAIHPIITALNSKFNMWYLDDGSLAGEASSVLSDLSSLISNFREIGLELNMSKCEIYLSPEIINKPQIIDDFNNICPGIKVNTKSTLHLLGAPVFEESIPDFIESQITRFSDYSDRLLKISSHMALFILRSCLFAPKLTYSLRCSPFWKFPQFCEKIDSIIHLQMQKIFNIHITDRQFLQATLPVRHGGIGIRQISSIVLPAFLSSAHSTLPLIGKILTPSLRDFEVAYLCDTENAWQLACPGKSLPSNKTIQRIWDEPLCRQALDWLLTTAITRAEKARLLAISQPESGFWLHAYPSIHCATLLDNNSLRLAVGLRLGADIVVPHHCPCGVKVDSLGSHGLSCTKSAGRLSRHACLNDVIRRALVSVNVPAVLEPPGLVRDDGKRPDGMTLIPWQMGRPLIWDATCVDTLAPSHLASTSLRAGGAAIAAEASKRRKYASLTNSHIFAAFAVETLGPWSPDAHRLYKTIKKNFF

SEQ ID NO: 3109 - protein, 961 aa, Pammene fasciana
MTSLPHAGSQRNIDSQPTALSLDDYVQCPHCPGPKLLKGRRGLHIHLGKCHKPSDSQSSIPPNISSSPTALNHTQLSVRLSKLKASVPVIKRIPRGARSTVANHLAKTIDECTTENSTSSWESLLSFAYNTLHVDKDDNKSLTSKIKSNCTRHQIFDTDRIQNSHHHKPNKISKLIESKINDGDLKGAAQILFSSDATAPDTPETLSALQNKHPPAPAVPDLPDPPSPVLPALQCSEDAVQAAIATFKNGSAGGLDGLTPQHLKDLTSGMPGGQNNNLLSSITRLVNLMLSGKVNPVIIVTLYGANLCALKKKDGGVRPIAVGSTFRRLASKICCKYIISDLQKKLQPIQLGFGTKGGCEAAVHACRTFLHSPEGQVLLKVDVKNAFNQVDRGALLAEIQKYCPSIYQYMWQCYSTPSNLSYKKNTILSSVGCQQGDPLGPAIFSLTIHPVISALTSKFNVWYLDDGSLGGDAYSVLNDLITIINRFKSIGLELNTNKCELYIDSNATNKSQIQLDFENVCPGIKILQKDSLHLLGAPVFEESIPEFINSKINHFSETSDRLLEINSHMAIFILRFCLFVPKFTYYLRCCPIWKFPNYSESIDTILHIQIEKILNIKISDRQFHHATLPVRFGGLGIRQTTSIALPAFLSSVHSTLPLVGKILSPPLRGFEVAYLSEAEDTWKMACPGIDPPMNKAVQRIWDQPICTQVHSNLVNTCSTSQEKARLLAVSERESGSWLHALPSSNFGTLLDNNTLRLAVGLRLGADIVAPHRCPCGAAVDSLGHHGLSCIKSAGRLSRHACLNDIIRRAFVSVNVPAVLEPPGLARDDGKRPDGMTLVPWRLGRPLIWDATCVDTLAPSHVSTTSLRAGGAAAVAEAAKRRKYIALTNQHIFVAFAVETLGPWCSSARKLITDISKKLVEVTGDRRAGSFLAQRIGIAVQRGNAASIMGTLPQGSDLGDLT

SEQ ID NO: 3110 - protein, 692 aa, Pammene fasciana
MPGGQKNNLLSSITRLVNLMLSGKVNPVIIVTLYGANLCALKKKDGGVRPIAVGSTFRRLASKICCKYIISDLQKKFQPIQLGFGTKGGCEAAVHACRTFLHSPEGQVLLKVDVKNAFNQVDRGALLAEIQKYCPSIYQYMWQCYSTPSNLSYKKNTILSSVGCQQGDPLGPAIFSLTIHPVISALTSKFNVWYLDDGSLGGDAYSVLNDLITIINRFKSIGLELNTNKCELYIDSNATNKSQIQLDFENVCPGIKILQKDSLHLLGAPVFEESIPEFINSKINHFSETSDRLLEINSHMAIFILRFCLFVPKFTYYLRCCPIWKFPNYSESIDTILHIQIEKILNIKISDRQFHHATLPVRFGGLGIRQTTSIALPAFLSSVHSTLPLVGKILSPPLRGFEVAYLSEAEDTWKMACPGIDPPMNKAVQRIWDQPICTQVHSNLVNTCSTSQEKARLLAVSERESGSWLHALPSSNFGTLLDNNTLRLAVGLRLGADIVAPHRCPCGAAVDSLGHHGLSCIKSAGRLSRHACLNDIIRRAFVSVNVPAVLEPPGLARDDGKRPDGMTLVPWRLGRPLIWDATCVDTLAPSHVSTTSLRAGGAAAVAEAAKRRKYIALTNQHIFVAFAVETLGPWCSSARKLISDISKKLVEVTGDRRAGSFLAQRIGIAVQRGNAASIMGTLPQGSDLGDLT

SEQ ID NO: 3111 - protein, 961 aa, Pammene fasciana
MTSLPHAGSQRNIDSQPTALSLDDYVQCPHCPGPKLLKGRRGLHIHLGKCHKPSDSQSSIPPNISSSPTALNHTQLSVRLSKLKASVPVIKRIPRGARSTVANHLAKTIDECTTENSTSSWESLLSFAYNTLHVDKDDNKSLTSKIKSNCTRHQIFDTDRIQNSHHHKPNKISKLIESKINDGDLKGAAQILFSSDATAPDTPETLSALQNKHPPAPAVPDLPDPPSPVLPALQCSEDAVQAAIATFKNGSAGGLDGLTPQHLKDLTSGMPGGQNNNLLSSITRLVNLMLSGKVNPVIIVTLYGANLCALKKKDGGVRPIAVGSTFRRLASKICCKYIISDLQKKFQPIQLGFGTKGGCEAAVHACRTFLHSPEGQVLLKVDVKNAFNQVDRGALLAEIQKYCPSIYQYMWQCYSTPSNLSYKKNTILSSVGCQQGDPLGPAIFSLTIHPVISALTSKFNVWYLDDGSLGGDAYSVLNDLITIINRFKSIGLELNTNKCELYIDSNATNKSQIQLDFENVCPGIKILQKDSLHLLGAPVFEESIPEFINSKINHFSETSDRLLEINSHMAIFILRFCLFVPKFTYYLRCCPIWKFPNYSESIDTILHTQIEKILNIKISDRQFHHATLPVRFGGLGIRQTTSIALPAFLSSVHSTLPLVGKILSPPLRGFEVAYLSEAEDTWKMACPGIDPPMNKAVQRIWDQPICTQVHSNLVNTCSTSQEKARLLAVSERESGSWLHALPSSNFGTLLDNNTLRLAVGLRLGADIVAPHRCPCGAAVDSLGHHGLSCIKSAGRLSRHACLNDIIRRAFVSVNVPAVLEPPGLARDDGKRPDGMTLVPWRLGRPLIWDATCVDTLAPSHVSTTSLRAGGAAAVAEAAKRRKYIALTNQHIFVAFAVETLGPWCSSARKLITDISKKLVEVTGDRRAGSFLAQRIGIAVQRGNAASIMGTLPQGSDLGDLT

SEQ ID NO: 3112 - protein, 914 aa, Pammene fasciana
MTSLPHAGSQRNIDSQPTALSLDDYVQCPHCPGPKLLKGRRGLHIHLGKCHKPSDSQSSIPPNISSSPTALNHTQLSVRLSKLKASVPVIKRIPRGARSTVANHLAKTIDECTTENSTSSWESLLSFAYNTLHVDKDDNKSLTSKIKSNCTRHQIFDTDRIQNSHHHKPNKISKLIESKINDGDLKGAAQILFSSDATAPDTPETLSALQNKHPPAPAVPDLPDPPSPVLPALQCSEDAVQAAIATFKNGSAGGLDGLIPQHLKDLTSGMPGGQNNNLLSSITRLVNLMLSGKVNPVIIVTLYGANLCALKKKDGGVRPIAVGSTFRRLASKICCKYIISDLQKKFQPIQLGFGTKGGCEAAVHACRTFLHSPEGQVLLKVDVKNAFNQVDRGALLAEIQKYCPSIYQYMWQCYSTPSNLSYKKNTILSSVGCQQGDPLGPAIFSLTIHPVISALTSKFNVWYLDDGSLGGDAYSVLNDLITIINRFKSIGLELNTNKCELYIDSNATNKSQIQLDFENVCPGIKILQKDSLHLLGAPVFEESIPEFINSKINHFSETSDRLLEINSHMAIFILRFCLFVPKFTYYLRCCPIWKFPNYSESIDTILHIQIEKILNIKISDRQFHHATLPVRFGGLGIRQTTSIALPAFLSSVHSTLPLVGKILSPPLRGFEVAYLSEAEDTWKMACPGIDPPMNKAVQRIWDQPICTQVHSNLVNTCSTSQEKARLLAVSERESGSWLHALPSSNFGTLLDNNTLRLAVGLRLGADIVAPHRCPCGAAVDSLGHHGLSCIKSAGRLSRHACLNDIIRRAFVSVNVPAVLEPPGLARDDGKRPDGMTLVPWRLGRPLIWDATCVDTLAPSHVSTTSLRAGGAAAVAEAAKRRKYIALTNQHIFVAFAVETLGPWCSSARKLITDI

SEQ ID NO: 3113 - protein, 959 aa, Cydia splendana
MASPPHADSQLNTHSQPAAVSLDDYVQCPHCPAPKLLKGRRGLHIHLGKCHKTTLSQIPTISHPSSAPVPITRTNLSDKLSSLKNSTPIIKRIPRGARFTVANHLAKAIDDCVNENSLSSWECLLSFAYNIFNVNKEDRKSLTSKIKLNCTRPHNIDNNHNTHHFKPSQINKLVESKVNDGDLKGAAQLLFSSDTSAPDTPETLTALQSKHPPAPAVPDLPDPPSPALPCLQCSEDAVQIAIASFKNGSAGGLDGITPQHLKDLTSGMPLGQGNNLLASITRLVNLMLAGKVNPDILPTLYGANLCALKKKDGGIRPIAVGSTFRRLTSKICCKYIISDLEKKFQPIQLGFGSKGGCEAAVHACRTFLHSPECEVLLKVDVKNAFNSVDRGALLTEIQKHSPNIYPYMWQCYNSPTKLSYKKNNILSCVGCQQGDPLGPAIFSLAIHPIISALNSKFNVWYLDDGSLGGKANFVLNDLLSIINQFKSIGLELNSNKCELYINPDIPDKLQIQQNFETICPGIKILQKDSLCLLGAPVFEESFPDFINSKVHIFSEFSDRLLEINSHMSLCILRSCLFVPKFTYSLRCSPLWKFPNITASIDSILHTQLEKILNVNISDRQFLHATLPIRFGGLGIRQISGVALPAFLSSVHSTLTLVGKILTPSLRGFEVAYLSEAEDAWKMACPGRDLPINKSVQRIWDQPICTQVHSHLLNSCSTSQEKARILAVSERESGSWLHALPSSNLGTLLDSNTLRLAVGLRLGSNIVTPHRCPCGTFVDSLGHHGLSCPKSAGRLSRHACLNDILRRAFISANVPAILEPPGLARDDGKRPDGMTLVPWSMGRPLIWDATCVDTLAPSHLGSTSLRAGGAATAAEAAKCRKYIALTDRHIFAAFAVETLGPWCPRAHKLIRQISKKIIEVTGDRKAGSFLAQRIGIAIQRGNAASLMGTLPQGSDLGDLA

SEQ ID NO: 3114 - protein, 959 aa, Cydia splendana
MASPPHADSQLNTHSQPAAVSLDDYVQCPHCPAPKLLKGRRGLHIHLGKCHKTTLSQIPTISHPSSAPVPITRTNLSDKLSSLKNSTPIIKRIPRGARFTVANHLAKAIDDCVNENSLSSWECLLSFAYNIFNVNKEDRKSLTSKIKLNCTRPHNIDNNHNTHHFKPSQINKLVESKINDGDLKGAAQLLFSSDTSAPDTPETLTALQSKHPPAPAVPDLPDPPSPALPCLQCSEDAVQIAIASFKNGSAGGLDGITPQHLKDLTSGMPLGQGNNLLASITRLVNLMLAGKVNPDILPTLYGANLCALKKKDGGIRPIAVGSTFRRLTSKICCKYIISDLEKKFQPIQLGFGSKGGCEAAVHACRTFLHSPECEVLLKVDVKNAFNSVDRGALLTEIQKHSPNIYPYMWQCYNSPTKLSYKKNNILSCVGCQQGDPLGPAIFSLAIHPIISALNSKFNVWYLDDGSLGGKANFVLNDLLSIINQFKSIGLELNSNKCELYINPDIPDKLQIQQNFETICPGIKILQKDSLCLLGAPVFEESFPDFINSKVHIFSEFSDRLLEINSHMALCILRSCLFVPKFTYSLRCSPLWKFPNITASIDSILHTQLEKILNVNISDRQFLHATLPIRFGGLGIRQISGVALPAFLSSVHSTLTLVGKILTPSLRGFEVAYLSEAEDAWKMACPGRDLPINKSVQRIWDQPICTQVHSHLLNSCSTSQEKARILAVSERESGSWLHALPSSNLGTLLDSNTLRLAVGLRLGSNIVTPHRCPCGTFVDSLGHHGLSCPKSAGRLSRHACLNDILRRAFISANVPAILEPPGLARDDGKRPDGMTLVPWSMGRPLIWDATCVDTLAPSHLGSTSLRAGGAATAAEAAKCRKYIALTDRHIFAAFAVETLGPWCPRAHKLIRQISKKIIEVTGDRKAGSFLAQRIGIAIQRGNAASLMGTLPQGSDLGDLA

SEQ ID NO: 3115 - protein, 959 aa, Cydia splendana
MASPPHADSQLNTHSQPAAVSLDDYVQCPHCPAPKLLKGRRGLHIHLGKCHKTTLSQIPTISHPSSAPVPITRTNLSDKLSSLKNSTPIIKRIPRGARFTVANHLAKAIDDCVNENSLSSWECLLSFAYNIFNVNKEDRKSLTSKIKLNCTRPHNIDNNHNTHHFKPSQINKLVESKINDGDLKGAAQLLFSSDTSAPDTPETLTALQSKHPPAPAVPDLPDPPSPALPCLQCSEDAVQIAIASFKNGSAGGLDGITPQHLKDLTSGMPLGQGNNLLASITRLVNLMLAGKVNPDILPTLYGANLCALKKKDGGIRPIAVGSTFRRLTSKICCKYIISDLEKKFQPIQLGFGSKGGCEAAVHACRTFLHSPECEVLLKVDVKNAFNSVDRGALLTEIQKHSPNIYPYMWQCYNSPTKLSYKKNNILSCVGCQQGDPLGPAIFSLAIHPIISALNSKFNVWYLDDGSLGGKANFVLNDLLSIINQFKSIGLELNSNKCELYINPDIPDKLQIQQNFETICPGIKILQKDSLCLLGAPVFEESFPDFINSKVHIFSEFSDRLLEINSHMALCILRSCLFVPKFTYSLRCSPLWKFPNITASIDSILHTQLEKILNVNISDRQFLHATLPIRFGGLGIRQISGVALPAFLSSVHSTLTLVGKILTPSLRGFEVAYLSEAEDAWKMACPGRDLPINKSVQRIWDQPICTQVHSHLLNSCSTSQEKARILAVSERESGSWLHALPSSNLGTLLDSNTLRLAVGLRLGSNIVTPHRCPCGTFVDSLGHHGLSCPKSAGRLSRHACLNDILRRAFISANVPAILEPPGLARDDGKRPDGMTLVPWSMGRPLIWDATCVDTLAPSHLGSTSLRAGGAATAAEAAKCRKYIALTDRHIFAAFAVETLGPWCPRAHKLIRQISKKIIEVTGDRKAGSFLAQRIGIAIQRGNAASLMGTLTQGSDLGDLA

SEQ ID NO: 3116 - protein, 997 aa, Pammene fasciana
MSNSPARPDSQQISQSPLVQCPYCSQPKFFKGQRGLRIHLGKAHKSTGSQSLLPVPGTSHNVPVSQSPSPNTSPCVSVPQSPTPAVSFQVTVPQSPTPGSSHHAPGDLSSVLIHHKKSFPVVKRIPRGARYTVATSLLKTIDNCVNKNDRSSWESLFLFVFNTLHVSKREPRRSLTSKIKSNCARAGNIGASQDSGERLSKPRDVVKVVEAKFNDGDLKGAAQILFSGDTVAPNTPETLESLLGKHPPAPLTLNYPDPPNPALPCLQVGEDAVMAAIMSFKCGSAGGLDCLTPQHLKDLLLGVPGGRNDDLLAGITRLVNLMLAGRVNAEVVPTLYGANLCALRKKDGGIRPIAIGSTFRRLASKVGCRSVVKDLETMFQPIQLGFGSKGGCEAAVHACRTFLRSSKDHVLVKVDVKNAFNSICRGALLREVQKNVPSLYPYLWQCYNRPSDLMYGEHNIPSAVGCQQGDPLGPAIFSLAIHPIISSLSCNFNMWYLDDGSLGGESGSVLNDLACLFTKFEEVGLELNMSKCELFVNSDNENRSQVVEDFESTCPGINIKDSGSLHLLGAPVFEESVPDFAGGLIHRFSQHSDCLLQVCSHMAFFILRFCLLVPKFTYVMRCSPFWKFPQLCDRIDDIILFTIQKILNIKVDQRQFSHATLPIRFGGLGIRRLSSVALPAFLSSVHSTLPLVGKILNPSLGDFEVAYLSEAENAWSLACPSVELPTQRGVKRAWEHLCRKVQVDLLGSSNSVVERARLLASAERESGFWLQAFPSRSCATLLDNNSFKLAVGLRLGADLVVPHRCLCGAEVDSLGIHGLSCRRSAGRISRHASLNDVIRRAFASVGVPAALEPPGLARDDGKRPDGMTLIPWQLGRPLVWDATCVDTLAPSHLTTTSVRAGGAASAADALKQRKYAGLPNSMEFSAFAVETLGPWSPGAIKLFKELKKRLVEVSGDRRAGSFLGQRLGIAIQRGNVASIMGTLPQGSDLGDIWGMGC

SEQ ID NO: 3117 - protein, 1026 aa, Pammene fasciana
MLNSPALAAQTDSQMNSQSPLELVQCPYCQEPKFFKGQRGLQIHVGKAHKSTNSQLLSQPQLPVNLLGVPAFHQSPISSTPLHVPVPNHQSPIPSTSHGVPINVQPPIPCPRHHAPVSHHQSLVPDTSPHSPVPLSTILSNHKKAFPVVKRIPRGARYTVATSLSRIIDDCVNKNSPSSWESLLLFAFNTLHVTKKDPRRSLTSKIKLNCTRSDNLDVSRDSADHRSKPRNIFKVVEVKVNDGDLKGAAQILFSSDTSAPDTPETLASLQAKHPPAPSTLNYPDSPNPAQPCLQVTADAVMAAIMSFKSGSAGGLDGLTPQHLKDLLVGAPGGRNDDLLASITRLVNLMLAGKVDAQVVPTLYGANLCALRKKDGGIRPIAIGSTFRRLTSKVCCRSIVQDLEPIFQPTQLGFGSKDGCEAAVHACRTFLLNGRDQVLVKVDVRNAFNAVSREAVLREAQKNIPGLYSYLWQCYSQPSNLMYREHNIQSEVGCQQGDPLGPAIFSLAIHPIISALHCKFNVWYLDDGSLGGEASSVLDDLVSLTSKFSEIGLELNTSKCELFVGPDCENRSQIINDFENVCPGIKLVSASSLHLLGAPVLEESIPDFIENQIQRFSQHSECLLKISSHIAFFILRFCLLVPKFTYALRCSPFWKFPQLCERVDGVIHIHIQRILNITVGERQFVQATLPVRFGGLGVRRVSSVALPAFLSSVHSTLSLIGKILLPSLRDFEVAYLPEAINEWSVACPDRELPSRREVQRMWDEPLCRQVQAGLLNSATSAVEKARLLASSELESGFWLQAYPSSSCATLLDDNSLRLAVGLRLGAGIVVPHRCLCGAEVDSLGYHGLSCRKSAGRFSRHASLNDVIRRAFVSVGVPAALEPPGLLRDDGKRPDGMTLIPWQSGRPLIWDATCVDTLAPSHLSATSVQAGGAAVAAEALKRRKYVGLLGNNDFVAFAVETLGPWSPNAHKLFKELKRRLLDSSGDRRADGSFLGQRIGIAIQRGNVASIMGTLPQGADLGDNWGPGG

SEQ ID NO: 3118 - protein, 998 aa, Pammene fasciana
MSDSPARPDSQQISQSPLVQCPYCSQPKFFKGQRGLRIHLGKAHKSTGSQSLLPVPGTSHNVPVSQSPSPNTSPCVSVPQSPTPAVSFQVTVPQSPTPGSSHHAPGDLSSVLIHHKKSFPVVKRIPRGARYTVATSLLKTIDNCVNKNDRSSWESLFLFVFNTLHVSKREPRRSLTSKIKSNCARAGNIGASQDSGERLSKPRDVVKVVEAKFNDGDLKGAAQILFSGDTVAPNTPETLESLLGKHPPAPLTLNYPDPPNPALPCLQVSEDAVMAAIMSFKCGSAGGLDGLTPQHLKDLLLGVPGGRNDDLLAGITRLVNLMLAGRVNAEVVPTLYGANLCALRKKDGGIRPIAIGSTFRRLASKVGCRSVVKDLETMFQPIQLGFGSKGGCEAAVHACRTFLRSSKDHVLVKVDVKNAFNSISRGALLREVQKNVPSLYPYLWQCYNRPSDLMYGEHNIPSAVGCQQGDPLGPAIFSLAIHPIISSLSCNFNMWYLDDGSLGGESGSVLNDLACLFTKFQEVGLELNMSKCELFVNSDNEDRSQVVEDFESTCPGINIKDSGSLHLLGAPVFEESVPDFAGGLIHRFSQHSDCLLQVCSHMAFFILRFCLLVPKFTYVMRCSPFWKFPQLCDRIDNIILFTIQKILNIKVDQRQFSHATLPIRFGGLGIRRVSSVALPAFLSSVHSTLPLVGKILNPSLGDFEVAYLSEAENAWSLACPSVELPTQRGVQRVWDEHLCRKVQVDLLGSSNSVVERARLLASAERESGFWLQAFPSRSCATLLDNNSFRLAVGLRLGADLVVPHRCLCGAEVDSLGIHGLSCRRSAGRISRHASLNDVIRRAFASVGVPAALEPPGLARDDGKRPDGMTLIPWQLGRPLVWDATCVDTLAPSHLTTTSVRAGGAASAADALKQRKYAGLPNSMEFSAFAVETLGPWSPGAIKLFKELKKRLVEVSGDRRAGSFLGQRLGIAIQRGNVASIMGTLPQGSDLGDIWGMGC

SEQ ID NO: 3119 - protein, 1025 aa, Pammene fasciana
MLNSPASAAQTGSQMNSHSPIELVQCPYCQEPKFFKGQRGLQIHVGKAHKSTNSQLLPQPQLPVDLLGVPAFHQSSVSSTPLHVPVPNHQSPIPSTSHGVAVTLQPPIPCPPHHAPAPHHQSPVPDTSPHIQVPLSTILSNYKKAYPVIKRIPRGARYTVATSLSRIIDDCVNKNSPSSWESLLLFAFNTLHVTKKDPRRSLTSKIKLNCTRSSDLDVSRDSADHRSKPRNIFKVVEVKVNDGDLKGAAQILFSSDTSAPDTPETLASLQAKHPPAPSTLNYPDSPNPAQSCLQVTADAVMAAIMSFKSGSAGGLDGLTPQHLKDLLVGAPGGRNDDLLASITRLVNLMLAGRVDAQVVPTLYGANLCALRKKDGGIRPIAIGSTFRRLTSKVCCRSIVQDLEPIFQPTQLGFGSKGGCEAAVHACRTFLLNDRDQVLVKVDVRNAFNAVSREAVLREAQKNIPGLYSYLWQCYSQPSNLMYGGHNIQSAVGCQQGDPLGPAIFSLAIHPIISALHCKFNVWYLDDGSLGGEASSVLDDLVSLTSKFSEIGLELNTGKCELFVGPDSENRSQIINDFENVCPGIKLVSESSLHLLGAPVLEESIPDFIENQIQRFSQHSECLLKISSHVAFFILRFCLLVPKFTYALRCSPFWKFPQLCERVDGVIHIHIQRVLNITVGERQFVQATLPVRFGGLGVRRVSSVALPAFLSSVHSTLSLVGKILLPSLRDFEVAYLPDAINEWSVACPDRELPTRREVQRMWDEPLCRQVQAGLLNSATSAVEKARLLASSELESGFWLQAYPSSSCATLLDNNSLRLAVGLRLGAEIVVPHRCLCGAEVDSLGYHGLSCRKSAGRFSRHASLNDVIRRAFVSVGVPAALEPPGLLRDDGKRPDGMTLIPWQSGRPLIWDATCVDTLAPSHVAATSVQAGGAAVAAEALKRRKYVDLLGNNDFVAFAVETLGPWSPNAHKLFKELKRRLLDSSGDRRAGSFLGQRLGIAIQRGNVASIMGTLPQGTDLGDNWGPGG

SEQ ID NO: 3120 - protein, 1025 aa, Pammene fasciana
MLNSPASAAQTGSQMNSHSPIELVQCPYCQEPKFFKGQRGLQIHVGKAHKSTNSQLLPQPQLPVDLLGVPAFHQSSVSSTPLHVPVPNHQSPIPSTSHGVAVTLQPPIPCPPHHAPAPHHQSPVPDTSPHIQVPLSTILSNYKKAYPVIKRIPRGARYTVATSLSRIIDDCVNKNSPSSWESLLLFAFNTLHVTKKDPRRSLTSKIKLNCTRSSDLDVSRDSADHRSKPRNIFKVVEVKVNDGDLKGAAQILFSSDTSAPDTPETLASLQAKHPPAPSTLNYPDSPNPAQSCLQVTADAVMAAIMSFKSGSAGGLDGLTPQHLKDLLVGAPGGRNDDLLASITRLVNLMLAGRVDAQVVPTLYGANLCALRKKDGGIRPIAIGSTFRRLTSKVCCRSIVQDLEPIFQPTQLGFGSKGGCEAAVHACRTFLLNDRDQVLVKVDVRNAFNAVSREAVLREAQKNIPGLYSYLWQCYSQPSNLMYGGHNIQSAVGCQQGDPLGPAIFSLAIHPIISALHCKFNVWYLDDGSLGGEASSVLDDLVSLTSKFNEIGLELNTGKCELFVGPDSENRSQIINDFENVCPGIKLVSESSLHLLGAPVLEESIPDFIENQIQRFSQHSECLLKISSHVAFFILRFCLLVPKFTYALRCSPFWKFPQLCERVDGVIHIHIQRVLNITVGERQFVQATLPVRFGGLGVRRVSSVALPAFLSSVHSTLSLVGKILLPSLRDFEVAYLPDAINEWSVACPDRELPTRREVQRMWDEPLCRQVQAGLLNSATSAVEKARLLASSELESGFWLQAYPSSSCATLLDNNSLRLAVGLRLGAEIVVPHRCLCGAEVDSLGYHGLSCRKSAGRFSRHASLNDVIRRAFVSVGVPAALEPPGLLRDDGKRPDGMTLIPWQSGRPLIWDATCVHTLAPSHVAATSVQAGGAAVAAEALKRRKYVDLLGNNDFVAFAVETLGPWSPNAHKLFKELKRRLLDSSGDRRAGSFLGQRLGIAIQRGNVASIMGTLPQGTDLGDNWGPGG

SEQ ID NO: 3121 - protein, 988 aa, Cydia pomonella
MASSPAQADSQLSSLSPLNLVQCPHCPQPKFFKGQRGLQIHISKAHKSTNSQSFLQLPVAYTSPHVPSPLLSPTSTASLQVPVSHPSPSPATSRQDSVSLSTNLSNHRRALPIVKRIPRGARITVATSLSKAINDCVEENSPSSWEGLLLFAFNTLHVTKRDPRRSLTSKIKQNCTHLGNVNASQEINVPDGNNSRDLFKVIEAKVNDGDLKGAAQIVFSSDTSAPDTPETLASLEAKHPLAPSTSNYPDPPNPAVPCLQASKDAVMAAIMSFKNGSAGGLDGLRPQHLKDLILGAPGGRNEDLLLSITRLVNLMLAGKVSAGVVPTLYGASLCALRKKDGGIRPIAIGSTFRRLVSKIGCKSVAQDLEPMFQPTQLGFGSKGGCEAAVHACRTFLHRCEEQVLLKVDIRNAFNSVDRGAMLTEVQKNIPGLYPYLWQCYRYPSNLMFGPHNILSAAGCQQGDPMAPAIFSLAIHPIISALSSKFNCWYLDDGTLGGEASTVLEDLRSLTVKLGEVGLELNMSKCELYISSDHPDKSRILREFEVDCPGIKLLSKSSLHLLGAPVFDEAIPDFVDSQMHRFSEHSDRLLKINAHMAFFIIRFCLFVPKLTYAMRCSPFFRHAHLCQMIDSTLHVEIQKIFNIRFDDRQFLQATLPIRFGGLGIRRISDVALPAFLSSVHGTLSLVGKILTPSIPDFEVVCLSDAVDAWRLACPNVDLPSEAHIQRMWDEPLCRQVHVSLLESAASSVEKARLLACSKTESGYWLHAYPSSNCATLLDNNSLRLAVGLRIGAELVVPHRCPCGVEVDSRGCHGLSCRKSAGRFSRHASLNDVIRRALVSVGVPSVLEPPGLVRDDGKRPDGMTLIPWRMGRPLIWDATCVDTLAPSHLASTSSRPGGAAAAAEALKRRKYAGLSSNHIFAAFAVETLGPWCQDAHRLFNEIKKMLLDTTRDPRAGSFLGQRIGIAIQRGNVASIMGTLPQGTDLGDFFC

SEQ ID NO: 3122 - protein, 988 aa, Cydia splendana
MASSPAQPDSRTSSPSPLNLVQCPHCPQPKFFKGQRGLQIHISKAHKSTNSQSVLQLPAANTSPHIPSPLLSPTPAASLRVPVTHRSPSLPPPRHDSVSLSNSLSSHRRGLPVVKRIPRGARCTVATSLSKAIDDCVNENSPSSWEGLLLFAFNRLHVTKKDPRRSLTSKIKQNCARLGNVDTPQVVNVQNGNNSRDLLKVIEAKINDGDLKGAAQIVFSSDTSAPDTPETLASLEAKHPPAFPTSNFPDPPDSALPFLQASEDAVMAAIMSFKNGSAGGLDGLRPQHLKDLILGAPGGRNDDLLASITRLVNLMLAGKVCAEVVPTLYGASLCALRKKDGGIRPIAIGSIFRRLASKVACKSIAEGLEPMFQPTQLGFGSKGGCEAAVHACRTFLHRCEDQVLLKLDIRNAFNSVDRGAMLTEVQRNIPGLYPYLWQCYRYPSNLMYGPHNILSAVGCQQGDPMGPAIFSLAIHPIITALNSKFNCWYLDDGTLGGEASSVLDDLRSLTVKLGEVGLELNTSKCELYISSDNPNRSQILGEFEVECPGIKSVSKSSLHLLGAPVFGEAIPDFIDSQLHRFSEHSDRLLKINAHMAFFIIRFCLFVPKLTYAMRCSPFFRHSHLCQVIDSTIHVEIQKIFNIRLDDRQFLQATLPIRFGGLGIRRISSVALPAFLSSVHGTLSLVGKILTPSIPDFEVAYLSDAVNAWRLACPTVDLPSKGHIQRTWDEPLCRQVQASLLDSAASSEEKARLLASSRTESGYWLHAYPSSNCATLLDNNSLRLAVGLRIGADLVVPHRCPCGVEVDSRGYHGLSCRKSAGRFSRHASLNDVIRRALVSVGVPSVLEPPGLVRDDGKRPDGMTLIPWRMGRPLIWDATCVDTLAPSHLAATSLRPGGAAAAAEALKRRKYAGLSGNHLFSAFAVETLGPWCQDALSLYKDLKKMLLDSTRDPRAGSFLGQRIGVAIQRGNVASIMGTLPQGSDLGDYLC

SEQ ID NO: 3123 - protein, 1038 aa, Harmonia axyridis
MASRVGGYQPPTRRTVGANNLRRPRNPRGGPAGPPQPTGAAVAADSGLAGAGPSSFICLFPGCNRSFTTSTGRGVHHRRAHPDWSDARELGQNVDVRRRWTEEESAILARREAELVIAGERFINQALHRAFEGRSFDSIKSHRKSPAYKLLVSRFLEQLRQVDPPPIDQDPDGRVVEHVGDFRSRIIDFLGVLDPPAAGTPVEEQLVDICSQARHCSAIDLRSMLADFLDRRFPLPAQRVPAARQPSQGHTLSKRRERRRQYRRVQRNWSLNPVRAVHAVLGNIVDAPPLPENVMIPYWRQVFTRGNNNSPQLPPSTSPLSGLGDPITEEEVRANYVERNSSPGPDGVAAAELMRMDPNILVRLFNLVLLCDRPPDRLLESRTVFIPKKDDPREPSEFRPITVSSVITRCLHKILAQRLDRNIELDNRQRAFRRMDGCASNTYLLDLVLRSHRKKLRSVYVAVIDVSKAFDSVSHACIENVLNAKGIPSSLVTYIMATYRHGFTKLSSRTWQSDPITPTCGVKQGDPLSPIIFNMVMDNLLKILPNEIGAEVGSAKIAASLFADDIVLMASSARGLQSLIDTASAYLVSCGLSINIAKSQTISWKTVPHLKKIVVDEKQKFVCAGVAIPSLSRSSTWKYLGVTFNPEGRCKPETLSSLAETLTTLTKAPLKPQQRLFALRVVIVPGLLHQLALGWFTLSYLNRLDKQIRSFARKWLSLPADCPNAYFHAGVRDGGLGIPSLRWVIPQLRMRRLQKLPLDVQAAGATLQNEIADCTRRLNDRGALLDTPAKIARRWAEELYKSIDGGALKESSKVPQQHRWVQEGTKFLGGGDFVNSVKLRINALPTRSRGARGRDFDRRCRAGCEVPETLNHILQQCHRTHNPRVDRHNSAAKYLANKMRSKGYRVWEEPVLRTNEGLRKPDIVAELGGTALVVDAQIINDQYSADTAHQNKIAYYRPHEEHIKQLTGASSVHFGSCTINWRGVWSKKSADDLRSLGILMAGDMKVMSSRVLIGGWICYKIFNRSTLVRRGPPRSGVG

SEQ ID NO: 3124 - protein, 1038 aa, Harmonia axyridis
MASRVGGYQPPTRRTVGANNLRRPRNPRGGPAGPPQPTGAAVAADSGLAGAGPSSFICLFPGCNRSFTTSTGRGVHHRRAHPDWSDARELGQNVDVRRRWTEEESAILARREAELVIAGERFINQALHRAFEGRSFDSIKSHRKSPAYKLLVSRFLEQLRQVDPPPIDQDPDGRVVEHVGDFRSRIIDFLGVLDPPAAGTPVEEQLVDICSQARHCSAIDLRSMLADFLDRRFPLPAQRVPAARQPSQGHTLSKRRERRRQYRRVQRNWSLNPVRAVHAVLGNIVDAPPLPENVMIPYWRQVFTRGNNNSPQLPPSTSPLSGLGDPITEEEVRANYVERNSSPGPDGVAAAELMRMDPNILVRLFNLVLLCDRPPDRLLESRTVFIPKKDDPREPSEFRPITVSSVITRCLHKILAQRLDRNIELDNRQRAFRRMDGCASNTYLLDLVLRSHRKKLRSVYVAVIDVSKAFDSVSHACIENVLNAKGIPSSLVTYIMATYRHGFTKLSSRTWQSDPITPTCGVKQGDPLSPIIFNMVMDNLLKILPNEIGAEVGSAKIAASLFADDIVLMASSARGLQSLIDTASAYLVSCGLSINIAKSQTISWKTVPHLKKIVVDEKQKFVCAGVAIPSLSRSSTWKYLGVTFNPEGRCKPETLSSLAETLTTLTKAPLKPQQRLFALRVVIVPGLLHQLALGWFTLSYLNRLDKQIRSFARKWLSLPADCPNAYFHAGVRDGGLGIPSLRWVIPQLRMRRLQKLPLDVRAAGATLQNEIADCTRRLNDRGALLDTPAKIARRWAEELYKSIDGGALKESSKVPQQHRWVQEGTKFLGGGDFVNSVKLRINALPTRSRGARGRDFDRRCRAGCEVPETLNHILQQCHRTHNPRVDRHNSAAKYLANKMRSKGYRVWEEPVLRTNEGLRKPDIVAELGGTALVVDAQIINDQYSADTAHQNKIAYYRPHEEHIKQLTGASSVHFGSCTINWRGVWSKKSADDLRSLGILMAGDMKVMSSRVLIGGWICYKIFNRSTLVRRGPPRSGVG

SEQ ID NO: 3125 - protein, 815 aa, Harmonia axyridis
MLADFLDRRFPLPAQRVPAARQPSQGHTLSKRRERRRQYRRVQRNWSLNPVRAVHAVLGNIVDAPPLPENVMIPYWRQVFTRGNNNSPQLPPSTSPLSGLGDPITEEEVRANYVERNSSPGPDGVAAAELMRMDPNILVRLFNLVLLCDRPPDRLLESRTVFIPKKDDPREPSEFRPITVSSVITRCLHKILAQRLDHNIELDNRQRAFRRMDGCASNTYLLDLVLRSHRKKLRSVYVAVIDVSKAFDSVSHACIENVLNAKGIPSSLVTYIMATYRHGFTKLSSRTWHSDPITPTCGVKQGDPLSPIIFNMVMDNLLKILPNEIGAEVGSAKIAASLFADDIVLMASSARGLQSLIDTASAYLVSCGLSINIAKSQTISWKTVPHLKKIVVDEKQKFVCAGVAIPSLSRSSTWKYLGVTFNPEGRCKPETLSSLAETLTTLTKAPLKPQQRLFALRVVIVPGLLHQLALGWFTLSYLNRLDKQIRSFARKWLSLPADCPNAYFHAGVRDGGLGIPSLRWVIPQLRMRRLQKLPLDVQAAGATLQNEIADCTRRLNDRGALLDTPAKIARRWAEELYKSIDGGALKESSKVPQQHRWVQEGTKFLGGGDFVNSVKLRINALPTRSRGARGRDFDRRCRAGCEVPETLNHILQQCHRTHNSRVDRHNSAAKYLANKMRSKGYRVWEEPALRTNEGLRKPDIVAELGGTALVVDAQIINDQYSADTAHQNKIAYYRPHEEHIKQLTGASSVHFGSCTINWRGVWSKKSADDLRSLGILMAGDMKVLSSRVLIGGWICYKIFNRSTLVRRGPPRSGVG

SEQ ID NO: 3126 - protein, 815 aa, Harmonia axyridis
MLADFLDRRFPLPAQRVPAARQPSQGHTLSKRRERRRQYRRVQRNWSLNPVRAVHAVLGNIVDAPPLPENVMIPYWRQVFTRGNNNSPQLPPSTSPLSGLGDPITEEEVRANYVERNSSPGPDGVAAAELMRMDPNILVRLFNLVLLCDRPPDRLLESRTVFIPKKDDPREPSEFRPITVSSVITRCLHKILAQRLDRNIELDNRQRAFRRMDGCASNTYLLDLVLRSHRKKLRSVYVAVIDVSKAFDSVSHACIENVLNAKGIPSSLVTYIMATYRHGFTKLSSRTWHSDPITPTCGVKQGDPLSPIIFNMVMDNLLKILPNEIGAEVGSAKIAASLFADDIVLMASSARGLQSLIDTASAYLVSCGLSINIAKSQTISWKTVPHLKKIVVDEKQKFVCAGVAIPSLSRSSTWKYLGVTFNPEGRCKPETLSSLAETLTTLTKAPLKPQQRLFALRVVIVPGLLHQLALGWFTLSYLNRLDKQIRSFARKWLSLPADCPNAYFHASVRDGGLGIPSLRWVIPQLRMRRLQKLPLDVQAAGATLQNEIADCTRRLNDRGALLDTPAKIARRWAEELYKSIDGGALKESSKVPQQHRWVQEGTKFLGGGDFVNSVKLRINALPTRSRGARGRDFDRRCRAGCEVPETLNHILQQCHRTHNSRVDRHNSAAKYLANKMRSKGYRVWEEPVLRTNEGLRKPDIVAELGGTALVVDAQIINDQYSADTAHQNKIAYYRPHEEHIKQLTGASSVHFGSCTINWRGVWSKKSADDLRSLGILMAGDMKVMSSRVLIGGWICYKIFNRSTLVRRGPPRSGVG

SEQ ID NO: 3127 - protein, 815 aa, Harmonia axyridis
MLADFLDRRFPLPAQRVPAARQPSQGHTLSKRRERRRQYRRVQRNWSLNPVRAVHAVLGNIVDAPPLPENVMIPYWRQVFTRGNNNSPQLPPSTSPLSGLGDPITEEEVRANYVERNSSPGPDGVAAAELMRMDPNILVRLFNLVLLCDRPPDRLLESRTVFIPKKDDPREPSEFRPITVSSVITRCLHKILAQRLDRNIELDNRQRAFRRMDGCASNTYLLDLVLRSHRKKLRSVYVAVIDVSKAFDGVSHACIENVLNAKGIPSSLVTYIMATYRHGFTKLSSRTWHSDPITPTCGVKQGDPLSPIIFNIVMDNLLKILPNEIGAEVGSAKIAASLFADDIVLMASSARGLQSLIDTASAYLVSCGLSINIAKSQTISWKTVPHLKKIVVDEKQKFVCAGVAIPSLSRSSTWKYLGVTFNPEGRCKPETLSSLAETLTTLTKAPLKPQQRLFALRVVIVPGLLHQLALGWFTLSYLNRLDKQIRSFARKWLSLPADCPNAYFHAGVRDGGLGIPSLRWVIPQLRMRRLQKLPLDVQAAGATLQNEIADCTRRLNDRGALLDTPAKIARRWAEELYKSIDGGALKESSKVPQQHRWVQEGTKFLGGGDFVNSVKLRINALPTRSRGARGRDFDRRCRAGCEVPETLNHILQQCHRTHNPRVDRHNSAAKYLANKMRSKGYRVWEEPVLRTNEGLRKPDIVAELGGTALVVDAQIINDQYSADTAHQNKIAYYRPHEEHIKQLTGASSVHFGSCTITWRGVWSKKSADDLRSLGILMAGDMKVMSSRVLIGGWICYKIFNRSTLVRRGPPRSGVG

SEQ ID NO: 3128 - protein, 815 aa, Harmonia axyridis
MLADFLDRRFPLPAQRVPAARQPSQGHTLSKRRERRRQYRRVQRNWSLNPVRAVHAVLGNIVDAPPLPENVMIPYWRQVFTRGNNNSPQLPPSTSPLSGLGDPITEEEVRANYVERNSSPGPDGVAAAELMRMDPNILVRLFNLVLLCDRPPDRLLESRTVFIPKKDDPREPSEFRPITVSSVITRCLHKILAQRLDRNIELDNRQRAFRRMDGCASNTYLLDLVLRSHRKKLRSVYVAVIDVSKAFDSVSHACIENVLNAKGIPSSLVTYIMATYRHGFTKLSSRTWHSDPITPTCGVKQGDPLSPIIFNMVMDNLLKILPNEIGAEVGSAKIAASLFADDIVLMASSARGLQSLIDTASAYLVSCGLSINIAKSQTISWKTVPHLKKIVVDEKQKFVCAGVAIPSLSRSSTWKYLGVTFNPEGRCKPETLSSLAETLTTLTKAPLKPQQRLFALRVVIVPGLLHQLALGWFTLSYLNRLDKQIRSFARKWLSLPADCPNAYFHAGVRDGGLGIPSLRWVIPQLRMRRLQKLPLDVQAAGATLQNEIADCTRRLNDRGALLDTPAKIARRWAEELYKSIDGGALKESSKVPQQHRWVQEGTKFLGGGDFVNSVKLRINALPTRSRGARGRDFDRRCRAGCEVPETLNHILQQCHRTHNSRVDRHNSAAKYLANKMRSKGYRVWEEPVLRTNEGLRKPDIVAELGGTALVVDAQIINDQYSADTAHQNKIAYYRPHEEHIKQLTGASSVHFGSCTINWRGVWSKKSADDLRSLGILMAGDMKVMSSRVLIGGWICYKIFNRSTLVRRGPPRSGVG

SEQ ID NO: 3129 - protein, 815 aa, Harmonia axyridis
MLADFLDRRFPLPAQRVPAARQPSQGHTLSKRRERRRQYRRVQRNWSLNPVRAVHAVLGNIVDAPPLPENVMIPYWRQVFTRGNNNSPQLPPSTSPLSGLGDPMTEEEVRANYVERNSSPGPDGVAAAELMRMDPNILVRLFNLVLLCDRPPDRLLESRTVFIPKKDDPREPSEFRPITVSSVITRCLHKILAQRLDRNIELDNRQRAFRRMDGCASNTYLLDLVLRSHRKKLRSVYVAVIDVSKAFDSVSHACIENVLNAKGIPSSLVTYIMATYRHGFTKLSSRTWHSDPITPTCGVKQGDPLSPIIFNMVMDNLLKILPNEIGAEVGSAKIAASLFADDIVLMASSARGLQSLIDTASAYLVSCGLSINIAKSQTISWKTVPHLKKIVVDEKQKFVCAGVAIPSLSRSSTWKYLGVTFNPEGRCKPETLSSLAETLTTLTKAPLKPQQRLFALRVVIVPGLLHQLALGWFTLSYLNRLDKQIRSFARKWLSLPADCPNAYFHAGVRDGGLGIPSLRWVIPQLRMRRLQKLPLDVQAAGATLQNEIADCTRRLNDRGALLDTPAKIARRWAEELYKSIDGGALKESSKVPQQHRWVQEGTKFLGGGDFVNSVKMRINALPTRSRGARGRDFDRRCRAGCEVPETLNHILQQCHRTHNSRVDRHNSAAKYLANKMRSKGYRVWEEPVLRTNEGLRKPDIVAELGGTALVVDAQIINDQYSADTAHQNKIAYYRPHEEHIKQLTGASSVHFGSCTINWRGVWSKKSADDLRSLGILMAGDMKVLSSRVLIGGWICYKIFNRSTLVRRGPPRSGVG

SEQ ID NO: 3130 - protein, 1037 aa, Harmonia axyridis
MPFPCVCGKSYATQRNLADHQRRFCRGPPTGLEGQCPECQSVYVSYQAMRSHMRQAHPDQYNADLAAEVGSRDRVRGWTTGELEEMARLELDYNGTAVLDYLAQNLNRPREGVKKKRYTSEYTETLRNLRDRRAEVDILNLAPADEDLEHSDEDGDGLDGASTAVAENIAPDTIPENVEEPDLTDPVLQHILSLCYSSEDRELISVCQVVCTRAEGFQQAFDSWVENTCRSYGRTPKYGPKNQPRKPERTAGRRRYRAQLYQYMQRKFSSNPKQLANELIDGMEPSSSITHPDAATIEEHYKKIFSEESPTDENPVYDFLPSECRVYSPITNAELLESVQKMGKTTGGPDGIDSIRLARIPIEKLEVMANLMILAKYVPSPLRKSRTILIPKTKENLEQVGNWRPITISSILLRLVNKIIAKRLSKNITLDECQRGFVSLDGCFANNITLQSVIKGRRLRGKPFAILALDIQRAFDGVSHHTIRRALRRFRVDENTTEYIMATYKDQFTTIFCGDTEITTLQILRGVKQGDPLAPILFNMVMDELISSLKVRTGVRFGETSIPVLGYADDLLLLAENTQDAQFLLNIARKFLEARHLTLNPAKCRAISMAVVPSKKKLFLHTTPKFYIGSTPIPPTRSIGDAFKYLGFHFSCQGATPCSVGNLFEQLSRIQTAPLKPQQKVHIIKTFLIPRYIHAMQSPSINIKILKKVDLLVRQTYKRILKLPSHIIDEALYTPTRLGGLGLFSFARRIPVIMRDRLRSSKISSPLFASFMAENGYWDGRVNRMIRPQLNNKDAIDRANATRLEGSFYGGGISQAVGDNVSNHYINSPPSCWSGEDYVRAIKLRTNTLPTRGLPYGPREAKLCRGGCGRIESLCHVLQRCYLGKGKRLARHNFVVKRICTMARAKGWEITEEPNIRDLSGRLHKPDMVCVKENEVVVADVGVSWEGPRVLGETYDAKRAVYNQPDFVDAIRRAHPEKRIEILPFIIGARGIWCRESSSLLEKLSINTQSNRRELVITTIRGSCSIHIDVMRKAWDG

SEQ ID NO: 3131 - protein, 1037 aa, Harmonia axyridis
MPFPCVCGKSYATQRNLADHQRRFCRGPPTGLEGQCPECQSVYVSYQAMRSHMRQAHPDQYNADLAAEVGSRDRVRRWTTGELEEMARLELDYNGTAVLDYLAQNLNRPREGVKKKRYTSEYTEILRNLRDRRAEVDILNLAPADEDLEHSDEDGDGLDGASTAVAENIAPDTIPENVEEPDLTDPVLQHILSLCYSSEDRELISVCQVVCTRAEGFQQAFDSWVENTCRSYGRTPKYGPKNQPRKPERTAGRRRYRAQLYQYMQRKFSSNPKQLANELIDGMEPSSSITHPDAATIEEHYKKIFSEESPTDENPVYDFLPSECKVYSPITNAELLESVQKMGKTTGGPDGIDSIRLARIPIEKLEVMANLMILAKYVPSPLRKSRTILIPKTKENLEQVGNWRPITISSILLRLVNKIIAKRLSKNITLDECQRGFVSLDGCFANNITLQSVIKGRRLRGKPFAILALDIQRAFDGVSHHTIRRALRRFRVDENTTEYIMATYKDQFTTIFCGDTEITTLQILRGVKQGDPLAPILFNMVMDELISSLKVRTGVRFGETSIPVLGYADDLLLLAENTQDAQFLLNIARKFLEARHLTLNPAKCRAISMAVVPSKKKLFLHTTPKFYIGSTPIPPTRSIGDAFKYLGFHFSCQGATPCSVGNLFEQLSRIQTAPLKPQQKVHIIKTFLIPRYIHAMQSPSINIKILKKVDLLVRQTYKRILKLPSHIIDEALYTPTRLGGLGLFSFARRIPVIMRDRLRSSKISSPLFASFMAENGYWDGRVNRMIRPQLNNKDAIDRANATRLEGSFYGGGISQAVGDNVSNHYINSPPSCWSGEDYVRAIKLRTNTLPTRGLPYGPREAKLCRGGCGRIESLCHVLQRCYLGKGKRLARHNFVVKRICTMARAKGWEITEEPNIRDLSGRLHKPDMVCVKENEVVVADVGVSWEGPRVLGETYDAKRAVYNQPDFVDALRRAHPEKRIEILPFIIGARGIWCRESSSLLEKLSINTQSNRRELVITTIRGSCSIHIDVMRKAWDG

SEQ ID NO: 3132 - protein, 1038 aa, Harmonia axyridis
MPFPCVCGKSYATQRNLADHQRRFCRGPPTGLEGQCPECQSVYVSYQAMRSHMRQAHPDQYNADLAAEVGSRDRVRRWTTGELEEMARLELDYNGTAVLDYLAQNLNRPREGVKKKRYTSEYTETLRNLRDRRAEVDILNLAPADEDLEHSDEDGNGLDGASTAVADENIAPDTIPENVEEPDLTDPVLQHILSLCYSSEDRELISVCQVVCTRAEGFQQAFDSWVENTCRSYGRTPKYGPKNQPRKPERTAGRRRYRAQLYQYMQRKFSSNPKQLANELIDGMEPSSSITHPDAATIEEHYKKIFSEESPTDENPVYDFLPSECKVYSPITNAELLESVQKMGKTTGGPDGIDSIRLARIPIEKLEVMANLMILAKYVPSPLRKSRTILIPKTKENLEQVGNWRPITISSILLRLVNKIIAKRLSKNITLDECQRGFVSLDGCFANNITLQSVIKGRRLRGKPFAILALDIQRAFDGVSHHTIRRALRRFRVDENTTEYIMATYKDQFTTIFCGDTEITTLQILRGVKQGDPLAPILFNMVMDELISSLKVRTGVRFGETSIPVLGYADDLLLLAENTQDAQFLLNIARKFLEARHLTLNPAKCRAISMAVVPSKKKLFLHTTPKFYIGSTPIPPTRSIGDAFKYLGFHFSCQGATPCSVGNLFEQLSRIQTAPLKPQQKAHIIKTFLIPRYIHAMQSPSITIKTLKKVDLLVRQTYKRILKLPSHIIDEALYTPTRLGGLGLFSFARRIPIIMRDRLRSSKISSPLFASFMAENGYWDGRVNRMIRPQLNNRDAIDRANATRLEGSFYGGGISQAVGDNVSNHYINSPPSCWSGEDYVRAIKLRTNTLPTRGLPYGPREAKLCRGGCGRIESLCHVLQRCYLGKGKRLARHNFVVKRICTMARAKGWEITEEPNIRDLSGRLHKPDMVCVKENEVVVADVGVSWEGPRVLGETYDAKRAVYNQPDFVDALRRAHPEKRIEILPFIIGARGIWCRESSSLLEKLSINTQSNRRELVITTIRGSCSIHIDVMRKAWDG

SEQ ID NO: 3133 - protein, 1037 aa, Harmonia axyridis
MPFPCVCGKSYATQRNLADHQRRFCRGPPTGLEGQCPECQSVYVSYQAMRSHMRQAHPDQYNADLAAEVGSRDRVRRWTTGELEEMARLELDYNGTAVLDYLAQNLNRPREGVKKKRYTSEYTETLRNLRDRRAEVDILNLAPADEDLEHSDEDGDGLDGASTAVAENIAPDTIPENVEEPDLTDPVLQHILSLCYSSEDRELISVCQVVCTRAEGFQQAFDSWVENTCRSYGRTPKYGPKNQPRKPERTAGRRRYRAQLYQYMQRKFSSNPKQLANELIDGMEPSSSITHPDAATIEEHYKKIFSEESPTDENPVYDFLPSECKVYSPITNAELLESVQKMGKTTGGPDGIDSIRLARIPIEKLEVMANLMILAKYVPSPLRKSRTILIPKTKENLEQVGNWRPITISSILLRLVNKIIAKRLSKNITLDECQRGFVSLDGCFANNITLQSVIKGRRLRGKPFAILALDIQRAFDGVSHHTIRRALRRFRVDENTTEYIMATYKDQFTTIFCGDTEITTLQILRGVKQGDPLAPILFNMVMDELISSLKVRTGVRFGETSIPVLGYADDLLLLAENTQDAQFLLNIARKFLEARHLTLNPAKCRAISMAVVPSKKKLFLHTTPKFYIGSTPIPPTRSIGDAFKYLGFHFSCQGATPCSVGNLFEQLSRIQTAPLKPQQKVHIIKTFLIPRYIHAMQSPSINIKTLKKVDLLVRQTYKRILKLPSHIIDEALYTPTRLGGLGLFSFARRIPIIMRDRLRSSKISSPLFASFMAENGYWDGRVNRMIRPQLNNKDAIDRANATRLEGSFYGGGISQAVGDNVSNHYINSPPSCWSGEDYVRAIKLRTNTLPTRGLPYGPREAKLCRGGCGRIESLCHVLQRCYLGKGKRLARHNFVVKRICTMARAKGWEITEEPNIRDLSGRLHKPDMVCVKENEVVVADVGVSWEGPRVLGETYDAKRAVYNQPDFVDALRRAHPEKRIEILPFIIGARGIWCRESSSLLEKLSINTQSNRRELVITTIRGSCSIHIDVMRKAWDG

SEQ ID NO: 3134 - protein, 1037 aa, Harmonia axyridis
MPFPCVCGKSYATQRNLADHQRRFCRGPPTGLEGQCPECQSVYVSYQAMRSHMRQAHPDQYNADLAAEVGSRDRVRRWTTGELEEMARLELDYNGTAVLDYLAQNLNRPREGVKKKRYTSEYTETLRNLRDRRAEVDILNLAPADEDLEHSDEDGDGLDGASTAVAENIAPDTIPENVEEPDLTDPVLQHILSLCYSSEDRELISVCQVVCTRAEGFQQAFDSWVENTCRSYGRTPKYGPKNQPRKPERTAGRRRYRAQLYQYMQRKFSSNPKQLANELIDGMEPSSSITHPDAATIEEHYKKIFSEESPTDENPVYDFLPSECKVYSPITNAELLESVQKMGKTTGGPDGIDSIRLARIPIEKLEVMANLMILAKYVPSPLRKSRTILIPKTKENLEQVGNWRPITISSILLRLVNKIIAKRLSKNITLDECQRGFVSLDGCFANNITLQSVIKGRRLRGKPFAILALDIQRAFDGVSHHTIRRALRRFRVDENTTEYIMATYKDQFTTIFCGDTEITTLQILRGVKQGDPLAPILFNMVMDELISSLKVRTGVRFGETSIPVLGYADDLLLLAENTQDAQFLLNIARKFLEARHLTLNPAKCRAISMAVVPSKKKLFLHTTPKFYIGSTPIPPTRSIGDAFKYLGFHFSCQGATPCSVGNLFEQLSRIQTAPLKPQQKVHIIKTFLIPRYIHAMQSPSINIKILKKVDLLVRQTYKRILKLPSHIIDEALYTPTRLGGLGLFSFARRIPVIMRDRLRSSKISSPLFASFMAENGYWDGRVNRMIRPQLNNKDAIDRANATRLEGSFYGGGISQAVGDNVSNHYINSPPSCWSGEDYVRAIKLRTNTLPTRGLPYGPREAKLCRGGCGRIESLCHVLQRCYLGKGKRLARHNFVVKRICTMARAKGWEITEEPNIRDLSGRLHKPDMVCVKENEVVVADVGVSWEGPRVLGETYDAKRAVYNQPDFVDALRRAHPEKRIEILPFIIGARGIWCRESSSLLEKLSINTQSNRRELVITTIRGSCSIHIDVMRKAWDG

SEQ ID NO: 3135 - protein, 1037 aa, Harmonia axyridis
MPFPCVCGKSYATQRNLADHQRRFCRGPPTGLEGQCPECQSVYVSYQAMRSHMRQAHPDQYNADLAAEVGSRDRVRRWTTGELEEMARLELDYNGTAVLDYLAQNLNRPREGVKKKRYTSEYTETLRNLRDRRAEVDILNLAPADEDLEHSDEDGDGLDGASTAVAENIAPDTIPENVEEPDLTDPVLQHILSLCYSSEDRELISVCQVVCTRAEGFQQAFDSWVENTCKSYGRTPKYGPKNQPRKPERTAGRRRYRAQLYQYMQRKFSSNPKQLANELIDGMEPSSSITHPDAATIEEHYKKIFSEESPTDENPVYDFLPSECKVYSPITNAELLESVQKMGKTTGGPDGIDSIRLARIPIEKLEVMANLMILAKYVPSPLRKSRTILIPKTKENLEQVGNWRPITISSILLRLVNKIIAKRLSKNITLDECQRGFVSLDGCFANNITLQSVIKGRRLRGKPFAILALDIQRAFDGVSHHTIRRALRRFRVDENTTEYIMATYKDQFTTIFCGDTEITTLQILRGVKQGDPLAPILFNMVMDELISSLKVRTGVRFGETSIPVLGYADDLLLLAENTQDAQFLLNIARKFLEARHLTLNPAKCRAISMAVVPSKKKLFLHTTPKFYIGSTPIPPTRSIGDAFKYLGFHFSCQGATPCSVGNLFEQLSRIQTAPLKPQQKVHIIKTFLIPRYIHAMQSPSINIKILKKVDLLVRQTYKRILKLPSHIIDEALYTPTRLGGLGLFSFARRIPVIMRDRLRSSKISSPLFASFMAENGYWDGRVNRMIRPQLNNKDAIDRANATRLEGSFYGGGISQAVGDNVSNHYINSPPSCWSGEDYVRAIKLRTNTLPTRGLPYGPREAKLCRGGCGRIESLCHVLQRCYLGKGKRLARHNFVVKRICTMARAKGWEITEEPNIRDLSGRLHKPDMVCVKENEVVVADVGVSWEGPRVLGETYDAKRAVYNQPDFVDALRRAHPEKRIEILPFIIGARGIWCRESSSLLEKLSINTQSNRRELVITTIRGSCSIHIDVMRKAWDG

SEQ ID NO: 3136 - protein, 1037 aa, Harmonia axyridis
MPFPCVCGKSYATQRNLADHQRRFCRGPPTGLEGQCPECQSVYVSYQAMRSHMRQAHPDQYNADLAAEVGSRDRVRRWTTGELEEMARLELDYNGTAVLDYLAQNLNRPREGVKKKRYTSEYTETLRNLRDRRAGVDILNLAPADEDFEHSDEDGNGLDGASTAVAENIAPDTIPENVEEPDLTDPVLQHILSLCYSSEDRELISVCQVVCTRAEGFQQAFDSWVENTCRSYGRTPKYGPKNQPRKPERTAGRRRYRAQLYQYMQRKFSSNPKQLANELIDGMEPSSSITHPDAATIEEHYKKIFSEESPTDENPVYDFLPSECKVYSPITNAELLESVQKMGKTTGGPDGIDSIRLARIPIEKLEVMANLMILAKYVPSPLRKSRTILIPKTKENLEQVGNWRPITISSILLRLVNKIIAKRLSKNITLDECQRGFVSLDGCFANNITLQSVIKGRRLRGKPFAILALDIQRAFDGVSHHTIRRALRRFRVDENTTEYIMATYKDQFTTIFCGDTEITTLQILRGVKQGDPLAPILFNMVMDELISSLKVRTGVRFGETSIPVLGYADDLLLLAENTQDAQFLLNIARKFLEARHLTLNPAKCRAISMAVVPSKKKLFLHTTPKFYIGSTPIPPTRSIGDAFKYLGFHFSCQGATPCSVGNLFEQLSRIQTAPLKPQQKVHIIKTFLIPRYIHAMQSPSINIKILKKVDLLVRQTYKRILKLPSHIIDEALYTPTRLGGLGLFSFARRIPVIMRDRLRSSKISSPLFASFMAENGYWDGRVNRMIRPQLNNKDAIDRANATRLEGSFYGGGISQAVGDNVSNHYINSPPSCWSGEDYVRAIKLRTNTLPTRGLPYGPREAKLCRGGCGRIESLCHVLQRCYLGKGKRLARHNFVVKRICTMARAKGWEITEEPNIRDLSGRLHKPDMVCVKENEVVVADVGVSWEGPRVLGETYDAKRAVYNQPDFVDALRRAHPEKRIEILPFIIGARGIWCRESSSLLEKLSINTQSNRRELVITTIRGSCSIHIDVMRKAWDG

SEQ ID NO: 3137 - protein, 989 aa, Harmonia axyridis
MRSHMRQAHPDQYNADLAAEVGSRDRVRRWTTGELEEMARLELDYNGTAVLDYLAQNLNRPREGVKKKRYTSEYTETLRNLRDRRAEVDILNLAPADEDLEHSDEDGDGLDGASTAVAENIAPDTIPENVEEPDLTDPVLQHILSLCYSSEDRELISVCQVVCTRAEGFQQAFDSWVENTCRSYGRTPKYGPKNQPRKPERTAGRRRYRAQLYQYMQRKFSSNPKQLANELIDGMEPSSSITHPDAATIEEHYKKIFSEESPTDENPVYDFLPSECKVYSPITNAELLESVQKMGKTTGGPDGIDSIRLARIPIEKLEVMANLMILAKYVPSPLRKSRTILIPKTKENLEQVGNWRPITISSILLRLVNKIIAKRLSKNITLDECQRGFVSLDGCFANNITLQSVIKGRRLRGKPFAILALDIQRAFDGVSHHTIRRALRRFRVDENTTEYIMATYKDQFTTIFCGDTEITTLQILRGVKQGDPLAPILFNMVMDELISSLKVRTGVRFGETSIPVLGYADDLLLLAENTQDAQFLLNIARKFLEARHLTLNPAKCRAISMAVVPSKKKLFLHTTPKFYIGSTPIPPTRSIGDAFKYLGFHFSCQGATPCSVGNLFEQLSRIQTAPLKPQQKVHIIKTFLIPRYIHAMQSPSINIKTLKKVDLLVRQTYKRILKLPSHIIDEALYTPTRLGGLGLFSFARRIPIIMRDRLRSSKISSPLFASFMAENGYWDGRVNRMIRPQLNNKDAIDRANATRLEGSFYGGGISQAVGDNVSNHYINSPPSCWSGEDYVRAIKLRTNTLPTRGLPYGPREAKLCRGGCGRIESLCHVLQRCYLGKGKRLARHNFVVKRICTMARAKGWEITEEPNIRDLSGRLHKPDMVCVKENEVVVADVGVSWEGPRVLGETYDAKRAVYNQPDFVDALRRAHPEKRIEILPFIIGARGIWCRESSSLLEKLSINTQSNRRELVITTIRGSCSIHIDVMRKAWDG

SEQ ID NO: 3138 - protein, 1037 aa, Harmonia axyridis
MPFPCVCGKSYATQRNLADHQRRFCRGPPTGLEGQCPECQSVYVSYQAMRSHMRQAHPDQYNADLAAEVGSRDRVRRWTTGELEEMARLELDYNGTAVLDYLAQNLNRPREGVKKKRYTSEYTETLRNLRDRRAEVDILNLAPADEDLEHSDEDGDGLDGASTAVAENIAPDTIPENVEEPDLTDPVLQHILSLCYSSEDRELISVCQVVCTRAEGFQQAFDSWVENTCRSYGRTPKYGPKNQPRKPERTAGRRRYRAQLYQYMQRKFSSNPKQLANELIDGMEPSSSITHPDAATIEEHYKKIFSEESPTDENPVYDFLPSECKVYSPITNAELLESVQKMGKTTGGPDGIDSIRLARIPIEKLEVMANLMILAKYVPSPLRKSRTILIPKTKENLEQVGNWRPITISSILLRLVNKIIAKRLSKNITLDECQRGFVSLDGCFANNITLQSVIKGRRLRGKPFAILALDIQRAFDGVSHHTIRRALRRFRVDENTTEYIMATYKDQFTTIFCGDTEITTLQILRGVKQGDPLAPILFNMVMDELISSLKVRTGVRFGETSIPVLGYADDLLLLAENTQDAQFLLNIARKFLEARHLTLNPAKCRAISMAVVPSKKKLFLHTTPKFYIGSTPIPPTRSIGDAFKYLGFHFSCQGATPCSVGNLFEQLSRIQTAPLKPQQKVHIIKTFLIPRYIHAMQSPSINIKTLKKVDLLVRQTYKRILKLPSHIIDEALYTPTRLGGLGLFSFARRIPVIMRDRLRSSKISSPLFASFMAENGYWDGRVNRMIRPQLNNKDAIDRANATRLEGSFYGGGISQAVGDNVSNHYINSPPSCWSGEDYVRAIKLRTNTLPTRGLPYGPREAKLCRGGCGRIESLCHVLQRCYLGKGKRLARHNFVVKRICTMARAKGWEITEEPNIRDLSGRLHKPDMVCVKENEVVVADVGVSWEGPRVLGETYDAKRAVYNQPDFVDALRRAHPEKRIEILPFVIGARGIWCRESSSLLEKLSINTQSNRRELVITTIRGSCSIHIDVMRKAWDG

SEQ ID NO: 3139 - protein, 1154 aa, Coremacera marginata
MNNDQRILTQSAVSVLEVQEPPTTTAGTSRQRMKWTTNMNEHIMRCYYKITNNETNNTAYRRLLHQAFLQNYPHLNVTEQRIADQRRAILRRNLIPPPRLTQIQAEVARELAEETTPGPEIDTHEPENELISHNIRFQNETNQQLYAPENRNAFEEKIFAEFETSKLQFQGTDPLSRPMIPRPKTLRQAAIATNFINASILPAYLASNVRNIEDTQTAIYIAAAAVSRSLENRTVDRVQSTGIKVPEPKWKMRLKRQIEELRRQLGRLTQYIAGNRSKKVLKHYEKIRLAINTHSSQDPENNTPTLYLDTLRQKLAVKSNRLRRYKTSEKRRKHNAQFSKSEKSFYRSLRGGHKATIKDPPSADSVETYWKNIWSNEQTHEEDRAWIRKEENKTSTLPCMDPTDLSEEEIALAINNSHNWKAPGPDNLQNYWLKRFKCAHAYIARYFTHILQHPNEAPEFLTKGNTYLLPKDLNNTKSPSKYRPITCLCTLYKIFTYSIASKIYQHLEDNKILAIEQKGCTTGSQGCKEQLTIDAVVMEQAYMKSRNIFTAFIDYKKAFDCVPHSWLVKVLEIYKVAPPIIATLKHLMSTWKITLHLNHAGGRIISPKIRISRGILQGDSLSPLWFCMALNPLSTTLNSTRYGYLIKGEDERQHKLTHLVYMDDIKLYAGTDRQMQSLLQLVDDFSTDIKMSFGINKCRRLSVVKGQILHSDYELTTGEIIEALNRNEPYKYLGINQTRRLQHKDTKQTFSNVYLERTRDLLRSGRNGKNLVKAINTFAVPVLTYTFGVIKWTQTDLEVLKRSTRRLMTKSRAHHPISALERTTLPRHLGGRGLIDISHVCNKQVANLRSYFHSQRNILHQAIANSDDNYTPLNLKYITVNDCETDRVYTNRKLQEWKAKQIHGRHAHMLQQPHIDINMSNAWLTNADIFAETEAFMVAIQDQVIATRNYCKYVLKYQMEEDNCRRCFQQPETIQHITGACTTMAATDYLKRHNRVAIIIHQSLGLKHGLILMEVPYYKYNPEPVLENNACKLYWDRTVLTDHLVGNNRPDIILVHKQAKETFLVDIGIPNSHNLDSYYREKTNKYQHLAEEIKQIWRQDIVKVIPIVISSTGIAPKTFIKNLATIGVERKAIAIQKSIILSTTAIVRSIISSS

SEQ ID NO: 3140 - protein, 755 aa, Coremacera marginata
MEPTDLSEEEIALAINNSHNWKAPGPDNLQNYWLKRFKCAHAYIARYFTHILQHPNEAPEFLTKGNTYLLPKDLNNTKSPSKYRPITCLCTLYKILTSSIASKIYQHLEDNKILAIEQKGCTTGSQGCKEQLTIDAVVMEEAYMKSRNIFTAFIDYKKAFDCVPHSWLVKVLEIYKVAPPIIATLKHLMPTWEITLHLNHAGGRIISPKIRISRGILQGDSLSPLWFCMALNSLSTTLNSTRYGYLIKGEDERQHKLTHLVYMDDIKLYAGTDRQMQSLLQLVDDFSTDIKMSFGIDKCRRLSVVKGQILHSDYELTTGEIIEALNRNEPYKYLGINQTRRLQHKDTKQTFSNVYLERTRDLLRSGLNGKNLVKAINTFAVPVLTYTFGVIKWTQTDLEVLKRSTRRLMTKSRAHHPISALERTTLPRHLGGRGLIGISHVCNKQVANLRSYCHSQRNILHQAIANSDDNYTPLNLKHITVNDCETDCVYTNRKLQEWKAKQIHGRHAHMLQQPHIDINMSNAWLTNADIFAETEAFMVAIQDQVIATRNYCKYVLKYQMEEDNCRRCFQQPETIQHITGACTTMAATDYLKRHNRVAKIIHQSLGLKHGLILMEVPYYKYNPEPVLENNACKLYWDRTVLTDHLVGNNRPDIILVHKQAKETFLVDIGIPNSHNLDSYYREKTNKYQHLAEEIKQIWRQDIVKVIPIVISSTGIAPKTFIKNLATIGVERKAIAIQKSIILSTTAIVRSIISSS

SEQ ID NO: 3141 - protein, 983 aa, Coremacera marginata
MDLLSRPLISKPKALKQAAIATNYVNSVILPTYLAGYVSNLEELQAALYIAATTVSRAIESGTVGRRNNTGSKTPEPQWKMRLKRQIEELRKQLGRLTQYIAGNRSKKVLKHYEKICRTNNIHSRQDLENDTPTLHLDTLRQKLAVKSNRLRRYEISEKRRKQNAWFSQNERHFYRSLRESRNATIERPPSAESVEAFWKSIWSNTQTHEDNRTWIRQEENATSTLPRMYPTVFTEEDITSAINKTHNWKAPGPDNLQNYWLKRFKCTHAYISRFFTHILQHPNEAPEFLTKGNTYLLPKDITNTSNPSKYRPITCLCTLYKILTSCMTSKIYQHLEDNTVLATEQKGCSKGSQGCKEQLIIDAVVMEQAYKNTRNIYTAFIDYKKAFDSVPHSWLIRVMEIYKIAPNIIATLKHLMSSWEVTLHLQHSGGRITSPKIKIKRGILQGDSLSPLWFCMALNPLSTTLNSCRYGYLIKSENGPQHKLTHLLYMDDIKLYASTDRQMLSLLKLVEDFSIDIKMSFGIDKCRRLSVVKGQMVERNYELVVGETMEALSQNEPYKYLGISQTRRIQHNDIKKNITSVYLQRTKDLLRSKLNGKNMIKAINTFAIPALTYTLGIIKWTKTELEELQRSTRRLMSKYRIHHPISSLERTTLPRHLGERGLIDISHMCRKQTIDLSRYFCNQSNNLHKSVVNSDDSYTPLNLKNNSENDYETNSAYTIRKLQEWKMKEIHGRHAYMLQQPHVDLEMSNAWLTNADIFAETEAFMIAIQDQVIATKNYCKYVLKYQIEEDKCRKCCQQSETIQHITGACTSLAATEYLKRHNQVARIVHQALGLKYGLVNVELPYYKYNPAAVLENNTSKLYWDRTVLTDHLVGNNRPDIILIKKQAKETFLIDIGIPNSHNLESYYREKENKYQRLAEEIKQIWRQEMVKVLPIVISSTGIAPKNFIRNLTVMGIERKAITIQKSVILSTTAIVRSTINSA

SEQ ID NO: 3142 - protein, 1154 aa, Coremacera marginata
MNNDQRILTQSAVSVLEVQEPPTTTAGTSRQRMKWTTNMNEHIMRCYYKITNNETNNTAYRRLLHQAFLQNYPHLNVTEQRIADQRRAILRRNLIPPPRLTQIQAEVARELAEETTPGPEIDTHEPENELISHNIRFQNETNQQLYAHENRNAFEEKIFAEFETSKLQFQGTDPLSRPMIPRPKTLRQAAIATNFINTSILPAYLASNVRNIEDTQTAIYIAAAAVSRSLENRTVDRVQSTGIKVPEPKWKMRLKRQIEELRRQLGRLTQYIAGNRSKKVLKHYEKIRLAINTHSSQDPENNTPTLYLDTLRQKLAVKSNRLRRYETSEKRRKHNAQFSKSEKSFYRSLRGGHKATIKDPPSAESVETYWKNIWSNEQTHEEDRAWIRKEENKTSTLPCMEPTDLSEEEIALAINNSHNWKAPGPDNLQNYWLKRFKCAHAYIARYFTHILQHPNEAPEFLTKGNTYLLPKDLNNTKSPSKYRPITCLCTLYKILTSSIASKIYQHLEDNKILAIEQKGCTTGSQGCKEQLTIDAVVMEQAYMKSRNIFTAFIDYKKAFDCVPHSWLVKVLEIYKVAPPIIATLKHLMSTWEITLHLNHAGGRIISPKIRISRGILQGDSLSPLWFCMALNPLSTTLNSTRYGYLIKGEDERQHKLTHLVYMDDIKLYAGTDRQMQSLLQLVDDFSTDIKMSFGIDKCRRLSVVKGQILHSDYELTTGEIIEALNRNEPYKYLGINQTRRLQHKDTKQTFSNVYLERTRDLLRSGLNGKNLVKAINTFAVPVLTYTFGVIKWTQTDLEVLKRSTRRLMTKSRAHHPISALERTTLPRHLGGRGLIDISHVCNKQVANLRSYFHSQRNILHQAIANSDDNYTPLNLKHITVNDCETDRVYTNRKLQEWKAKQIHGRHAHMLQQPHIDINMSNAWLTNADIFAETEAFMVAIQDQVIATRNYCKYVLKYQMEEDNCRRCFQQPETIQHITGACTTMAATDYLKRHNRVAKIIHQSLGLKHGLILMEVPYYKYNPEPVLENNACKLYWDRTVLTDHLVGNNRPDIILVHKQAKETFLVDIGIPNSHNLDSYYREKTNKYQHLAEEIKQIWRQDIVKVIPIVISSTGIAPKTFIKNLATIGVERKAIAIQKSIILSTTAIVRSIISSS

SEQ ID NO: 3143 - protein, 931 aa, Laothoe populi
MIGRMTQYMTGNKNKRLNKQINKILNKYKIHTTHESPNTNLTQFLDTLKQKLTVASSRLRRYTACSLRKTQNNQFQNNEKKFYQNLSKTTSNSTMSRNFDHTINSIDPETLRQFWSNIWENTTDYNNEAEWLNAEEDNISKKHPMQFNVIPIEVFHNVLKSTHNWKAPGSDKIHNFWYKKFSQIHALLYRHINNFIKNPDTMPSYITSGVTYMLPKDLNDMANPAKYRPITCLQTIYKIITGCISYLVYHHIDNNNILTEQQKGCRKFSQGCKKQLTIDAVVLKNVQINKRDMYSTYIDYKKAYDSVPHSWLVKILQIYNIHPQIISFLSISMTKWTTRLHLQLTANTIETEPIQINRGIFQGDALSPLWFCLALNPLSNMLNSTNMGYSFSKTASPIDTLAYNTDYKINHLLYMDDIKIYGSSQSELDHLMEITESFSRDISMEFGIDKCKTNCIKAGQNYEHQYHLHDGNIIDPLCDGEAYKYLGYQQSKLIHHKDIKLKITDNFKHRLNSILKTQLNAKSTTKAINSYAIPVLTYSFGIINWTKNDLQNLQRVINTTMTKNRKHHPRACIQRQNLPRKIGGRGIINIKKLHNRQITTLRNYFHNKAERSTLHQTINRYDNKFTPLNLQTQEKQSNEMQTDQQDLLNQWALKSLHGRHYQDLSQPNVDKQASNEWLSRGELLPETEGFIIAIQDQVVETRNYKKYIMKINNSPDICRRCNSGSETIQHITGACKAIAQTDYKYRHDQVANIIHQKLAIKYNLIATPTKHTPYYKYSPETFLENPNHKLYFDRAILTDRTVHYNRPDITLIDKINKTAYIIDIAIPNTHNLQNTIAEKLTKYIELKDEIIRMWRLQKVIIVPIVISTTGIIPNQLSQSLALIDLPHNTYIQLQKAVILNTCRIVRKFLQTELSPLPTLHIVSNPTNNHLA

SEQ ID NO: 3144 - protein, 927 aa, Laothoe populi
MTQYMTGNKNKRLNKHINKILNKYKIHTTHESPNTNLTQFLDTLKQKLTVASSRLRRYTACSLRKTQNNQFQNNEKKFYQNLSKTTSNSTMSRNFDHTINSIDPETLRQFWSNIWENTTDYNNEAEWLNAEEDNISKKHPMEFNVIPIEVFHNVLKSTHNWKAPGSDKIHNFWYKKFSQIHALLYRHINNFIKNPDTMPSYITSGVTYMLPKDLNDMANPAKYRPITCLQTIYKIITGCISYLVYHHIDNNNILTEQQKGCRKFSQGCKEQLTIDAVVLKHVQKNKRDMYSTYIDYKKAYDSVPHSWLVKILQIYNIHPQIISFLSISMTKWTTRLHLQLTANTIETEPIQIKRGIFQGDALSPLWFCLALNPLSNMLNSTNMGYSFSKTASPIDTLAYNTDYKINHLLYMDDIKIYGSSQSELDHLMEITESFSRDISMVFGIDKCKTNCIKAGQNYQHQYHLHDGNIIDPLCDGEAYKYLGYQQSKLIHHKDIKLKITDNFKHRLNSILKTQLNAKNTTKAINSYAIPVLTYSFGIINWTKNDLQNLQRVINTTMTKNRKHHPRACIQRQNLPRKIGGRGIINIKNLHNRQITTLRNYFHNKAERSTLHQTINRYDNKFTPLNLQTQEKQSNEMQTDQQDLLNQWALKSLHGRHYQDLSQPNVDKQASNEWLSRGELFPETEGFIIAIQDQVVETRNYKNYIMKINNSPDICRRCNSGSETIQHITGACKAIAQTDYKYRHDQVANIIHQKLAIKYNLIATPTKHTPYYKYSPETILENPNHKLYFDRAILTDRTVHYNRPDITLIDKINKTAYIIDIAIPNTHNLQNTIAEKLTKYIELKDEIIRMWRLQKVIIVPIVISTTGIIPNQLSQSLALIDLPHNTYIQLQKAVILNTCRIVRKFLQTELSPLPTLHIVSNPTNNHLA

SEQ ID NO: 3145 - protein, 1382 aa, Laothoe populi
METRLRSKRLGPLPGGDRRGALGADAECHSMRTVSGSELNRRAPTGSPEINATAESISSSSPKSLFSSLPSSPPSYLNFHSERSSSPHSSMLSELRTEDVVQRTIVHNTAPAKVQRLRIKWSKEMNIFILRNYYILTKLDTDTKCYLDQLHQRFTEQFPNVEASKQRVGDQRRAIIRNRLLSNDKINEIRTEVKTYLQQQPNNFSQNQPAIRQRMKWTTEHNESIMKLYYKITQLETNKTAYRKILYQKFIHIYPQLSHLSEQRIADQRRVIIANKYIDTNRLKEIKQEVANELRLGSSNVNNLQSNQVLTTEFPISHDTETNFNELTLLTDIENNTSVNVNLTLIQDTLDNVEIDSTFKNALDFFSNVNPEQRPYIPKQKSSKKLNTVINHINNKTLPQYVNSDTDFHKLQTIIYCAAWTVAKTNGSKLIIPPTANKQHFNFKPSWQKRLERKIEDLRAKIGRMTQYMTGNKNKKLNKQINKILNKYKIHTNHESPNTNLTQFLDTLKQKLTVASSRLRRYTACSLRKTQNNQFQNSEKKFYQNLSKVTSNSTISRNHEHTINSIDPETLRQFWSNIWENTTDYNREAEWLKAEEENISKIHPMEFNVIPIEIFHNVLKSTHNWKAPGSDKIHNFWYKKFSQIHALLYHHINNFIKNPNTMPSYITSGVTYMLPKDPNDMVNPAKYRPITCLQTIYKIITGCISYLIYHHIENNNILTEQQKGCRKFSQGCKEQLTIDAVILKHVQKNKRDMYSTYIDYKKAYDSVPHSWLVKILHIYNIHPQIISFLGISMTKWTTRLHLQLTGNTIETEPIHIKRGIFQGDALSPLWFCLALNPLSNMLNLTNMGYSFSKTTSQMDTPANNTDYKINHVLYMDDIKIYGSSQPELEHLMAITESFSRDISMEFGIDKCKTNCIKAGQNHQHQYHLHDGNIIDPLCDGESYKYLGYQQSKLIHHKDIKLKITDNFKHRINSILKTQLNAKNTTKAINSYAIPVLTYSFGIINWTKNDLLNLQRLINTTMTKNRKHHPRACIQRQNLPRKIGGRGIINIKNLHNRQITTLRNYFHNKAGSSTLHHTINKYDTKFTPLNLQTQEKQGNEIQMEQQDLLDQWALKSLHGRHYQDLSQPNVDKQASNEWLSRGELFPETEGFMIAIQDQVVETRNYKKYIMKINTIPDICRRCNSGSETIQHITGACKAIAQTDYKYRHDQVANIIHQKLAIKYNLIPTPTKHTPYYKYSPETILENPNHKLYFDRAILTDRTVHYNRPDITLVDKINKTGYIIDIAIPNTHNLQNTIAEKLTKYIELKDEIIRMWRLQKVIIVPIVISTTGIIPKQLSQSLSLIDLPHKTYIQLQKAVILNTCRIVRKFLQTELSPLPTLHNM

SEQ ID NO: 3146 - protein, 1323 aa, Laothoe populi
MYAGWPLPRASPHTPIDLNFHSERSSSPHSSMLSELRTEDVVQRTIVHNTAPAKVQRLRIKWSKEMNIFILRNYYILTKLDTDTKCYLDQLHQRFTEQFPNVEASKQRVGDQRRAIIRNRLLSNDKINEIRTEVKTYLQQQPNNFSQNQLATRQRMKWTTEHNESIMKLYYKITQLETNKTAYRKILYQKFIHIFPQLSHLSEQRIADQRRVIIANKYIDTNRLKEIKQEVANELRLGSSNVNNLQSNQVLTTEFPISHDTETNFNELTLLTDIENNTSVNVNLTLIQDTLDNVEIDSTFKNALDFFSNVNPEQRPYIPKQKSSKKLNTVINHINNKTLPQYVNSDTDFHKLQTIIYCAAWTVAKTNGSKLIIPPAANKQHFNFKPSWQKRLERKIEDLRAKIGRMTQYMTGNKNKKLNKQINKILNKYKIHTNHESPNTNLTQFLDTLKQKLTVASSRLRRYTACSLRKTQNNQFQNSEKKFYQNLSKVTSNSTISRNHEHTINSIDPETLRQFWSNIWENTTDYNREAEWLKAEEENISKIHPMEFNVIPIEIFHNVLKSTHNWKAPGSDKIHNFWYKKFSQIHALLYHHINNFIKNPNTMPSYITSGVTYMLPKDPNDMVNPAKYRPITCLQTIYKIITGCISYLIYHHIENNNILTEQQKGCRKFSQGCKEQLTIDAVILKHVQKNKRDMYSTYIDYKKAYDSVPHSWLVKILHIYNIHPQIISFLGISMTKWTTRLHLQLTGNTIETEPIHIKRGIFQGDALSPLWFCLALNPLSNMLNLTNMGYSFSKTTSQMDTSAINTDYKINHLLYMDDIKIYGSSQPELEHLMAITESFSRDISMEFGIDKCKTNCIKAGQNHQHQYHLHDGNIIDPLCDGESYKYLGYQQSKLIHHKDIKLKITDNFKHRINSILKTQLNAKNTTKAINSYAIPVLTYSFGIINWTKNDLLNLQRLINTTMTKNRKHHPRACIQRQNLPRKIGGRGIINIKNLHNRQITTLRNYFHNKAGSSTLHHTINKYDTKFTPLNLQTQEKQGNEVQMEQQDLLDQWALKSLHGRHYQDLSQPNVDKQASNEWLSRGELFPETEGFMIAIQDQVVESRNYKKYIMKINTIPDICRRCNSGSETIQHITGACKAIAQTDYKYRHDQVANIIHQKLAIKYNLIPTPTKHTPYYKYSPETILENPNHKLYFDRAILTDRTVHYNRPDITLVDKINKTGYIIDIAIPNTHNLQNTIAEKLTKYIELKDEIIRMWRLQKVIIVPIVISTTGIIPKQLSQSLSLIDLPHKTYIQLQKAVILNTCRIVRKFLQTELSPLPTLHNM

SEQ ID NO: 3147 - protein, 1382 aa, Laothoe populi
METRLRSKRLGPLPGGDRRGALGADAECHSMRTVSGSELNRRAPTGSPEINATAESISSSSPKSLFSSLPSSPPSYLNFHSERSSSPHSSMLSELRTEDVVQRTIVHNTAPAKVQRLRIKWSKEMNIFILRNYYILTKLDTDTKCYLDQLHQRFTEQFPNVEASKQRVGDQRRAIIRNRLLSNDKINEIRTEVKTYLQQQPNNFSQNQPAIRQRMKWTTEHNESIMKLYYKITQLETNKTAYRKILYQKFIHIYPQLSHLSEQRIADQRRVIIANKYIDTNRLKEIKQEVANELRLGSSNVNNLQSNQVLTTEFPISHDTETNFNELTLLTDIENNTSVNVNLTLIQDTLDNVEIDSTFKNALDFFSNVNPEQRPYIPKQKSSKKLNTVINHINNKTLPQYVNSDTDFHKLQTIIYCAAWTVAKTNGSKLIIPPTANKQHFNFKPSWQKRLERKIEDLRAKIGRMTQYMTGNKNKKLNKQINKILNKYKIHTNHESPNTNLTQFLDTLKQKLTVASSRLRRYTACSLRKTQNNQFQNSEKKFYQNLSKVTSNSTISRNHEHTINSIDPETLRQFWSNIWENTTDYNREAEWLKAEEENISKIHPMEFNVIPIEIFHNVLKSTHNWKAPGSDKIHNFWYKKFSQIHALLYHHINNFIKNPNTMPSYITSGVTYMLPKDPNDMVNPAKYRPITCLQTIYKIITGCISYLIYHHIENNNILTEQQKGCRKFSQGCKEQLTIDAVILKHVQKNKRDMYSTYIDYKKAYDSVPHSWLVKILHIYNIHPQIISFLGISMTKWTTRLHLQLTGNTIETEPIHIKRGIFQGDALSPLWFCLALNPLSNMLNLTNMGYSFSKTTSQMDTPANNTDYKINHLLYMDDIKIYGSSQPELEHLMAITESFSRDISMEFGIDKCKTNCIKAGQNHQHQYHLHDGNIIDPLCDGESYKYLGYQQSKLIHHKDIKLKITDNFKHRINSILKTQLNAKNTTKAINSYAIPVLTYSFGIINWTKNDLLNLQRLINTTMTKNRKHHPRACIQRQNLPRKIGGRGIINIKNLHNRQITTLRNYFHNKAGSSTLHHTINKYDTKFTPLNLQTQEKQGNEIQMEQQDLLDQWALKSLHGRHYQDLSQPNVDKQASNEWLSRGELFPETEGFMIAIQDQVVETRNYKKYIMKINTIPDICRRCNSGSETIQHITGACKAIAQTDYKYRHDQVANIIHQKLAIKYNLIPTPTKHTPYYKYSPETILENPNHKLYFDRAILTDRTVHYNRPDITLVDKINKTGYIIDIAIPNTHNLQNTIAEKLTKYIELKDEIIRMWRLQKVIIVPIVISTTGIIPKQLSQSLSLIDLPHKTYIQLQKAVILNTCRIVRKFLQTELSPLPTLHNM

SEQ ID NO: 3148 - protein, 1386 aa, Junonia pacoma
MVLTRSSTKRPQVPGGRSTSTGRDGDQSGAVSRGAKNLRVAVPTRQTTMASNMDSESSSSQSLLSSIPSSPCSYIHHYDQPSSPLSTLSSEVMVDHVVQSTSVDITAPVKTQRARLKWTEEMNIFILRQYFILTKLETDTKSYLSALHQNFTERFPNMDVSKQRIGDQRRVILSNKLLNNSKIQKIRSEVETHLQNQPNTSNHTITQTQTTGHRMRWTNEYNEAIIRLYYKITELETNKSAYRKTLHQHFITQFPHLNNITEQRIADQRRLIIANKYIDEDRLLIIKQDVAHELGVQNLNNRNESSINHTSNNNHIAPELDPLFNVDVSDNISNHTPLNKEPERNKEIDTIFNNALEYFSDINPVDRPYIPKQKCSKKLSIIINYINNVILPEVVDNNTEFQKLHTIIYSTAWTVAKLNGSKLTIPPPDSHNQKQNSSKPKWQIRLERKIEVLRASIGRLTQYLNGNKSRKLTNHINKILITYKLHTIHEEPNTNLSHFLDTLTQKLTVASSRLRRYMACTLRKSQNNQFVTNEKKFYQNLSKLTSNVSESSQNQQTSSMSIDTLRQFWANLWETPVEHDKTAEWIELEKTNNLNKREMEYQNIPIDIFHEVLKMTHNWKAPGSDKIHNYWYKKLSYIHPFLYTHINNFVENPDRMPHFMTTGITHMLPKDPTDSNNPAKYRPITCLQTFYKITTACLSQLIYHHIDSNGILAEQQKGCRKFSQGCKEQLTIDAIVLKEVLLKKNDLYTMYIDYKKAYDSVPHSWLIKILDLYKVNPKIISFLRLTMSRWSTQLHIKTNNGISTSDPIQIKRGIFQGDALSPLWFCLALNPLSSMLNSTNLGYSLGKIDSSADTTLQPVNYKLNHLMYMDDIKIYGSTQLELEQLVKLTELFSKDISMQFGIDKCKINSIRAGQNYQHHYHLQDYTSTIHPLSEQESYKYLGYQQTKQIHHKEIKAHLTQNFKHRLNSILKTHLNAKNTVKAINSYAVPILTYSFGIINWTKYELQNLQRIINVFMSKNRKHHPRACIQRQNLPRTDGGRGIIHINNLHNRQIKNLRKYFHNKSENTILHHCITKNDKKLTPLNLADHSPQRNEIEIDHQTLHNQWAQKSLHGRHHHDLSLPNVDKQASNEWLSRGELFPETEGFMIAIQDQVIETRNYKKHIMKIHNQSDLCRRCNSNSETIQHITGACKAIAQTDYKFRHDQVTNIIHQKLALKYKLIPQPTKPIPYYKYIPETVLENTNYKLYFDRAILTDKTVHFNRPDITLIDKIHKTAFIIDIAIPNTHNLQSTIAEKLAKYIDLRDEITRMWRLEKVSIVPIVLSTTGVIPKQITQSLTVLDLPQLTHIQLQKAVILNTCRIVRKFLQSELTSISTSEPITNPTDNHLA

SEQ ID NO: 3149 - protein, 1387 aa, Junonia neildi
MVLTRSSTKRPQVPGGRSTSTGRDGNQSGAVSRGAKNLRVAVPTRQTTMASNMDSESSSSQSLLSSIPSSPCSYIHHYDQPSSPLSTLSSEVTSVDHVVQSTSVDITAPVKTQRARLKWTEEMNIFILRQYFILTKLETDTKSYLSALHQNFTERFPNMDVSKQRIGDQRRVILSNKLLNNSKIQKIRSEVETHLQNQPNTSNHTITQTQTTGHRMRWTNEYNEAIIRLYYKITELETNKSAYRKTLHQHFITQFPHLNNITEQRIADQRRLIIANKYIDEDRLLIIKQDVAHELGVQNLNNRNESSINQTSTNNHIATELNSLFNVDVSDNISNHTPLNKEPERNKEIDTIFNNALEYFSDINPVDRPYIPKQKCSKKLSIIINYINNVILPEVVDNNTEFQKLHTIIYSTAWTVAKLNGSKLTIPPPDSHNQKQNSSKPKWQIRLERKIEVLRASIGRLTQYLNGNKSRKLTNHINKILITYKLHTIHEEPNTNLSHFLDTLTQKLTVASSRLRRYMACTLRKSQNNQFVTNEKKFYQNLSKLTSNVSESSQNQHTSSMSIDTLRQFWANLWETPVEHDRTAEWIELEKTNNLNKREMEYQNIPIDIFHEVLKMTHNWKAPGSDKIHNYWYKKLSYIHPFLYTHINNFVENPDRMPHFMTTGITHMLPKDPTDSNNPAKYRPITCLQTFYKITTACLSQLIYHHIDSNGILAEQQKGCRKFSQGCKEQLTIDAIVLKEVLLKKNYLYTMYIDYKKAYDSVPHSWLIKILDLYKVNPKIISFLRLTMSRWSTQLHIKTNNGISTSDPIQIKRGIFQGDALSPLWFCLALNPLSSMLNSTDLGYSLGKIDSSADTTLQPVDYKLNHLMYMDDIKIYGSTQLELEQLVKLTELFSKDISMQFGIDKCKINSIRAGQNYQHHYHLQDYTSTIHPLSEQESYKYLGYQQTKQIHHKEIKAHLTQNFKHRLNSILKTHLNAKNTVKAINSYAVPILTYSFGIINWTKYELQNLQRIINVFMSKNRKHHPRACIQRQNLPRTDGGRGIIHINNLHNRQIKNLRKYFHNKSENTILHHCITKNDKKLTPLNLADQSPQRNEIEIDHQTLHHQWAQKSLHGRHHHDLSLPNVDKQASNEWLSRGELFPETEGFMIAIQDQVIETRNYKKHIMKIHNQSDLCRRCNSNSETIQHITGACKAIAQTDYKFRHDQVTNIIHQKLALKYKLIPQPTKPIPYYKYIPETVLENTNYKLYFDRAILTDKTVHFNRPDITLIDKIHKTAFIIDIAIPNTHNLQSTIAEKLAKYIDLRDEITRMWRLEKVSIIPIVLSTTGVIPKQITQSLTVLDLPQLTHIQLQKAVILNTCRIVRKFLQSELTSISTSEPITNPTDNHLA

SEQ ID NO: 3150 - protein, 1387 aa, Junonia genoveva
MVLTRSSTKRPQVPGGRSTSTGRDGNQSGAVSRGAKNLRVAVPTRQTTMASNMDSESSSSQSLLSSIPSSPCSYIHHYDQPSSPLSTLSSEVTSVDHVVQSTSVDITAPVKTQRARLKWTEEMNIFILRQYFILTKLETDTKSYLSALHQNFTERFPNMDVSKQRIGDQRRVILSNKLLNNSKIQKIRSEVETHLQNQPNTSNHTITQTQTTGHRMRWTNEYNEAIIRLYYKITELETNKSAYRKTLHQNFITQFPHLNNITEQRIADQRRLIIANKYIDEDRLLIIKQDVAHELGVQNLNNRNESSINQTSTNNHIATELDPLFNVDVSDNISNHTPLNKEPERNKEIDTIFNNALEYFSDINPVDRPYIPKQKCSKKLSIIINYINNVILPEVVDNNTEFQKLHTIIYSTAWTVAKLNGSKLTIPPPDSHNQKQNSSKPKWQIRLERKIEVLRASIGRLTQYLNGNKSRKLTNHINKILITYKLHTIHEEPNTNLSHFLDTLTQKLTVASSRLRRYMACTLRKSQNNQFVTNEKKFYQNLSKLTSNVSESSQNQHTSSMSIDTLRQFWANLWETPVEHDRTAEWIELEKTNNLNKREMEYQNIPIDIFHEVLKMTHNWKAPGSDKIHNYWYKKLSYIHPFLYTHINNFVENPDRMPHFMTTGITHMLPKDPTDSNNPAKYRPITCLQTFYKITTACLSQLIYHHIDSNGILAEQQKGCRKFSQGCKEQLTIDAIVLKEVLLKKNDLYTMYIDYKKAYDSVPHSWLIKILDLYKVNPKIISFLRLTMSRWSTQLHIKTNNGISTSDPIQIKRGIFQGDALSPLWFCLALNPLSSMLNSTDLGYSLGKIDSSADTTLQPVDYKLNHLMYMDDIKIYGSTQLELEQLVKLTELFSKDISMQFGIDKCKINSIRAGQNYQHHYHLQDYTSTIHPLSEQESYKYLGYQQTKQIHHKEIKAHLTQNFKHRLNSILKTHLNAKNTVKAINSYAVPILTYSFGIINWTKYELQNLQRIINVFMSKNRKHHPRACIQRQNLPRTDGGRGIIHINNLHNRQIKNLRKYFHNKSENTILHHCITKNDKKLTPLNLADQSPQRNEIEIDHQTLHNQWAQKSLHGRHHHDLSLPNVDKQASNEWLSRGELFPETEGFMIAIQDQVIETRNYKKHIMKIHNQSDLCRRCNSNSETIQHITGACKAIAQTDYKFRHDQVTNIIHQKLALKYKLIPQPTKPIPYYKYIPETVLENTNYKLYFDRAILTDKTVHFNRPDITLIDKIHKTAFIIDIAIPNTHNLQSTIAEKLAKYIDLKDEITRMWRLEKVSIIPIVLSTTGVIPKQITQSLTVLDLPQLTHIQLQKAVILNTCRIVRKFLQSELTSISTSEPITNPTDNHLA

SEQ ID NO: 3151 - protein, 1301 aa, Junonia evarete
MVLTRSSTKRPQVPGGRSTSTGRDGNQSGAVSRGAKNLRVAVPTRQTTMASNMDSESSSSQSLLSSIPSSPCSYIHHYDQPSSPLSTLSSEVTSVDHVVQSTSVDITAPVKTQRARLKWTEEMNIFILRQYFILTKLETDTKSYLSTLHQNFTERFPNMDVSKQRIGDQRRVILSNKLLNNSKIQKIRSEVETHLQNQPNTSNHTITQTQTTGHRMRWTNEYNEAIIRSYYKITELETNKSAYRKTLHQNFITQFPHLNNISEQRIADQRRLIIANKYIDEDRYIPKQKCSKKLSIIINYINNVILPEVVDNNTEFQKLHTIIYSTAWTVAKLNGSKLTIPPPDSHNQKQNSSKPKWQIRLERKIEVLRASIGRLTQYLNGNKSRKLTNHINKILITYKLHTIHEEPNTNLSHFLDTLTQKLTVASSRLRRYMACTLRKSQNNQFVTNEKKFYQNLSKLTSNVSESSQNQQTSSMSIDTLRQFWANLWETPVEHDKTAEWIELEKTNNLNKREMEYQNIPIDIFHEVLKMTHNWKAPGSDKIHNYWYKKLSYIHPFLYTHINNFVENPDRMPHFMTTGITHMLPKDPTDSNNPAKYRPITCLQTFYKITTACLSQLIYHHIDSNGILAEQQKGCRKFSQGCKEQLTIDAIVLKEVLLKKNDLYTMYIDYKKAYDSVPHSWLIKILDLYKVNPKIISFLRLTMSRWSTQLHIKTNNGISTSDPIQIKRGIFQGDALSPLWFCLALNPLSSMLNSTDLGYSLGKIDSSADTTLQPVDYKLNHLMYMDDIKIYGSTQLELEQLVKLTELFSKDISMQFGIDKCKINSIRAGQNYQHHYHLQDYTSTIHPLSEQESYKYLGYQQTKQIHHKEIKAHLTQNFKHRLNSILKTHLNAKNTVKAINSYAVPILTYSFGIINWTKYELQNLQRIINVFMSKNRKHHPRACIQRQNLPRTDGGRGIIHINNLHNRQIKNLRKYFHNKSENTILHHCITKNNKMLTPLNLADHSPQRNEIEIDHQTLHNQWAQKSLHGRHHHDLSLPNVDKQASNEWLSRGELFPETEGFMIAIQDQVIETRNYKKHIMKIHNQSDLCRRCNSNSETIQHITGACKAIAQTDYKFRHDQVTNIIHQKLALKYKLIPQPTKPIPYYKYIPETVLENTNYKLYFDRAILTDKTVHFNRPDITLIDKIHKTAFIIDIAIPNTHNLQSTIAEKLAKYIDLRDEITRMWRLEKVSIIPIVLSTTGVIPKQITQSLTVLDLPQLTHIQLQKAVILNTCRIVRKFLQSELTSISTSEPITNPTDNHLA

SEQ ID NO: 3152 - protein, 1386 aa, Junonia zonalis
MVLTRSSTKRPQVPGGRSTSTGRDGNQSGAVSRGAKNLRVAVPTRQTTMASNMDSESSSSQSLLSSIPSSPCSYIHHYDQPSSPLSTLSSEVMVDHVVQSTSVDITAPVKTQRARLKWTEEMNIFILRQYFILTKLETDTKSYLSALHQNFTERFPNMDVSKQRIGDQRRVILSNKLLNNSKIQKIRSEVETHLQNQPNTSNHTITQTQTTGHRMRWTNEYNEAIIRLYYKITELETNKSAYRKTLHQHFITQFPHLNNITEQRIADQRRLIIANKYIDEDRLLIIKQDVAHELGVQNLNNRNESSINQTSTNNHIATELDPLFNVDVSDNISNHTPLNKEPERNKEIDTIFNNALEYFSEINPVDRPYIPKQKCSKKLSIIINYINNVILPEVVDNNTEFQKLHTIIYSTAWTVAKLNGSKLTIPPPDSHNQKQNSSKPKWQIRLERKIEVLRASIGRLTQYLNGNKSRKLTNHINKILITYKLHTIHEEPNTNLSHFLDTLTQKLTVASSRLRRYMACTLRKSQNNQFVTNEKKFYQNLSKLTSNVSESSQNQQTSSMSIDTLRQFWANLWETPVEHDKTAEWIELEKTNNLNKREMEYQNIPIDIFHEVLKMTHNWKAPGSDKIHNYWYKKLSYIHPFLYTHINNFVENPDRMPHFMTTGITHMLPKDPTDSNNPAKYRPITCLQTFYKITTACLSQLIYHHIDSNGILAEQQKGCRKFSQGCKEQLTIDAIVLKEVLLKKNDLYTMYIDYKKAYDSVPHSWLIKILDLYKVNPKIISFLRLTMSRWSTQLHIKTNNGISTSDPIQIKRGIFQGDALSPLWFCLALNPLSSMLNSTDLGYSLGKIDSSADTTLQPVDYKLNHLMYMDDIKIYGSTQLELEQLVKLTELFSKDISMQFGIDKCKINSIRAGQNYQHHYHLQDYTSTIHPLSEQESYKYLGYQQTKQIHHKEIKAHLTQNFKHRLNSILKTHLNAKNTVKAINSYAVPILTYSFGIINWTKYELQNLQRIINVFMSKNRKHHPRACIQRQNLPRTDGGRGIIHINNLHNRQIKNLRKYFHNKSENTILHHCITKNDKKLTPLNLADHSPQRNEIEIDHQTLHNQWAQKSLHGRHHHDLSLPNVDKQASNEWLSRGELFPETEGFMIAIQDQVIETRNYKKHIMKIHNQSDLCRRCNSNSETIQHITGACKAIAQTDYKFRHDQVTNIIHQKLALKYKLIPQPTKPIPYYKYIPETVLENTNYKLYFDRAILTDKTVHFNRPDITLIDKIHKTAFIIDIAIPNTHNLQSTIAEKLAKYIDLRDEITRMWRLEKVSIIPIVLSTTGVIPKQITQSLTVLDLPQLTHIQLQKAVILNTCRIVRKFLQSELTSISTSEPITNPTDNHLA

SEQ ID NO: 3153 - protein, 1387 aa, Junonia litoralis
MVLTRSSTKRPQVPGGRSTSTGRDGNQSGAVSRGAKNLRVAVPTRQTTMASNMDSESSSSQSLLSSIPSSPCSYIHHYDQPSSPLSTLSSEVTSVDHVVQSTSVDITAPVKTQRARLKWTEEMNIFILRQYFILTKLETDTKSYLSALHQNFTERFPNMDVSKQRIGDQRRVILSNKLLNNSKIQKIRSEVETHLQNQPNTSNHTITQTQTTGHRMRWTNEYNEAIIRLYYKITELETNKSAYRKTLHQNFITQFPHLNNISEQRIADQRRLIIANKYIDEDRLLIIKQDVAHELGVQNLNNRNESSINQTSTNNHIATELDSLFNVDVSDNISNHTPLNKEPERNKEIDTIFNNALEYFSDINPVDRPYIPKQKCSKKLSIIINYINNVILPEVVDNNTEFQKLHTIIYSTAWTVAKLNGSKLTIPPPDSHNQKQNSSKPKWQIRLERKIEVLRASIGRLTQYLNGNKSRKLTNHINKILITYKLHTIHEEPNTNLSHFLDTLTQKLTVASSRLRRYMACTLRKSQNNQFVTNEKKFYQNLSKLTSNVSESSQNQHTSSMSIDTLRQFWANLWETPVEHDKTAEWIELEKTNNLNKREMEYQNIPIDIFHEVLKMTHNWKAPGSDKIHNYWYKKLSYIHPFLYTHINNFVENPDRMPHFMTTGITHMLPKDPTDSNNPAKYRPITCLQTFYKITTACLSQLIYHHIDSNGILAEQQKGCRKFSQGCKEQLTIDAIVLKEVLLKKNDLYTMYIDYKKAYDSVPHSWLIKILDLYKVNPKIISFLRLTMSRWSTQLHIKTNNGISTSDPIQIKRGIFQGDALSPLWFCLALNPLSSMLNSTDLGYSLGKIDSSADTTLQPVDYKLNHLMYMDDIKIYGSTQLELEQLVKLTELFSKDISMQFGIDKCKINSIRAGQNYQHHYHLQDYTSTIHPLSEQESYKYLGYQQTKQIHHKEIKAHLTQNFKHRLNSILKTHLNAKNTVKAINSYAVPILTYSFGIINWTKYELQNLQRIINVFMSKNRKHHPRACIQRQNLPRTDGGRGIIHINNLHNRQIKNLRKYFHNKSENTILHHCITKNDKKLTPLNLADHSPQRNEIEIDHQTLHNQWAQKSLHGRHHHDLSLPNVDKQASNEWLSRGELFPETEGFMIAIQDQVIETRNYKKHIMKIHNQSDLCRRCNSNSETIQHITGACKAIAQTDYKFRHDQVTNIIHQKLALKYKLIPQPTKPIPYYKYIPETVLENTNYKLYFDRAILTDKTVHFNRPDITLIDKIHKTAFIIDIAIPNTHNLQSTIAEKLAKYIDLRDEITRMWRLEKVSIIPIVLSTTGVIPKQITQSLTVLDLPQLTHIQLQKAVILNTCRIVRKFLQSELTSISTSEPITNPTDNHLA

SEQ ID NO: 3154 - protein, 1387 aa, Junonia vestina
MVLTRSSTKRPQVPGGRSTSTGRDGNQSGAMSRGAKNLRVAVPTRQTTMASNMDSESSSSQSLLSSIPSSPCSYIHHYDQPSSPLSTLSSEVTSVDHVVQSTSVDITAPVKTQRARLKWTEEMNIFILRQYFILTKLETDTKSYLSALHQNFTERFPNMDVSKQRIGDQRRVILSNKLLNNSKIQKIRSEVETHLQNQPNTSNHTITQTQTTGHRMRWTNEYNEAIIRLYYKITELETNKSAYRKTLHQNFITQFPHLNNITEQRIADQRRLIIANKYIDEDRLLIIKQDVAHELGVQNLNNRNESSINQTSTNNHIATELNSLFNVDVSDNISNHTPLNKEPERNKEIDTIFNNALEYFSDINPVDRPYIPKQKCSKKLSIIINYINNVILPEVVDNNTEFQKLHTIIYSTAWTVAKLNGSKLTIPSPDSHNQKQNSSKPKWQIRLERKIEVLRASIGRLTQYLNGNKSRKLTNHINKILITYKLHTIHEEPNTNLSHFLDTLTQKLTVASSRLRRYMACTLRKSQNNQFVTNEKKFYQNLSKLTSNVSESSQNQQTSSMSIDTLRQFWANLWETPVEHDKTAEWIELEKTNNLNKREMEYQNIPIDIFHEVLKMTHNWKAPGSDKIHNYWYKKLSYIHPFLYTHINNFVENPDRMPHFMTTGITHMLPKDPTDSNNPAKYRPITCLQTFYKITTACLSQLIYHHIDSNGILAEQQKGCRKFSQGCKEQLTIDAIVLKEVLLKKNDLYTMYIDYKKAYDSVPHSWLIKILDLYKVNPKIISFLRLTMSRWSTQLHIKTNNGISTSDPIQIKRGIFQGDALSPLWFCLALNPLSSMLNSTDLGYSLGKIDSSADTTLQPVDYKLNHLMYMDDIKIYGSTQLELEQLVKLTELFSKDISMQFGIDKCKINSIRAGQNYQHHYHLQDYTSTIHPLSEQESYKYLGYQQTKQIHHKEIKAHLTQNFKHRLNSILKTHLNAKNTVKAINSYAVPILTYSFGIINWTKYELQNLQRIINVFMSKNRKHHPRACIQRQNLPRTDGGRGIIHINNLHNRQIKNLRKYFHNKSENTILHHCITKNDKKLTPLNLADQSPQRNEIEIDHQTLHNQWAQKSLHGRHHHDLSLPNVDKQASNEWLSRGELFPETEGFMIAIQDQVIETRNYKKHIMKIHNQSDLCRRCNSNSETIQHITGACKAIAQTDYKFRHDQVTNIIHQKLALKYKLIPQPTKPIPYYKYIPETVLENTNYKLYFDRAILTDKTVHFNRPDITLIDKIHKTAFIIDIAIPNTHNLQSTIAEKLAKYIDLRDEITRMWRLEKVSIIPIVLSTTGVIPKQITQSLTVLDLPQLTHIQLQKAVILNTCRIVRKFLQSELTSISTSEPITNPTDNHLA

SEQ ID NO: 3155 - protein, 869 aa, Junonia grisea
MACTLRKSQNNQFVTNEKKFYQNLSKLTSNVSESSQNQQTSSMSIDTLRQFWANLWETPVEHDKTAEWIELEKTNNLNKREMEYQNIPIDIFHEVLKKTHNWKAPGSDKIHNYWYKKLSYIHPFLYTHINNFVENPDRMPHFMTTGITHMLPKDPTDSNNPAKYRPITCLQTFYKITTACLSQLIYHHIDSNGILAEQQKGCRKFSQGCKEQLTIDAIVLKEVLLKKNDLYTMYIDYKKAYDSVPHSWLIKILDLYKVNPKIISFLRLTMSRWSTQLHIKTNNGISTSDPIQIKRGIFQGDALSPLWFCLALNPLSSMLNSTNLGYSLGKIDSSADTTLQPVNYKLNHLMYMDDIKIYGSTQLELEQLVKLTELFSKDISMQFGIDKCKINSIRAGQNYQHHYHLQDYTSTIHPLSEQESYKYLGYQQTKQIHHKEIKAHLTQNFKHRLNSVLKTHLNAKNTVKAINSYAVPILTYSFGIINWTKYELQNLQRIINVFMSKNRKHHPRACIQRQNLPRTDGGRGIIHINNLHNRQIKNLRKYFHNKSENTILHHCITKNDKKLTPLNLADHSPQRNEIEIDHQTLHNQWAQKSLHGRHHHDLSLPNVDKQASNEWLSRGELFPETEGFMIAIQDQVIETRNYKKHIMKIHNQSDLCRRCNSNSETIQHITGACKAIAQTDYKFRHDQVTNIIHQKLALKYKLIPQPTKPIPYYKYIPETVLENTNYKLYFDRAILTDKTVHFNRPDITLIDKIHKTAFIIDIAIPNTHNLQSTIAEKLAKYIDLRDEITRMWRLEKVSIIPVVLSTTGVIPKQITQSLTVLDLPQLTHIQLQKAVILNTCRIVRKFLQSELTSISTSEPITNPTDNHLA

SEQ ID NO: 3156 - protein, 1387 aa, Junonia stemosa
MVLTRSSTKRPQVPGGRSTSTGRDGNQSGAVSRGAKNLRVAVPTRQTTMASNMDSESSSSQSLLSSIPSSPCSYIHHYDQPSSPLSTLSSEVTSVDHVVQSTSVDITAPVKTQRARLKWTEEMNIFILRQYFILTKLETDTKSYLSALHQNFTERFPNMDVSKQRIGDQRRVILSNKLLNNSKIQKIRSEVETHLQNQPNTSNHTITQTQTTGHRMRWTNEYNEAIIRLYYKITELETNKSAYRKTLHQHFITQFPHLNNITEQRIADQRRLIIANKYIDEDRLLIIKQDVAHELGVQNLNNRNESSINQTSTNNHIATELDPLFNVDVSDNISNHAPLNKEPERNKEIDTIFNNALEYFSEINPVDRPYIPKQKCSKKLSIIINYINNVILPEVVDNNTEFQKLHTIIYSTAWTVAKLNGSKLTIPPPDSHNQKQNSSKPKWQIRLERKIEVLRASIGRLTQYLNGNKSRKLTNHINKILITYKLHTIHEEPNTNLSHFLDTLTQKLTVASSRLRRYMACTLRKSQNNQFVTNEKKFYQNLSKLTSNVSESSQNQHTSSMSIDTLRQFWANLWETPVEHDKTAEWIELEKTNNLNKREMEYQNIPIDIFHEVLKMTHNWKAPGSDKIHNYWYKKLSYIHPFLYTHINNFVENPDRMPHFMTTGITHMLPKDPTDSNNPAKYRPITCLQTFYKITTACLSQLIYHHIDSNGILAEQQKGCRKFSQGCKEQLTIDAIVLKEVLLKKNDLYTMYIDYKKAYDSVPHSWLIKILDLYKVNPKIISFLRLTMSRWSTQLHIKTNNGISTSDPIQIKRGIFQGDALSPLWFCLALNPLSSMLNSTNLGYSLGKIDSSADTTLQPVDYKLNHLMYMDDIKIYGSTQLELEQLVKLTELFSKDISMQFGIDKCKINSIRAGQNYQHHYHLQDYTSTIHPLSEQESYKYLGYQQTKQIHHKEIKAHLTQNFKHRLNSILKTHLNAKNTVKAINSYAVPILTYSFGIINWTKYELQNLQRIINVFMSKNRKHHPRACIQRQNLPRTDGGRGIIHINNLHNRQIKNLRKYFHNKSENTILHHCITKNDKKLTPLNLADHSPQRNEIEIDHQTLHNQWAQKSLHGRHHHDLSLPNVDKQASNEWLSRGELFPETEGFMIAIQDQVIETRNYKKHIMKIHNQSDLCRRCNSNSETIQHITGACKAIAQTDYKFRHDQVTNIIHQKLALKYKLIPQPTKPIPYYKYIPETVLENTNYKLYFDRAILTDKTVHFNRPDITLIDKIHKTAFIIDIAIPNTHNLQSTIAEKLAKYIDLRDEITRMWRLEKVSIIPIVLSTTGVIPKQITQSLTVLDLPQLTHIQLQKAVILNTCRIVRKFLQSELTSISTSEPITNPTDNHLA

SEQ ID NO: 3157 - protein, 1384 aa, Junonia villida
MVLTRSSTKRPQVPGGRRTSTGRDGNQSGAESRGAKNLRVAVPTRQTTMASNMDSDSSSSQSVPSSIPSSPSSYHYDQPSSPLSTLSSEVMVDHVVQSTSVDTTAPVKTKRARLKWTEEMNIFILRQYFILTKLETDTKSYLSALHQNFTERFPNMDVSKQRIGDQRRVIMSNKLLNNSKIQKIRSEVETHLQNQPNTSKHTLTQTQTAGHRMRWTNEYNEAIIRLYYKITELETNKSAYRKTLHQQFISQFPHLNNITEQRIADQRRLIIANKFIDEDRLLTIKQEVAHELGVQNLNNRNESSINHTTTNNHITPELDPLFNLDISDNISNHIPSNKEPERNKEIDTTFNNALEYFSDINPVDRPYIPKQKCSKKLSIITNYINNVILPEVVDNNTEFQKLHTIIYSTAWTVAKLNGSNLTIPPPNSHNQRQNSSKPKWQIRLERKIEVLRASIGRLTQYLNGNKSKKLTNHINKILVTYKLHTIHEEPNTNLSHFLDTLTQKLTVASSRLRRYMACTLRKSQNNQFVNNEKKFYQNLSKLTSNISDSSQNQQTSSMSIDTLRQFWANLWENPVEHDKTAEWIELEKTRNLNKREMEYQNIPIDIFHEVLKMTHNWKAPGSDKIHNYWYKKLPYIHPFLYIHINNFVENPDRMPHFLTTGITHMLPKDPTDSNNPAKYRPITCLQTFYKITTACLSQLIYHHIDSNGILAEQQKGCRKFSQGCKEQLTIDAIVLKEVLLKKSDLYTMYIDYKKAYDSVPHSWLIKILDIYKVNPKIISFLRLTMSRWFTQLHIPTNSGISTSDPIQIKRGIFQGDALSPLWFCLALNPLSSMLNSTNLGYSLGKMDSSADTTIQPADYKLNHLMYMDDIKIYGSTQLELEQLVKLTELFSRDISMQFGIDKCKINSIRAGQNYQHHYHLQDYTSTIDPLSEQESYKYLGYQQTKQIHHREIKAHLTQNFKHRLNSILKTHLNAKNTVKAINSYAVPILTYSFGIINWTKYELQNLQRIINVFMSKNRKHHPRACIQRQNLPRMDGGRGIIHINNLHNRQIKNLRKYFHNKSENTTLHHCITKKDKKLTPLNLSDHSPQQNEIEIDHQTLHNQWAQKSLHGRHHHDLGLPNVDKHASNEWLIRGELFPETEGFMIAIQDQVIETRNYRKHIMKIHNQSDLCRRCNSNSETIQHITGACKAIAQTDYKFRHDQVTNIIHQKLALKYKLISQPTKPIPYYKYIPETVLENTNYKLYFDRAILTDKTVHFNRPDITLIDKIHKTAFIIDIAIPNTHNLQSTIAEKLAKYIDLRDEITRMWRLEKVSIIPIVLSTTGVIPKQISQSLTVLDLPQLTYIQLQKAVILNTCRIVRKFLQSELTPLSTSEPITNPTDNHLA

SEQ ID NO: 3158 - protein, 1387 aa, Junonia evarete
MVLTRSSTKRPQVPGGRSTSTGRDGDQSGAVSRGAKNLRVAVPTRQTTMASNMDSESSSSQSLLSSIPSSPCSYIHHYDQPSSPLSTLSSEVTSVDHVVQSTSVDITAPVKTQRARLKWTEEMNIFILRQYFILTKLETDTKSYLSALHQNFTERFPNMDVSKQRIGDQRRVILCNKLLNNSKIQKIRSEVETHLQNQPNTSNHTITQTQTTGHRMKWTNEYNEAIIRLYYKITELETNKSAYRKTLHQHFITQFPHLNNITEQRIADQRRLIIANKYIDEDRLLIIKQDVAHELGVQNLNNRNESSINQTSTNNHIATELDPLFNVDVSDNISNHTPLNKEPERNKEIDTIFNNALEYFSDINPVDRPYIPKQKCSKKLSIIINYINNVILPEVVDNNTEFQKLHTIIYSTAWTVAKLNGSKLTIPPPDSHNQKQNSSKPKWQIRLERKIEVLRASIGRLTQYLNGNKSRKLTNHINKILITYKLHTIHEEPNTNLSHFLDTLTQKLTVASSRLRRYMACTLRKSQNNQFVTNEKKFYQNLSKLTSNVSESSQNQHTSSMSIDTLRQFWANLWETPVEHDKTAEWIELEKTNNLNKREMEYQNIPIDIFHEVLKMTHNWKAPGSDKIHNYWYKKLSYIHPFLYTHINNFVENPDRMPHFMTTGITHMLPKDPTDSNNPAKYRPITCLQTFYKITTACLSQLIYHHIDSNGILAEQQKGCRKFSQGCKEQLTIDAIVLKEVLLKKNDLYTMYIDYKKAYDSVPHSWLIKILDLYKVNPKIISFLRLTMSRWSTQLHIKTNNGISTSDPIQIKRGIFQGDALSPLWFCLALNPLSSMLNSTDLGYSLGKIDSSADTTLQPVDYKLNHLMYMDDIKIYGSTQLELEQLVKLTELFSKDISMQFGIDKCKINSIRAGQNYQHHYHLQDYTSTIHPLSEQESYKYLGYQQTKQIHHKEIKAHLTQNFKHRLNSILKTHLNAKNTVKAINSYAVPILTYSFGIINWTKYELQNLQRIINVFMSKNRKHHPRACIQRQNLPRTDGGRGIIHINNLHNRQIKNLRKYFHNKSENTILHHCITKNDKKLTPLNLADHSPQRNEIEIDHQTLHNQWAQKSLHGRHHHDLSLPNVDKQASNEWLSRGELFPETEGFMIAIQDQVIETRNYKKHIMKIHNQSDLCRRCNSNSETIQHITGACKAIAQTDYKFRHDQVTNIIHQKLALKYKLIPQPTKPIPYYKYIPETVLENTNYKLYFDRAILTDKTVHFNRPDITLIDKIHKTAFIIDIAIPNTHNLQSTIAEKLAKYIDLRDEITRMWRLEKVSIIPIVLSTTGVIPKQITQSLTVLDLPQLTHIQLQKAVILNTCRIVRKFLQSELTSISTSEPITNPTDNHLA

SEQ ID NO: 3159 - protein, 1386 aa, Junonia coenia
MVLTRSSTKRPQVPGGRSTSTGRDGNQSGAVSRGAKNLRVAVPTRQTTMASNMDSESSSSQSLLSSIPSSPCSYIHHYDQPSSPLSTLSSEVMVDHVVQSTSVDITAPVKTQRARLKWTEEMNIFILRQYFILTKLETDTKSYLSALHQNFTERFPNMDVSKQRIGDQRRVILSNKLLNNSKIQKIRSEVETHLQNQPNTSNHTITQTQTTGHRMRWTNEYNEAIIRLYYKITELETNKSAYRKTLHQHFITQFPHLNNITEQRIADQRRLIIANKYIDEDRLLIIKQDVAHELGVQNLNNRNESSINHTSTNNHIAPELDPLFNVDVSDNISNHTPLNKEPERNKEIDTIFNNALEYFSDINPVDRPYIPKQKCSKKLSIIINYINNVILPEVVDNNTEFQKLHTIIYSTAWTVAKLNGSKLTIPPPDSHNQKQNSSKPKWQIRLERKIEVLRASIGRLTQYLNGNKSRKLTNHINKILITYKLHTIHEEPNTNLSHFLDTLTQKLTVASSRLRRYMACTLRKSQNNQFVTNEKKFYQNLSKLTSNVSESSQNQQTSSMSIDTLRQFWANLWETPVEHDKTAEWIELEKTNNLNKREMEYQNIPIDIFHEVLKMTHNWKAPGSDKIHNYWYKKLSYIHPFLYTHINNFVENPDRMPHFMTTGITHMLPKDPTDSNNPAKYRPITCLQTFYKITTACLSQLIYHHIDSNGILAEQQKGCRKFSQGCKEQLTIDAIVLKEVLLKKNDLYTMYIDYKKAYDSVPHSWLIKILDLYKVNPKIISFLRLTMSRWSTQLHIKTNNGISTSDPIQIKRGIFQGDALSPLWFCLALNPLSSMLNSTNLGYSLGKIDSSADTTLQPVDYKLNHLMYMDDIKIYGSTQLELEQLVKLTELFSKDISMQFGIDKCKINSIRAGQNYQHHYHLQDYTSTIHPLSEQESYKYLGYQQTKQIHHKEIKAHLTQNFKHRLNSILKTHLNAKNTVKAINSYAVPILTYSFGIINWTKYELQNLQRIINVFMSKNRKHHPRACIQRQNLPRTDGGRGIIHINNLHNRQIKNLRKYFHNKSENTILHHCITKNDKKLTPLNLADHSPQRNEIEIDHQTLHNQWAQKSLHGRHHHDLSLPNVDKQASNEWLSRGELFPETEGFMIAIQDQVIETRNYKKHIMKIHNQSDLCRRCNSNSETIQHITGACKAIAQTDYKFRHDQVTNIIHQKLALKYKLIPQPTKPIPYYKYIPETVLENTNYKLYFDRAILTDKTVHFNRPDITLIDKIHKTAFIIDIAIPNTHNLQSTIAEKLAKYIDLRDEITRMWRLEKVSIIPVVLSTTGVIPKQITQSLTVLDLPQLTHIQLQKAVILNTCRIVRKFLQSELTSISTSEPITNPTDNHLA

SEQ ID NO: 3160 - protein, 1378 aa, Deilephila porcellus
METRSSRKRIGPLPGGDRRGALGADAECHSMRTVSGSELNRRTPTGSPENNATADLISLSSSPKSLFSSLPSSPPSYLNYHSDGFSSSSLSPLPPELRADDVVQSTEVDNTVPVQAKRARIKWTPEMNICILRNYYILTKLDTDTKSYLPFLHQKFKEQFPDIQVSKQRIGDQRRAIIRNNLLPSDKINEIKSEVEKYLNQHQPSAPSQAITGKRMKWTTEHNETILKLYYKITELETNKTAYRKPLHQQFISKFPELSHLSEQRIADQKRVIIANSLIKQDRVHIIKQEVASELRIALENNHIPYDANQEHITENYTAHELSGETNVNAPIPLAEIQDNTNNTLIPGTLIKTKEAETTFKEILNFYSNVNPEKRAYIPKQKSSKKLSLIINYMDNIILPDYVNADTDFNTLQTVIYCAAWATAKINGTKLTVPPSDSQQRPISKPSWQKRLERKIVDLRAKIGRLTEYKNGTRSRKIVKHVNKILNKYKTHTTHEEPNTNLAQYLDTLKQKLTVTSSRLKRYTACTLRKTQNNQFNNSEKKFYSNLSKNTTNSAGSSNNSLSTTIDTDEFRKYWGNIWEKPANYNNGAEWIVSEESNHLNKEAMEYSFVPTEIFHKVLQSTHNWKAPGSDKIHNFWYKKFTHIHPFLYNHINNFIKNPDAMPSYITSGITYMLPKDPNDLNNPSKYRPITCLQTIYKIITACISNLIYEHIETNSILTEQQKGCRKFSQGCKEQLTIDSIILKQVQQKKKDLYSMYIDYRKAYDSVPHPWLIKVLHIYRIHPDICSFLSKAMTKWTTSLHIQINSITTLETEPLNIKRGIFQGDALSPLWFCLALNPLSNMLNSTNIGYSLGQVQNKTDTILNLNINHLLYMDDIKIYGSSQTELDYLVNITETFSRDISMEFGIEKCKTNCIKAGQNHPYQYNLQDGNAVDPLCDGEGYKYLGYQQSKLIHHKDIKVRITQNFKHRLNAILKTQLNAKNTIKAINSYAVPVLTYSFGIINWTKKELLDLQRTINTSMSKNRKHHPRACIQRQYLARTEGGRGIINIKNLHSRQITTLRRYFHTKAEKSVLHHAINMHDKKLTPLNLQDHNQQNNEIQTDQHTLVSQWALKSLHGRHYQDLSQSNVDKRASNEWLRRGELFPETEGFMIAIQDQIIETRNYRKHIMKIANQLDLCRKCNSSSETIQHITGACKTIAQTDYKYRHDQVANIIHQKLSTKYKLIIPPKKPMPYYKYIPETVLENSNYKLYYDRAILTDKTVHYNRPDITLIDKINKTATIIDVAIPNTHNLQSTISEKLTKYIDLKDEICRMWQLKKVSIVPIVVSATGVIPKQLSQSLDLLDLPQQTFIQIQKSVILNTCRIVRKFLQSESSPEPNIN

SEQ ID NO: 3161 - protein, 1378 aa, Deilephila porcellus
METRSSRKRIGPLPGGDRRGALGADAECHSMRTVSGSELNRRTPTGSPENNATADLISLSSSPKSLFSSLPSSPPSYLNYHSDGFSSSSLSPLPPELRADDVVQSTEVDNTVPVQAKRARIKWTPEMNICILRNYYILTKLDTDTKSYLPFLHQKFKEQFPDLQVSKQRIGDQRRAIIRNNLLPSDKINEIKSEVEKYLNQHQPSAPSQVITGKRMKWTTEHNETILKLYYKITELETNKTAYRKPLHQQFISKFPELSHLSEQRIADQKRVIIANSLIKQDRVHIIKQEVASELRIALENNQIPYDANQEHITENYTPHELSGETNVNAPIPLAEIQDNTNNTLIPGTLIETKEAETTFKEILNFYSNVNPEKRAYIPKQKSSKKLSLIINYMDNIILPDYVNADTDFNTLQTVIYCAAWTTAKINGTKLTVPPSDSQRRPISKPSWQKRLERKIVDLRAKIGRLTEYKNGTRSRKIVKHVNKILNKYKTHTTHEEPNTNLAQYLDTLKQKLTVTSSRLKRYTACTLRKTQNNQFNNSEKKFYSNLSKNTTNSAGSSNNSLSTTIDTDEFRKFWGNIWEKPANYNNGAEWIVSEESNHLNKEAMEYSFVPTEIFHKVLQSTHNWKAPGSDKIHNFWYKKFTHIHPFLYNHINNFIKNPDAMPSYITSGITYMLPKDPNDLNNPSKYRPITCLQTIYKIITACISNLIYEHIETNSILTEQQKGCRKFSQGCKEQLTIDSIILKQVQQKKKDLYSMYIDYRKAYDSVPHAWLIKVLHIYRIHPDICSFLSKAMTKWTTSLHIQINSITTLETEPLNIKRGIFQGDALSPLWFCLALNPLSNMLNSTNMGYSLGQVQNKTDTILNLNINHLLYMDDIKIYGSSQTELDYLVNITETFSRDISMEFGIEKCKTNCIKAGQNHPYQYNLQDGNAVDPLCDGEGYKYLGYQQSKLIHHKDIKVRITQNFKHRLNAILKTQLNAKNTIKAINSYAVPVLTYSFGIINWTKKELLDLQRTINTSMSKNRKHHPRACIQRQYLARTEGGRGIINIKNLHSRQITTLRHYFHTKAEKSVLHHAINMHDKKLTPLNLQDHNQQNNEIQTDQHTLVSQWALKSLHGRHYQDLSQSNVDKRASNEWLRRGELFPETEGFMIAIQDQIIETRNYRKHIMKIANQLDLCRKCNSSSETIQHITGACKTIAQTDYKYRHDQVANIIHQKLSTKYKLIIPPKKPIPYYKYIPETVLENSNYKLYYDRAILTDKTVHYNRPDITLIDKINKTATIIVVAIPNTHNLQSTISEKLTKYIDLKDEICRMWQLKNVSIVPIVVSATGVIPKQLSQSLDLLDLPQQTFIQIQKSVILNTCRIVRKFLQSESSPEPNIN

SEQ ID NO: 3162 - protein, 812 aa, Hyles vespertilio
MWEKPANYNNEAEWIKSEECNHLNKEPMVYSCIPAEVFHHVLRSSHNWKAPGSDKIHNFWYKKFAHIHPFLYNHINNFIKNPDSMPPYTTSGTTYMLPKDPKDLSNPSKYRPITCLQTIYKIITACISQLIYDHIETNSILTEQQKGCRKFSQGCKEQLTIDAIILKQVQQKKKNLYSTYIDYRKAYDSVPHAWLTKVLHIYRIHPDICSFLSKAMSNWTTSLRIQVEPMNTIQSEPIKIQRGIFQGDALSPLWFCLALNPLSNMLNSTKMGYPLGQIQCETDTIVDFNLNHLLYMDDIKIYGSSEIELDHLVNITETFSRDISMEFGVEKCKTNCVKAGQNHHYQYHLQDGGTVDPICQTDGYKYLGYQQSKLIHHRDIKIKLTQNFKHRLNAILKTQLNAKNTIKAINSYAIPVLTYSFGIISWTKKELLDIQRTINATMSKNRKHHPRACIQRQYLPRTEGGRGILNIKNLHSRQITTLRQYFHNRAEKSILHQAINRQDRKLTPLNLQDNNQQKNELQTDQKTLITQWALKSLHGRYYQELSQSNVDKQASNEWLRRGELFPETEGFMIAIQDQVIETRNYRKHIMKKANQVDLCRRCNSSSETIQHITGACKSIAQTDYKYRHDQVANIIHQKLAVKYKLVVPPKKPIPYYKYTPETVLENANHKVYFDRAILTDKTVHFNRPDITLIDKINKTATIIDIAIPNTHNLQNTISEKLTKYIDLKDEIARMWQLKKVTIVPVVVSTTGVIPKQLFQSLGLLDLPQLTYIQIQKSVILNTCRIVRKFLQSESSPEFIPNTVSNLNNYHLA

SEQ ID NO: 3163 - protein, 1395 aa, Deilephila porcellus
METRSKRKRIGPLPGGDRRGALGADAECYSMRTVSGSELSRRAPTGSPENNATAEQISLSSSPKSLFSSVPSSPPSYLNYDSVRSSSPLSTTSFEPLVENDVQPTIVENTAPVKTQRARIKWSKDMNTFILRNYYILTKLETDTRTYLSPLHQQFIEQFPHIQASKQRVGDQRRAIIRSKLLTDEEIKQIKTEVEGFLKNHQPTTLIQNIKATGQRMKWTTEHNETIIRLYYTITELEKNKTAYRKPLYQGFVNKYPELAHLSEQRIADQRRIIIANRFIDQVRLDLIKEEVARELGKSSLNINNPDNSHTHTIELAAIQEENRETNVNDPLTLNNVRDSTDNNIDISIIHNAIVQNQDIDNTFKDALNYFNKINPEKRPYIPKQKSSKKLSSIINYINEVLIPQHANVDTEFDILHTVIYCAAWTAAKINGTKLTIPPLEAPKNLIIKPSWQKRIEKKVADLRANIGRLTEYINGNRTNRIVKCVKKILDTYKTHTTHEEPNRDLNHFLDTLKQKLSVASSRLKRYTACSLRKSQNSQFHNNEKKFYQQLTKHTTNFTSSNNTNNEQNINILNTDSIRQFWDNIWGNSVNHNPNAEWIQIEEANQLNKQQMEYSFVPTDIFHKVLFSTHNWKAPGSDKIQNFWLKKLTNIHPLLYNHINKFIKDPDAIPSYITSGVTYMLPKDPEDLSNPAKYRPITCLQTIYKITTACISHLIYEHVETNNILTEQQKGCRKFSQGCKEQLIIDSVILKQVQQVKGDMYSIYIDYRKAYDSVPHSWLIKVLNIYKIHPIIISFLSNLMSKWTTRLQLQILAKSLEIEPIQIKRGIFQGDALSPLWFCLALNPLSNMLNSIKMGYSLDMLTSRTNAVENYLINHLMYMDDIKIYSSSQTELDHLVNITETFSRDISMQFGIDKCKTNCIRAGQYHRYQHHLQDGDTIDPLCEGESYKYLGYHQSKLVHHKDIKSQITQKFKHRLNSVLKTQLNSKNTTKAINTYAIPILTYSFGIINWTKKELINLQRTINTTMTKHRKHHPRAAIQRQNLPRGEGGRGIINIGNLHNKQIATLRQYFHNKAETSTLHKAVTIVDKKFTPLNLQDYNQQKNETLIDQQSLINQWALKSLHGRHYQDLSQVNVDKKASNEWLRRGELFPETEGFMIAIQDQVVETRNYKKYIMKLSNQIDICRRCNNNSETIQHITGACKAIAQTDYKYRHDQVANIIHQKLATKYKLIVPPKKPTPYYKYTPETVLENANYKLYFDRAILTDKTVHFNRPDITLVDKINKTATIIDIAIPNTHNLQNTISEKVTKYIDLKDEITRMWQLQKVSIVPIVVSTTGVIPKQLSQSLGLLDLPQQTYIQIQKAVILNTCRIVRKFLQSELSPEPIPNTTLNQSSNHLA

SEQ ID NO: 3164 - protein, 1449 aa, Hydriomena furcata
MMEPSKNVRIWSLPGGDRRGTSGADAGRYSMQTIGGEGNGRPSAGEPEQCELNRRYNLRPQTRSRSTSGAGTARRSRMSDQFGKRRLAPIEERSQSRTERAEEPQEAQSNLSSPKSLFSSLPSSPPSYLNYISEPSSPSLPSQKSSMAEDVVQLTTVDISAPAAAKTRTRKKWTDEMNAFVLRTYLILTKLESDTRAYLTSLHNEFINKFPHMEVSKQRLGDQRRAILRNSLLTTNHINEIREEVKSHLNANEHQVTQHTISQSQPAPNGQRMKWTTEHNEAIIREYFRITQLETNKTAYRKPLHQYFVNMFPHLSHISEQRIADQRRLIISNKFISDDRLSSIRNELANELEPNIQTLSNQTEPLNMTEDTVLISNYEPVTQHFIDTENNTNANPPSNDRHVEIDDTFRQALDYFQHTDPVERPYIPKQKTSRKLAEAVDYLNTISLPEIININTCFESLQTTVYCAAWTAAKVNGSKLRIPLEDLENRTQHQTKPRWQRRIEMKIEDLRKKIGRLTQYIQGNRSSTITKHVNKILESYKIHTVHEESNSNLTHFLDTLKQKLIVMSSRLRRYKACSLRKTQNNQFQNNEKKFYQNLTKTTNNMPTSREQFATHSDIVDPNELRDFWASLWENVVDHNKEADWIAEEQTKSATFSGMEYENIPVEVFQKVLKATHNWKSPGSDNIHNYWYKKFTHIHPFLYNHINNFILNPDTMPTYITTGVTYMIPKDLDNITNPAKYRPITCLQTIYKITTACLSQLIYQHIDLNNILDEQQKGCRKFSQGCKEQLVIDSVILKQVQQKKKDLYTTYIDYQKAYDSVPHSWLINILEIYKVHPKLTIFLRNSMNRWTTRLRAQSSNSLIETDPIRIQRGIFQGDALSPLWFCLALNPLSNILNLSDIGYSLHGIETDLQTDILEYKLSHLLYMDDIKLYASSQIDLEHLIQLTEQFSHDIGMKFGIDKCKINSIRAGQNYEHSYDMQSGEVITPLNESEAYKYLGYYQSKQILYKEAKTKLTLNFKHRLNSVLKTQLCSKNTIKAINSYAIPILTYSFGVINWSKKELKDMQRIINVSMTKNRKHHPRACVQRQILPRSEGGRGLIDIQNLHNKQIATLRAYFHTKTESSILHTVIVQNDKKLTPLNLKDVNTQKNEKLTDRQTLINEWTLKSLHGRHRHDLSQPNVDKDASNEWLGRGELFPETEGFMIAIQDQVIETRNYQKHIMKIRNLTTDLCRRCHSSSETIQHITGACKTIAQTDYKHRHDQVANIIHQRLAAKYKLIDISPMVRPTPYYKYIPETVLENDTHKLYFDRAILTDKTTHYNRPDLTLINKINKTALIIDVAIPNTHNLQSTIAEKLNKYIDLKDEITRMWRLKKVSIIPIVISTTGVIPKQLFQSLNLIDLPKHTYALLQKAVILNTCRIVRKFLQTDSSTELLPSSTSDHSLATTGSQLA

SEQ ID NO: 3165 - protein, 791 aa, Hydriomena furcata
MEPMEYESIPIEVFQNVLKATHNWKAPGSDHIHSFWYKKFTSIHPYLYNHVNNFIKHPQAMPLYITSGTTHMIPKDKNDLKNPAKYRPITCLQTLYKVITACLSQLIYNHIDAHNILTEQQKGCRKRSQGCKEQLTVDSVVLKQVQRKKDDLYTVYIDYKKAYDSVPHAWLNKVFEIYKIHPELISFLSETMNKWTTRLYAQTTSNVIETTPIKIRRGIFQGDALSPLWFCLALNPLSNSLNSSDIGCLLDTTQEHDRQTNDSPCKLNHLLYMDDIKMYAATQADLEDIMLITEQFSNDISMQFGIDKCKINSIKEGKIYQHVYHMQSGELIEPLGEHEAYKYLGYQQSKQIHYKEIKTQLKQNFKHRLNAILKTQLHSRNTTKAINSFAIPVLTYSFGIINWTKTELKNLQRLINVTMTKHRKHHPRSGIQRQVLPRLEGGRGIVDIHNLHNRQISTLREYFHTKALTSILHKKITNLDKKITPLNLEDHAKQKNEEQTDRQTLITAWTQKSLHGRHRHDMSQINVDKEASNEWLSRGELFPETEGFMIAIQDQVIETRNYQKHIMKVRSLPSDLCRRCNSSSETIQHITGACKAIVQTDYKFRHDQVANIIHQRLAAKYGLIDVPLRPTPYYKYTPKTVLENESCKLYFDRAILTDRTTHYNRPDITLINKTNKTALIIDIAIPNTHNIQKTIAEKLSKYVDLKDEITRMWRLEKVTIIPIVLSTTGIIPNQLFQSLNLLDLPRHTFALLQKAVILNTCRIVRKFLQTDLPSEMPPSITDVQNTEVHLA

SEQ ID NO: 3166 - protein, 791 aa, Hydriomena furcata
MEPMEYESIPIEVFQNVLKATHNWKAPGSDHIHSFWYKKFTSIHPYLYNHVNNFIKHPQAMPLYITSGTTHMIPKDKNDLKNPAKYRPITCLQTLYKVITACLSQLIYNHIDAHNILTEQQKGCRKRSQGCKEQLTVDSVVLKQVQRKKDDLYTVYIDYKKAYDSVPHAWLNKVLEIYKIHPELISFLSETMNKWTTRLYAQTTSNVIETTPIKIRRGIFQGDALSPLWFCLALNPLSNSLNSSDIGYLLDTTQEHDRQTNDSPCKLNHLLYMDDIKMYAATQADLEDIMLITEQFSNDISMQFGIDKCKINSIKEGKIYQHVYHMQSGELIEPLGEHEAYKYLGYQQSKQIHYKEIKTQLKQNFKHRLNAILKTQLHSRNTTKAINSFAIPVLTYSFGIINWTKTELKNLQRLINVTMTKHRKHHPRSGIQRQVLPRLEGGRGIVDIHNLHNRQISTLREYFHTKALTSILHKKITNLDKKITPLNLEDHAKQKNEEQTDRQTLITAWTQKSLHGRHRHDMSQINVDKEASNEWLSRGELFPETEGFMIAIQDQVIETRNYQKHIMKVRSLPSDLCRRCNSSSETIQHITGACKAIVQTDYKFRHDQVANIIHQRLAAKYGLIDVPLRPTPYYKYTPKTVLENKSCKLYFDRAILTDRTTHYNRPDITLINKTNKTALIIDIAIPNTHNIQKTIAEKLSKYVDLKDEITRMWRLEKVTIIPIVLSTTGIIPNQLFQSLNLLDLPRHTFALLQKAVILNTCRIVRKFLQTDLPSEMPPSITDVQNTEVHLA

SEQ ID NO: 3167 - protein, 1413 aa, Hydriomena furcata
MVFNNNNNNKQCELNRRYNLRPLRRSSRRTSRAGTGELSSTSAADVGVTRLASIEEQGSSQTYWAEKDQDAQSPLSSPTSLFSSIPSSPPSYFHSHSELSSLSPSSSVVEDVVQTTIVDNPAPVQTKRVRRKWTEEMNTFILRTYFIITNLELDTRSYLAELHNQFIEKFPQMDISKQRLGDQRRAIVRNNLLTATCINEIRTEVETHLTKQQHQPENTPTQTPLTHRMNWTTEHNEAIIRAYYKITLLETNKTAYRKPLHLSFINAFPHLSHVSEQRIADQRRVIIANKFISTDRLNTIRQEVADELGSLSLANMDTNNIQTERITEIAYNNDNTLGNAAETQQLMIDLDLPVDINNTQTTLDAVQEIDEAFDQAFKYFNNTHADMRPFIPKQRTSKKLAKVVSYLNEKTLPTCVNIHSDFETLQTSIYCAAWTAAKMNGTKLKLPPEASQGRTQQDPKPKWQIRLERKVNDLRKKIGRLSQYINGSRSRTLNQQVTKILDQYKVHSTHEEPNSNLTHFLDTLKQKLSVTSSRLRRYKTCTNRKTQNSQFTSNEKKFYQNLSKTTSNSVATSTCNNTQNNCNTDTPDPIELRQFWATIWENPVEYRREAEWIEKEQKNHSDMEPMEYESIPIEVFQNVLKATHNWKAPGSDHIHSFWYKKFTSIHPYLYNHVNNFIKHPQAMPLYITSGTTHMIPKDKNDLKNPAKYRPITCLQTLYKVITACLSQLIYNHIDAHNILTEQQKGCRKRSQGCKEQLTVDSVVLKQVQRKKDDLYTVYIDYKKAYDSVPHAWLNKVLEIYKIHPELISFLSETMNKWTTRLYAQTTSNVIETTPIKIRRGIFQGDALSPLWFCLALNPLSNSLNSSDIGYLLDTTQEHDRQTNDSPCKLNHLLYMDDIKMYAATQADLEDIMLITEQFSNDISMQFGIDKCKINSIKEGKIYQHVYHMQSGELIEPLGEHEAYKYLGYQQSKQIHYKEIKTQLKQNFKHRLNAILKTQLHSRNTTKAINSFAIPVLTYSFGIINWTKTELKNLQRLINVTMTKHRKHHPRSGIQRQVLPRLEGGRGIVDIHNLHNRQISTLREYFHTKALTSILHKKITNLDKKITPLNLEDHAKQKNEEQTDRQTLITAWTQKSLHGRHRHDMSQINVDKEASNEWLSRGELFPETEGFMIAIQDQVIETRNYQKHIMKVRSLPSDLCRRCNSSSETIQHITGACKAIVQTDYKFRHDQVANIIHQRLAAKYGLIDVPLRPTPYYKYTPKTVLENKSCKLYFDRAILTDRTTHYNRPDITLINKTNKTALIIDIAIPNTHNIQKTIAEKLSKYVDLKDEITRMWRLEKVTIIPIVLSTTGIIPNQLFQSLNLLDLPRHTFALLQKAVILNTCRIVRKFLQTDLPSEMPPSITDVQNTEVHLA

SEQ ID NO: 3168 - protein, 1451 aa, Hydriomena furcata
MMEPSKNVRIWSLPGGDRRGTSGADAGRYSMQAIGGEGNGRPSAGEPEQCELNRRYNLRPLRRSSRRTSRAGTGELSSTSAADVGVTRLASIEEQGSSQTYWAEKDQDAQSLLSSPTSLFSSIPSSPPSYFHSHSELSSLSPSSSVVEDVVQTTIVDNPAPVQTKRVRRKWTEEMNTFILRTYFIITNLELDTRSYLAELHNQFIEKFPQMDISKQRLGDQRRAIVRNNLLTATCINEIRTEVEAHLTKQQHQPENTPTQTPLTHRMNWTTEHNEAIIRAYYKITLLETNKTAYRKPLHLSFINAFPHLSHVSEQRIADQRRVIIANKFISTDRLNTIRQEVADELGSLSLANMDTNNIQTERITEIAYNNDNTLGNAAETQQLMIDLDLPVDINNTQTTLDAVQEIDEAFDQAFKYFNNTHADMRPFIPKQRTSKKLAKVVSYLNEKTLPTCVNIHSDFETLQTSIYCAAWTAAKMNGSKLKLPPEASQGRTQQDPKPKWQIRLERKVDDLRKKIGRLSQYINGSRSRTLNQQVTKILDQYKVHSTHEEPNSNLTHFLDTLKQKLSVTSSRLRRYKTCTNRKTQNSQFTSNEKKFYQNLSKTTSNSVAPSTCNNTQNNCNTDTPDPIELRQFWATIWENPVEYRREAEWIEKEQKNHSDMEPMEYESIPIEVFQNVLKATHNWKSPGSDHIHSFWYKKFTSIHPYLYNHVNNFIKHPQAMPLYITSGTTHMIPKDKNDLKNPAKYRPITCLQTLYKVITACLSQLIYNHIDAHNILTEQQKGCRKRSQGCKEQLTVDSVVLKQVQRKKDDLYTVYIDYKKAYDSVPHIWLNKVLEIYKIHPELISFLSETMNKWTTRLYAQTTSNVIETTPIKIRRGIFQGDALSPLWFCLALNPLSNSLNSSDIGYLLDTTQEHDRQTNDSPCKLNHLLYMDDIKMYAATQADLEDIMLITEQFSNDISMQFGIDKCKINSIKEGKIYQHVYHMQSGELIEPLGEHEAYKYLGYQQSKQIHYKEIKTQLKQNFKHRLNAILKTQLHSRNTTKAINSFAIPVLTYSFGIINWTKTELKNLQRLINVTMTKHRKHHPRSGIQRQVLPRLEGGRGIVDIHNLHNRQISTLREYFHTKALTSILHKKITNLDKKITPLNLEDHAKQKNEEQTDRQTLITAWTQKSLHGRHRHDMSQINVDKEASNEWLSRGELFPETEGFMIAIQDQVIETRNYQKHIMKVRSLPSDLCRRCNSSSETIQHITGACKAIVQTDYKFRHDQVANIIHQRLAAKYGLIDVPLRPTPYYKYTPKTVLENESCKLYFDRAILTDRTTHYNRPDITLINKTNKTALIIDIAIPNTHNIQKTIAEKLSKYVDLKDEITRMWRLEKVTIIPIVLSTTGIIPNQLFQSLNLLDLPRHTFALLQKAVILNTCRIVRKFLQTDLPSEMPPSITDVQNTEVHLA

SEQ ID NO: 3169 - protein, 1453 aa, Hydriomena furcata
MMEPSKNVRIWSLPGGDRRGTSGADAGRYSMQAIGGEGNGRPSAGEPEQCELNRRYNLRPLRRSSRRTSRAGTGELSSTSAADVGVTRLASIEEQGSSQTYWAEKDQDAQSLLSSPTSLFSSIPSSPPSYFHSHSELSSLSPSSSVVEDVVQTTIVDNPAPVQTKRVRRKWTEEMNTFILRTYFIITNLELDTRSYLAELHNQFIEKFPQMDISKQRLGDQRRAIVRNNLLTAICINEIRTEVEAHLTKQQHQPENTPTQTPLTHRMNWTTEHNEAIIRAYYKITLLETNKTAYRKPLHLSFINAFPHLSHVSEQRIADQRRVIIANKFISTDRLNTIRQEVADELGSLSLANMDTNNIQTERITEIAYNNDNTLGNAAETQQLMIDLDLPVDINNTQTTLDAVQEIDEAFDQAFKYFNNTHADMRPFIPKQRTSKKLAKVVSYLNEKTLPTCVNIHSDFETLQTSIYCAAWTAAKMNGTKLKLPPEASQGRTQQDPKPKWQIRLERKVDDLRKKIGRLSQYINGSRSRTLNQQVTKILDQYKVHSTHEEPNSNLTHFLDTLKQKLSVTSSRLRRYKTCTNRKTQNSQFTSNEKKFYQNLSKTTSNSVAPSTCNNTQNNCNTDTPDPIELRQFWATIWENPVEYRREAEWIEKEQKNHSDMEPMEYESIPIEVFQNVLKATHNWKAPGSDHIHSFWYKKFTSIHPYLYNHVNNFIKHPQAMPLYITSGTTHMIPKDKKDLKNPAKYRPITCLQTLYKVITACLSQLIYNHIDAHNILTEQQKGCRKRSQGCKEQLTVDSVVLKQVQRKKDDLYTVYIDYKKAYDSVPHAWLNKVLEIYKIHPELISFLSETMNKWTTRLYAQTTSNVIETTPIKIRRGIFQGDALSPLWFCLALNPLSNSLNSSDIGYLLDTTQEHDRQTDTNDSPCKLNHLLYMDDIKMYAATQADLEDIMLITEQFSNDISMQFGIDKCKINSIKEGKIYQHVYHMQSGELIEPLGEHETYKYLGYQQSKQIHYKEIKTQLKQNFKHRLNAILKTQLHSRNTTKAINSFAIPVLTYSFGIINWTKTELKNLQRLINVTMTKHRKHHPRSGIQRQVLPRLEGGRGIVDIHNLHNRQISTLREYFHTKALTSILHKKITNLDKKITPLNLEDHAKQKNEEQTDRQTLITAWTQKSLHGRHRHDMSQINVDKEASNEWLSRGELFPETEGFMIAIQDQVIETRNYQKHIMKVRSLPSDLCRRCNSSSETIQHITGACKAIVQTDYKFRHDQVANIIHQRLAAKYGLIDVPLRPTPYYKYTPKTVLENESCKLYFDRAILTDRTTHYNRPDITLINKTNKTALIIDIAIPNTHNIQKTIAEKLSKYVDLKDEITRMWRLEKVTIIPIVLSTTGIIPNQLFQSLNLLDLPRHTFALLQKAVILNTCRIVRKFLQTDLPSEMPPSITDVQNTEGHLA

SEQ ID NO: 3170 - protein, 1410 aa, Idaea aversata
METRLRKKVRIGSLPGGDRRGALGADAECLSMQTVSGSGLSRRAPAGYPEEDDSRPTSSLSSTHSLFPSLPSSPPSYLNYDSNRFSPNSIHSSPISSIAENVVHSTNVENTAPVEAVKTARKKWTEEMNTFILRTYFVLTTLETDTSSYLTELHNKFIENFPEMQVSKQRIGDQRRAIIRKNLLPAEKVTEIKKEVELQLNQSNPSHQNVTNTQHTHTTLNSNAQPLRRMKWSTQYNEAIIRIYYRITQLETDKTNYRKPLHEQFIALYPDLAQISEQRVADQRRLIIANRYISNSRLDRIRQEVAAELEISNNSMHDTSEITNTPETTEPLNINNEQESISHINQDVNEININPTEIENRETEIDNIFSESVNYFSNINPDKRPFIPKQKTSKKFSKIVDYINRICLAETLNMETDFETLQTVIYSAAWTAAKLNGAKITIPSITTESRHQNIPKPRWQKRLERKVEDLRTKIGKLTHYIAGNRSRKLNKDVDQILQQYKTHTTHEQPNTNLSHFLDTLKQKLIVKSSRLRRYKECTQRKKQNNQFANNEKKFYQNLNNLTNNQTQPTIVDNNNPIPQAEELRQFWANIWENPVTHNKESDWIKLESIANSDLPPMENQNIPVDVFHKVIRSLHNWKTPGSDNIHNYWYKKFTHIQPLLYHHINNFISHPELLPTYITSGVTFMIPKDFNNLSNPAQYRPITCLQTIYKIITACISHLIYQHINNNQILAEEQKGCRKFSQGCKEQLLIDSVVLKQVQQQKRDLYTMYIDYRKAYDSIPHSWLLDILHIYKINPQIISFLSSSMTNWMTRLCLRAPVNSSVPSVETDPIKIQRGIFQGDSLSPLWFCLALNPLSNRLNSSNNGYTLENNSNTDVYDQTDSSFKLNHLLYMDDIKLYASTQDQLEELATISETFSSDICMQFGIDKCKINSVKSGQSYRHDYSLQTGEIINSLDNSDTYKYLGYQQSKLIHYRETKNNLRIKFKHRLNSVLKTQLNSRNTVKAINSYAIPILTYSFGVVNWTKGELKTLQRTINVTMTKNRKHHPRACVQRQVLPRAIGGRGIIYVTNLHNRQITTLRTYFHNKAETSILHKKVADSDRRYTPLNMADRRKQTNEEQVDNQALINQWAQKSLHGRHHHDLCQPNVDKQASNEWLSRGELFPETEGFMIAIQDQVIETRNYKKYIIKVNNLPTDMCRKCNSNSETIQHITGACKSIAQTDYKFRHDQVANIIHQKLAYKYKLLPDTPKPIPYYKYNPEIVLENSSYKMYFDRAILTDKTTHFNRPDITVVNKLNKTAIIIDIAIPNTHNLQSTISEKLTKYIDLKEEITRMWRLQKVSIVPIVLSSTGVIPKQLFQSLALLDLPKHTFIQLQKSVILNTCRIVRKFLQTESPTSSSTTQNLPTDVTGNHLA

SEQ ID NO: 3171 - protein, 1410 aa, Idaea aversata
METRLRKKVRIGSLPGGDRRGALGADAECLSMQTVSGSGLSRRAPAGYPEEDDSRPTSSLSSTHSLFPSLPSSPPSYLNYDSNRFSPNSIHSSPISSIAENVVHSTNVENTAPVEAVKTARKKWTEEMNTFILRTYFVLTTLETDTSSYLTELHNKFVENFPEMQVSKQRIGDQRRAIIRKNLLPAEKVTEIKKEVELQLNQSNPSHQNVTNTQHTHTTLNSNAQPLRRMKWSTQYNEAIIRIYYRITQLETDKTNYRKPLHEQFIALYPDLAQISEQRVADQRRLIIANRYISTSRLDSIRQEVAAELEISNNSMHDTSEITNTPETTEPLNINNEQESISHINQDVNEININPTEIENRETEIDNIFSESVNYFSNINPDKRPFIPKQKTSKKFSKIVDYINRICLAETLNMETDFETLQTVIYSAAWTAAKLNGAKITIPSITTESRHQNSPKPRWQKRLERKVEDLRTKIGKLTHYIAGNRSRKLNKDVDQILQQYKTHTTHEQPNTNLSHFLDTLKQKLIVKSSRLRRYKECTQRKKQNNQFANNEKKFYQNLNNLTNNQTQPTIVDNNNPIPQAEELRQFWANIWENPVTHNKESDWIKLESIANSDLPPMENQNIPVDVFHKVIRSLHNWKTPGSDNIHNYWYKKFTHIQPLLYHHINNFISHPELLPTYITSGVTFMIPKDFNNLSNPAQYRPITCLQTIYKIITACISHLIYQHINNNQILAEEQKGCRKFSQGCKEQLLIDSVVLKQVQQQKRDLYTMYIDYRKAYDSIPHSWLLDILHIYKINPQIISFLSSSMTNWMTRLCLRAPVNSSVPSVETDPIKIQRGIFQGDSLSPLWFCLALNPLSNRLNSSNNGYTLENNSNTDVYDQTDSSFKLNHLLYMDDIKLYASTQDQLEELATISETFSSDICMQFGIDKCKINSVKSGQSYRHDYSLQTGEIINSLDNSDTYKYLGYQQSKLIHYRETKNNLRIKFKHRLNSVLKTQLNSRNTVKAINSYAIPILTYSFGVVNWTKGELKTLQRTINVTMTKNRKHHPRACVQRQVLPRAIGGRGIIDVTNLHNRQITTLRTYFHNKAETSILHKKVADSDRRYTPLNMADRRKQTNEEQVDNQALINQWAQKSLHGRHHHDLCQPNVDKQASNEWLSRGELFPETEGFMIAIQDQVIETRNYKKYIIKVNNLPTDMCRKCNSNSETIQHITGACKSIAQTDYKFRHDQVAYIIHQKLAYKYKLLPDTPKPIPYYKYNPEIVLENSSYKMYFDRAILTDKTTHFNRPDITVVNKLNKSAIIIDIAIPNTHNLQSTISEKLTKYIDLKEEITRMWRLQKVSIVPIVLSSTGVIPKQLFQSLALLDLPKHTFIQLQKSVILNTCRIVRKFLQTESPTSSSTTQNLPTDVTGNHLA

SEQ ID NO: 3172 - protein, 1410 aa, Idaea aversata
METRLRKKVRIGSLPGGDRRGALGADAECLSMQTVSGSGLSRRAPAGYPEEDDSRPTSSLSSTHSLFPSLPSSPPSYLNYDSNRFSPNSIHSSPISSIAENVVHSTNVENTAPVEAVKTARKKWTEEMNTFILRTYFVLTTLETDTSSYLTELHNKFIENFPEMQVSKQRIGDQRRAIIRKNLLPAEKVTEIKKEVELQLNQSNPSHQNVTNTQHTHTTLNSNAQPLRRMKWSTQYNEAIIRIYYRITQLETDKTNYRKPLHEQFIALYPDLAQISEQRVADQRRLIIANRYISNSRLDRIRQEVAAELEISNNSMHDTSEITNTPETTEPLNINNEQESISHINQDVNEININPTEIENRETEIDNIFSESVNYFSNINPDKRPFIPKQKTSKKFSKIVDYINRICLAETLNMETDFETLQTVIYSAAWTAAKLNGAKITIPSITTESRHQNSPKPRWQKRLERKVEDLRTKIGKLTHYIAGNRSRKLNKDVDQILQQYKTHTTHEQPNTNLSHFLDTLKQKLIVKSSRLRRYKECTQRKKQNNQFANNEKKFYQNLNNLTNNQTQPTIVDNNNPIPQAEELRQFWANIWENPVTHNKESDWIKLESIANSDLPPMENQNIPVDVFHKVIRSLHNWKTPGSDNIHNYWYKKFTHIQPLLYHHINNFISHPELLPTYITSGVTFMIPKDFNNLSNPAQYRPITCLQTIYKIITACISHLIYQHINNNQILAEEQKGCRKFSQGCKEQLLIDSVVLKQVQQQKRDLYTMYIDYRKAYDSIPHSWLLDILHIYKINPQIISFLSSSMTNWMTRLCLRAPVNSSVPSVETDPIKIQRGIFQGDSLSPLWFCLALNPLSNRLNSSNNGYTLENNSNTDVYDQTDSSFKLNHLLYMDDIKLYASTQDQLEELATISETFSSDICMQFGIDKCKINSVKSGQSYRHDYSLQTGEIINSLDNSDTYKYLGYQQSKLIHYRETKNNLRIKFKHRLNSVLKTQLNSRNTVKAINSYAIPILTYSFGVVNWTKGELKTLQRTINVTMTKNRKHHPRACVQRQVLPRAIGGRGIIDVTNLHNRQITTLRTYFHNKAETSILHKKVADSDRRYTPLNMADRRKQTNEEQVDNQALINQWAQKSLHGRHHHDLCQPNVDKQASNEWLSRGELFPETEGFMIAIQDQVIETRNYKKYIIKVNNLPTDMCRKCNSNSETIQHITGACKSIAQTDYKFRHDQVANIIHQKLAYKYKLLPDTPKPIPYYKYNPEIVLENSSYKMYFDRAILTDKTTHFNRPDITVVNKLNKTAIIIDIAIPNTHNLQSTISEKLTKYIDLKEEITRMWRLQKVSIVPIVLSSTGVIPKQLFQSLALLDLPKHTFIQLQKSVILNTCRIVRKFLQTESPTSSSTTQNLPTDVTGNHLA

SEQ ID NO: 3173 - protein, 1410 aa, Idaea aversata
METRLRKKVRIGSLPGGDRRGALGADAECLSMQTVSGSGLSRRAPAGYPEEDDSRPTSSLSSTHSLFPSLPSSPPSYLNYDSNRFSPNSIHSSPISSIAENVVHSTNVENTAPVEAVKTARKKWTEEMNTFILRTYFVLTTLETDTSSYLTELHNKFVENFPEMQVSKQRIGDQRRAIIRKNLLPAEKVTEIKKEVELQLNQSNPSHQNVTNTQHTHTTLNSNAQPLRRMKWSTQYNEAIIRIYYRITQLETDKTNYRKPLHEQFIALYPDLAQISEQRVADQRRLIIANRYISTSRLDSIRQEVAAELEISNNSMHDTSEITNTPETTEPLNINNEQESISHINQDVNEININPTEIENRETEIDNIFSESVNYFSNINPDKRPFIPKQKTSKKFSKIVDYINRICLAETLNMETDFETLQTVIYSAAWTAAKLNGAKITIPSITTESRHQNSPKPRWQKRLERKVEDLRTKIGKLTHYIAGNRSRKLNKDVDQILQQYKTHTTHEQPNTNLSHFLDTLKQKLIVKSSRLRRYKECTQRKKQNNQFANNEKKFYQNLNNLTNNQTQPTIVDNNNPIPQAEELRQFWANIWENPVTHNKESDWIKLESIANSDLPPMENQNIPVDVFHKVIRSLHNWKTPGSDNIHNYWYKKFTHIQPLLYHHINNFISHPELLPTYITSGVTFMIPKDFNNLSNPAQYRPITCLQTIYKIITACISHLIYQHINNNQILAEEQKGCRKFSQGCKEQLLIDSVVLKQVQQQKRDLYTMYIDYRKAYDSIPHSWLLDILHIYKINPQIISFLSSSMTNWMTRLCLRAPVNSSVPSVETDPIKIQRGIFQGDSLSPLWFCLALNPLSNRLNSSNNGYTLENNSNTDVYDQTDSSFKLNHLLYMDDIKLYASTQDQLEELATISETFSSDICMQFGIDKCKINSVKSGQSYRHDYSLQTGEIINSLDNSDTYKYLGYQQSKLIHYRETKNNLRIKFKHRLNSVLKTQLNSRNTVKAINSYAIPILTYSFGVVNWTKGELKTLQRTINVTMTKNRKHHPRACVQRQVLPRAIGGRGIIDVTNLHNRQITTLRTYFHNKAETSILHKKVADSDRRYTPLNMADRRKQTNEEQVDNQALINQWAQKSLHGRHHHDLCQPNVDKQASNEWLSRGELFPETEGFMIAIQDQVIETRNYKKYIIKVNNLPTDMCRKCNSNSETIQHITGACKSIAQTDYKFRHDQVANIIHQKLAYKYKLLPDTPKPIPYYKYNPEIVLENSSYKMYFDRAILTDKTTHFNRPDITVVNKLNKSAIIIDIAIPNTHNLQSTISEKLTKYIDLKEEITRMWRLQKVSIVPIVLSSTGVIPKQLFQSLALLDLPKHTFIQLQISVILNTCRIVRKFLQTESPTSSSTTQNLPTDVTGNHLA

SEQ ID NO: 3174 - protein, 1072 aa, Abisara bifasciata
MAPHIFPNNMHSENNITTCTNITYVPQEIIQEIDTTFRQALVYFENIDPEERPFIPKQRSTKNLAKVVNYLNDISLRTIVNNDTDFDRLQTAIYCAAWTAAKFNGTKLQIPPNDSHTHLQHKFTPKWQVRLERKVDDLRKNIARLTQYIQGSGSRNLTRHINKIIQLNKIHSAHEEHNTNLTHFLDTLKQKLSVTSSRLRRYKACTYRKSQNTQFNTNEKKFYQNLSKNTTNSTIAQSTIYNTETNSSNTLNPTELRQYWANLWENPKEYREEADWIKKEQTITSHVADMEYEGIPVEIFQNVLGLTHNWKSPGSDHIHSYWYKKFTHVHPYIYNHINNFIRHPHLMPQFITSGRTHMIPKDNNDMSDPAKYRPITCLQTFYKILTACLARLIYNHIDTHAILSEQQKGCKKFSQGCKEQLVIDSVILKQVQRKKEDLYTVYIDYKKAYDSVPHTWLTRILQIYKVHPDIVSFLQTAMTSWKTQLYAQTGNNSLIKTGPIKIQRGIFQGDALSPLWFCLALNPLSNSINSTGIGYELRLCEPTDSPSRINHLLYMDDIKLYATNQTDLDTLISITEEFSYDISMQFGIDKCKINSIKSGHIFQHQYEMQDGAVILPLDEHESYKYLGYNQSNLIHFKEIKNKLRQNFKHRLNSILKSQLYSKNTIKAINSYAIPILTYSFGIINWTKLELTNLQRLINVTMKKYRKHHPRACVQRQLLPRSDGGRGLINIRNLHNKQISTLRKYFYGKSESSPIHRAIVNLDQKLTPLNLLDREKQRNEEQIERNTLIAEWNQKSLHGRHHHDLNLLNVDKTASNEWLIRGELFPETEGFMIAIQDQVVDTRNYQKFITKVRNSGTDLCRRCNSASETIQHITGACRAIVQTDYKYRHDQVVNIIHQRLALKYKLIDASVRPKPYYKYTPEVVLENRTHKLYFDRAILTDKTIHYNRPDLTLINKINKTALIIDIAIPNTHNIQNTITEKLSKYIELKDEITRMWRLDKVTIVPIVLSTTGIIPKQIFQSLSLLDLPKHSYALLQKAVILNTCRIVRKFLQIDTPSNTFSTISPTLNEVRLA

SEQ ID NO: 3175 - protein, 1680 aa, Enchytraeus crypticus
MPNCAGRPFEPCPQARNDSSVKFSLCDLYLCPDCLEYRWPTSRNNETNTSKPYLIQANSKLYIEPVSNVNCLSQGTASVRRNKVSSFQDCSSVSPDSLPAVKHRTSGACSVCFSIHQICKETGAIRVHGKMSNRCPGSHFPPRPESILSLPIQDVNKNPHSTRISASPPEPILEPSSPLLNATSLLLHPTLPYNTIKHIPKAARPSCAKSLANILNKISNCPRDINDWSHLFNFGKDVLIAPPRAGKRMNLSNAIKKRSELFDCRKETALPKYKFNRSPGNSDKLYSLIRSKIEDGNMRAAVRLLCSDDAPAADNPDTLQNLKDKHPILSEVLPPAPDPFTTQSFQASENGILNAVRSFPAGSSAGPDGIRPQHILDLINDRVSGPILLPALTSFTNTLLNGECPDPIRKLLFGGRLIAIGKKDGGVRPIAIGYTWRRIAAKCANAHVSSKVASFLSPIQVGVGVSGGCEATVHAVRRFLTSLPEKFSVVKLDFKNAFNNVNRFQMLQEVYKYIPEIYKFCYSSYSATSHLKYNDHIIESMVGVQQGDPLGPLLFSLTIHPLLKSLICPLRVAYLDDVTLGGSEDSLSHDICNIMENGKVLGLELNLNKCEIVSPCPQTIRHPILQSFKMIPQDESSLLGAPLSFGIAMDKSLSTKIVDLELASSRLPLISRHDALTILRYSLSISKMLYTLRSSPCFNHPALIAFDNKLKECLSTMSNIALSDTQWSQATLPVKKGGLGIRQTSHVAPSAFISSYISTRPLQDSILGHFSSYHDVNFDLALSLWSERYNAVAPTGDKDKMQKFWDAAAIEKCFEQILNFQSDASDRARLLAVSSPRSSDWLHAFPISSCGLHLDDESVRVAIGFRLGARLCEPHTCPCGSIVDSRGIHSLSCKRSAGRASRHHNLNDIVWRALTKASIPSIKEPPGLFRSDGKRPDGLTLIPWQKGKCLAWDVTVSDTLANSYLHVTSSSAGGAAELAARRKLEKYKDLPSVYDFMPIAIETFGPTNEAASEFINILGRKISDITDDNRETSFLRQRISMALQRFNAVCFRGSFSHSDDPASEDNVNPTTSHGLPVSIATAAMTIILADAPDGTMPSDFDSISSSCLFNPLTAPLETSEPFNGAHPLLSSISNDASSYDLEVVGSNEKDRNDVVAYNTDSFNSAATVTKRSRRGSRRSVLDLTIVEAKAMCGEMDNSSSRQLRKRKPHPESNVNRIYETHDMRKQKPTKAMNFIVTDPKTNEGPEGKILENSSAEKSSFSAIKSSESSKILMYVHSFLLEYRNSVAISPLINLSYIPGISYVKDLHGFTGSTLDTPGKPLHCSASHNHQIANGVSWVAGLKKKKVEVLIGTAICPRSAEICVLGGKSQTNFKRRVLSPEVPKLFEPLNIDDIALPRCSTSSIGNMSLYKPSAIAYEVSYDVDLLMLTSRVLCSGSVSPVLNCSFASVQNFHHIALPSHHGRQTLHMKQKKKMQSWRPQIQRVLHFNLQKQQQHQSFDRQHIGFSVSSPGSSGSLPPTHSSTHKPLRGAGPQLSSLATASVDSPVRCPKFRGHQPQNPISSPAGLTPQVLLRPDTDTSQPPQDGYVQPTADLLSPFYVNHPFSLEINALIQPLGRAQSAPTRSDQQLFGLPLLHQQQPHAAGMRRERSSQLIGGEQFSMISELVKSETGGRSECRSADIT

SEQ ID NO: 3176 - protein, 1680 aa, Enchytraeus crypticus
MPNCAGRPFEPCPQARNDSSVKFSLCDLYLCPDCLEYRWPTSRNNETNTSKPYLIQANSKLYIEPVSNVNCLSQGTASVRRNKVSSFQDCSSVSPDSLPAVKHRTSGACSVCFSIHQICKETGAIRVHGKMSNRCPGSHFPPRPESILSLPIQDVNKNPHSTRISASPPEPILEPSSPLHNATSLLLHPTLPYNTIKHIPKAARPSCAKSLANILNKISNCPRDINDWSHLFNFGKDVLIAPPRAGKRMNLSNAIKKRSELFDCRKETALPKYKFNRSPGNSDKLYSLIRSKIEDGNMRAAVRLLCSDDAPAADNPDTLQNLKDKHPILSEVLPPAPDPFTTQSFQASENGILNAVRSFPAGSSAGPDGIRPQHILDLINDRVSGPILLPALTSFTNTLLNGECPDPIRKLLFGGRLIAIGKKDGGVRPIAIGYTWRRIAAKCANAHVSSKVASFLSPIQVGVGVSGGCEATVHAVRRFLTSLPEKFSVVKLDFKNAFNNVNRFQMLQEVYKYIPEIYKFCYSSYSATSHLKYNDHIIESMVGVQQGDPLGPLLFSLTIHPLLKSLICPLRVAYLDDVTLGGSEDSLSHDICNIMENGKVLGLELNLNKCEIVSPCPQTIRHPILQSFKMIPQDESSLLGAPLSFGIAMDKSLSTKIVDLELASSRLPLISRHDALTILRYSLSISKMLYTLRSSPCFNHPALIAFDNKLKECLSTMSNIALSDTQWSQATLPVKKGGLGIRQTSHVAPSAFISSYISTRPLQDSILGHFSSYHDVNFDLALSLWSERYNAVAPTGDKDKMQKFWDAAAIEKCFEQILNFQSDASDRARLLAVSSPRSSDWLHAFPISSCGLHLDDESVRVAIGFRLGARLCEPHTCPCGSIVDSRGIHSLLCKRSAGRASRHHNLNDIVWRALTKASIPSIKEPPGLFRSDGKRPDGLTLIPWQKGKCLAWDVTVSDTLANSYLHVTSSSAGGAAELAARRKLEKYKDLPSVYDFMPIAIETFGPTNEAASEFINILGRKISDITDDNRETSFLRQRISMALQRFNAVCFRGSFSHSDDPASEDNVNPTTSHGLPVSIATAAMTIILADAPDGTMPSDFDSISSSCLFNPLTAPLETSEPFNGAHPLLSSISNDASSYDLEVVGSNEKDRNDVVAYNTDSFNSAATVTKRSRRGSRRSVLDLTIVEAKAMCGEMDNSSSRQLRKRKPHPESNVNRIYETHDMRKQKPTKAMNFIVTDPKTNEGPEGKILENSSAEKSSFSAIKSSESSKILMYVHSFLLEYRNSVAISPLINLSYIPGISYVKDLYGFTGSTLDTPGKPLHCSASHNHQIANGVSWVAGLKKKKVEVLIGTAICPRSAEIYVLGGKSQTNFKRRVLSPEVPKLFEPLNIDDIALPRCSTSSIGNMSLYKPSAIAYEVSYDVDLLMLTSRVLCSGSVSPVLNCSFASVQNFHHIALPSHHGRQTLHMKQKKKMQSWRPQIKRVLHFNLQKQQQHQSFDRQHIGFSVSSPGSSGSLPPTHSSTHKPRRGAGPQLSSLATASVDSPVKCPKFRGHQPQNPISSPAGLTPQVLLRPDTDTSQPPQDGYVQPMADLLSPFYVNHPFSLEINALIQPLGRAQSAPTRSDQQLFGLPLLHQQQPHAAGMRRERSSQLIGGEQFSMISELVKSETGGRSECRSADIT

SEQ ID NO: 3177 - protein, 1680 aa, Enchytraeus crypticus
MPNCAGRPFEPCPQARNDSSVKFSLCDLYLCPDCLEYRWPTSRNNETNTSKPYLIQANSKLYIEPVSNVNCLSQGTASVRRNKVSSFQDCSSVSPDSLPAVKHRTSGACSVCFSIHQICKETGAIRVHGKMSNRCPGSHFPPRPESILSLPIQDVNKNPHSTRISASPPEPILEPSSPLHNATSLLLHPTLPYNTIKHIPKAARPSCAKSLANILNKISNCPRDINDWSHLFNFGKDVLIAPPRAGKRMNLSNAIKKRSELFDCRKETALPKYKFNRSPGNSDKLYSLIRSKIEDGNMRAAVRLLCSDDAPAADNPDTLQNLKDKHPILSEVLPPAPDPFTTQSFQASENGILNAVRSFPAGSSAGPDGIRPQHILDLINDRVSGPILLPALTSFTNTLLNGECPDPIRKLLFGGRLIAIGKKDGGVRPIAIGYTWRRIAAKCANAHVSSKVASFLSPIQVGVGVSGGCEATVHAVRRFLTSLPEKFSVVKLDFKNAFNNVNRFQMLQEVYKYIPEIYKFCYSSYSATSHLKYNDHIIESMVGVQQGDPLGPLLFSLTIHPLLKSLICPLRVAYLDDVTLGGSEDSLSHDICNIMENGKVLGLELNLNKCEIVSPCPQTIRHPILQSFKMIPQDESSLLGAPLSFGIAMDKSLSTKIVDLELASSRLPLISRHDALTILRYSLSISKMLYTLRSSPCFNHPALIAFDNKLKECLSTMSNIALSDTQWSQATLPVKKGGLGIRQTSHVAPSAFISSYISTRPLQDSILGHFSSYHDVNFDLALSLWSERYNAVAPTGDKDKMQKFWDAAAIEKCFEQILNFQSDASDRARLLAVSSPRSSDWLHAFPISSCGLHLDDESVRVAIGFRLGARLCEPHTCPCGSIVDSRGIHSLSCKRSAGRASRHHNLNDIVWRALTKASIPSIKEPPGLFRSDGKRPDGLTLIPWQKGKCLAWDVTVSDTLANSYLHVTSSSAGGAAELAARRKLEKYKDLPSVYDFMPIAIETFGPTNEAASEFINILGRKISDITDDNRETSFLRQRISMALQRFNAVCFRGSFSHSDDPASEDNVNPTTSHGLPVSIATAAMTIILADAPDGTMPSDFDSISSSCLFNPLTAPLETSEPFNGAHPLLSSISNDASSYDLEVVGSNEKDRNDVVAYNTDSFNSAATVTKRSRRGSRRSVLDLTIVEAKAMCGEMDNSSSRQLRKRKPHPESNVNRIYETHDMRKQKPTKAMNFIVTDPKTNEGPEGKILENSSAEKSSFSAIKSSESSKILMYVHSFLLEYRNSVAISPLINLSYIPGISYVKDLHGFTGSTLDTPGKPLHCSASHNHQIANGVSWVAGLKKKKVEVLIGTAICPRSAEICVLGGKSQTNFKRRVLSPEVPKLFEPLNIDDIALPRCSTSSIGNMSLYKPSAIAYEVSYDVDLLMLTSRVLCSGSVSPVLNCSFASVQNFHHIALPSHHGRQTLHMKQKKKMQSWRPQIQRVLHFNLQKQQQHQSFDRQHIGFSVSSPGSSGSLPPTHSSTHKPLRGAGPQLSSLATASVDSPVRCPKFRGHQPQNPISSPAGLTPQVLLRPDTDTSQPPQDGYVQPTADLLSPFYVNHPFSLEINALIQPLGRAQSAPTRSDQQLFGLPLLHQQQPHAAGMRRERSSQLIGGEQFSMISELVKSETGGRSECRSADIT

SEQ ID NO: 3178 - protein, 1680 aa, Enchytraeus crypticus
MPNCAGRPFEPCPQARNDSSVKFSLCDLYLCPDCLEYRWPTSRNNETNTSKLYLIQANSKLYIEPVSNVNCLSQGTASVRRNKVSSFQVCSSVSPDSLPAVKHRTSGACSVCFSIHQICKETGAIRVHGTMSNRCPGSHFPPRPESILSLPIQDVNKNPHSPRISASPPEPILEPSSPLHNATSLLLHPTLPYNTIKHVPKAARPSCAKSLANILNKISNCPRDINDWSHLFNFGKDVLIAPPRAGKRMNLSNAIKKRSELFDCRKETALPKYKFNRSPGNSDKLYSLIRSKIEDGNMRAAVRLLCSDDAPAADNLDTLQNLKDKHPILSEVLPPAPDPFTTQSFQASENGILNAVRSFPAGSSAGPDGIRPQHILDLINDRVSGPILLPALASFTNTLLNGECPDPIRKLLFGGRLIAIGKKDGGVRPIAIGYTWRRIAAKCANAHVSSKVASFLSPIQVGVGVSGGCEATVHAVRRFLTSLPEKFSVVKLDFKNAFNNVNRFQMLQEVYKYIPEIYKFCYSSYSATSHLKYNDHIIESMVGVQQGDPLGPLLFSLTIHPLLKSLICPLRVAYLDDVTLGGSEDSLSHDICNIMENGKVLGLELNLNKCEIVSPCPQTIRHPILQSFKMIPQDESSLLGAPLSFGIAMDKSLSTKIVDLELASSRLPLISRHDALTILRYSLSISKMLYTLRSSPCFNHPALIAFDNKLKECLSTMSNIALSDTQWSQATLPVKKGGLGIRQTSHVAPSAFISSYISTRPLQDSILGHFSSYHDVNFDLALSLWSERYNAVAPTGDKDKMQKFWDAAAIEKCFEQILNFQSDASDRARLLAVSSPRSSDWLHAFPISSCGLHLDDESVRVAIGFRLGARLCEPHTCPCGSIVDSRGIHSLSCKRSAGRASRHHNLNDIVWRALTKASIPSIKEPPGLFRSDGKRPDGLTLIPWQKGKCLAWDVTVSDTLANSYLHVTSSSAGGAAELAARRKLEKSKDLPSVYDFMPIAIETFGPTNEAASEFINILGRKISDITDDNRETSFLRQRISMALQRFNAVCFRGSFSHSDDPASEDNVNPTTSHGLPVSIATAAMTIILADAPDGTMPSDFDSISSSCLFNPLTAPLETSEPFNGAHPLLSSISNDASSYDLEVVGSNEKDRNDVVAYNTDSFNSAATVTKRSRRGSRRSVLDLTIVEAKAMCGEMDNSSSRQLRKRKPHPESNVNRIYETHDMRKQKPTKAMNFIVTDPKTNEGPEGKILENSSAEKSSFSAIKSSESSKILMYVHSFLLEYRNSVAISPLINLSYIPGISYVKDLYGFTGSTLDTPGKPLHCSASHNHQIANGVSWVAGLKKKKVEVLIGTAICPRSAEICVLGGKSQTNFKRRVLSPEVPKLFEPLNIDDIALPRCSTSSIGNMSLYKPSAIAYEVSYDVDLLMLTSRVLCSGSVSPVLNCSFASVQNFHHIALPSHHGRQTLHMKQKKKMQSWRPQIQRVLHFNLQKQQQHQSFDRQHIGFSVSSPGSSGSLPPTHSSTHKPLRGAGPQLSSLATASVDSPVRCPKFRGHQPQNPISSPAGLTPQVLLRPDTDTSQPPQDGYVQPTADLLSPFYVNHPFSLEINALIQPLGRAQSAPTRSDQQLFGLPLLHQQQPHAAGMRRERSSQLIGGEQFSMISELVKSETGGRSECRSADIT

SEQ ID NO: 3179 - protein, 1680 aa, Enchytraeus crypticus
MPNCAGRPFEPCPQARNDSSVKFSLCDLYLCPDCLEYRWPTSRNNETNTSKPYLIQANSKLYIEPVSNVNCLSQGTASVRRNKVSSFQDCSSVSPDSLPAVKHRTSGACRVCFSIHQICKETGAIRVHGKMSNRCPGSHFPPRPESILSLPIQDVNKNPHSTRISASPPEPILEPSSPLHNATSLLLHPTLPYNTIKHIPKAARPSCAKSLANILNKISNCPRDINDWSHLFNFGKDVLIAPPRAGKRMNLSNAIKKRSELFDCRKETALPKYKFNRSPGNSDKLYSLIRSKIEDGNMRAAVRLLCSDDAPAADNPDTLQNLKDKHPILSEVLPPAPDPFTTQSFQASENGILNAVRSFPAGSSAGPDGIRPQHILDLINDRVSGPILLPALTSFTNTLLNGECPDPIRKLLFGGRLIAIGKKDGGVRPIAIGYTWRRIAAKCANAHVSSKVASFLSPIQVGVGVSGGCEATVHAVRRFLTSLPEKFSVVKLDFKNAFNNVNRFQMLQEVYKYVPEIYKFCYSSYSATSHLKYNDHIIESMVGVQQGDPLGPLLFSLTIHPLLKSLICPLRVAYLDDVTLGGSEDSLSHDICNIMENGKVLGLELNLNKCEIVSPCPQTIRHPILQSFKMIPQDESSLLGAPLSFGIAMDKSLSTKIVDLELASSRLPLISRHDALTILRYSLSISKMLYTLRSSPCFNHPALIAFDNKLKECLSTMSNIALSDTQWSQATLPVKKGGLGIRQTSHVAPSAFISSYISTRPLQDSILGHFSSYHDVNFDLALSLWSERYNAVAPTGDKDKMQKFWDAAAIEKCFEQILNFQSDASDRARLLAVSSPRSSDWLHAFPISSCGLHLDDESVRVAIGFRLGARLCEPHTCPCGSIVDSRGIHSLSCKRRAGRASRHHNLNDIVWRALTKASIPSIKEPPGLFRSDGKRPDGLTLIPWQKGKCLAWYVTVSDTLANSYLHVTSSSAGGAAELAARRKLEKYKDLPSVYDFMPIAIETFGQTNEAASEFINILGRKISDITDDNRETSFLRQRISMALQRFNAVCFRGSFSHSDDPASEDNVNPTTSHGLPVSIATAAMTIILADAPDGTMPSDFDSISSSCLFNPLTAPLETSEPFNGAHPLLSSISNDASSYDLEVVGSNEKDRNDVVAYNTDSFNSAATVTKRSRRGSRRSVLDLTIVEAKAMCGEMDNSSSRQLRKRKPHPESNVNRIYETHDMRKQKPTKAMNFIVTDPKTNEGPEGKILENSSAEKSSFSAIKSSESSKILMYVHSFLLEYRNSVAISPLINLSYIPGISYVKDLHGFTGSTLDTPGKPLHCSASHNHQIANGVSWVAGMKKKKVEVLIGTAICPRSAEICVLGGKSQTNFKRRVLSPEVPKLFEPLNIDDIALPRCSTSSLGNMSLYKPSAIAYEVSYDVDLLMLTSRVLCSGSVSPVLNCSFASVQNFHHIALPSHHGRQTLHMKQKKKMQSWRPQIQRVLHFNLQKQQQHQSFDRQHIGFSVSSPGSSGPLPPTHSSTHKPLRGAGPQLSSLATASVDSPVRCPKFRGHQPQNPISSPAGLTPQVLLRPDTDTSQPPQDGYVQPTADLLSPFYVNHPFSLEINALIQPLGRAQSAPTRSDQQLFGLPLLHQQQPHAAGMRRERSSQLIGGEQFSMISELVKSETGGRSECRSADIT

SEQ ID NO: 3180 - protein, 1680 aa, Enchytraeus crypticus
MPNCAGRPFEPCPQARNDSSVKFSLCDLYLCPDCLEYRWPTSRNNETNTSKPYLIQANSKLYIEPVSNVNCLSQGTASVRRNKVSSFQDCSSVSPDSLPAVKHRTSGACSVCFSIHQICKETGAIRVHGKMSNRCPGSHFPPRPESILSLPIQDVNKNPHSTRISASPPEPILEPSSPLHNATSLLLHPTLPYNTIKHIPKAARPSCAKSLANILNKTSNCPRDINDWSHLFNFGKDVLIAPPRAGKRMNLSNAIKKRSELFDCRKETALPKYKFNRSPGNSDKLYSLIRSKIEDGNMRAAVRLLCSDDAPAADNPDTLQNLKDKHPILSEVLPPAPDPFTTQSFQASENGILNAVRSFPAGSSAGPDGIRPQHILDLINDRVSGPILLPALTSFTNTLLNGECPDPIRKLLFGGRLIAIGKKDGGVRPIAIGYTWRRIAAKCANAHVSSKVASFLSPIQVGVGVSGGCEATVHAVRRFLTSLPEKFSVVKLDFKNAFNNVNRFQMLQEVYKYIPEIYKFCYSSYSATSHLKYNDHIIESMVGVQQGDPLGPLLFSLTIHPLLKSLICPLRVAYLDDVTLGGSEDSLSHDICNIMENGKVLGLELNLNKCEIVSPCPQTIRHPILQSFKMIPQDESSLLGAPLSFGIAMDKSLSTKIVDLELASSRLPLISRHDALTILRYSLSISKMLYTLRSSPCFNHPALIAFDNKLKECLSTMSNIALSDTQWSQATLPVKKGGLGIRQTSHVAPSAFISSYISTRPLQDSILGHFSSYHDVNFDLALSLWSERYNAVAPTGDKDKMQKFWDAAAIEKCFEQILNFQSDASDRARLLAVSSPRSSDWLHAFPISSCGLHLDDESVRVAIGFRLGARLCEPHTCPCGSIVDSRGIHSLSCKRSAGRASRHHNLNDIVWRALTKASIPSIKEPPGLFRSDGKRPDGLTLIPWQKGKCLAWDVTVSDTLANSYLHVTSSSAGGAAELAARRKLEKYKDLPSVYDFMPIAIETFGPTNEAASEFINILGRKISDITDDNRETSFLRQRISMALQRFNAVCFRGSFSHSDDPASEDNVNPTTSHGLPVSIATAAMTIILADAPDGTMPSDFDSISSSCLFNPLTAPLETSEPFNGAHPLLSSISNDASSYDLEVVGSNEKDRNDVVAYNTDSFNSAATVTKRSRRGSRRSVLDLTIVEAKAMCGEMDNSSSRQLRKRKPHPESNVNRIYETHDMRKQKPTKAMNFIVTDPKTNEGPEGKILENSSAEKSSFSAIKSSESSKILMYVHSFLLEYRNSVAISPLINLSYIPGISYVKDLYGFTGSTLDTPGKPLHCSASHNHQIANGVSWVAGLKKKKVEVLIGTAICPRSAEICVLGGKSQTNFKRRVLSPEVPKLFEPLNIDDIALPRCSTSSIGNMSLYKPSAIAYEVSYDVDLLMLTSRVLCSGSVSPVLNCSFASVQNFHHIALPSHHGRQTLHMKQKKKMQSWRPQIQRVLHFNLQKQQQHQSFDRQHIGFSVSSPGSSGSLPPTHSSTHKPLRGAGPQLSSLATASVDSPVRCPKFRGHQPQNPISSPAGLTPQVLLRPDTDTSQPPQDGYVQPTADLLSPFYVNHPFSLEINALIQPLGRAQSAPTRSDQQLFGLPLLHQQQPHAAGMRRERSSQLIGGEQFSMISELVKSETGGRSECRSADIT

SEQ ID NO: 3181 - protein, 1680 aa, Enchytraeus crypticus
MPNCAGRPFEPCPQARNDSSVKFSLCDLYLCPDCLEYRWPTSRNNETNTSKPYLIQANSKLYIEPVSNVNCLSQGTASVRRNKVSSFQVCSSVSPDSLPAVKHRTSGACSVCFSIHQICKETGAIRVHGKMSNRCPGSHFPPRPESILSLPIQDVNKNPHSTRISASPPEPILEPSSPLHNATSLLLHPTLPYNTIKHIPKAARPSCAKSLANILNKISNCPRDINDWSHLFNFGKDVLIAPPRAGKRMNLSNAIKKRSELFDCRKETALPKYKFNRSPGNSDKLYSLIRSKIEDGNMRAAVRLLCSDDAPAADNPDTLQNLKDKHPILSEVLPPAPDPFTTQSFQASENGILNAVRSFPAGSSAGPDGIRPQHILDLINDRVSGPILLPALTSFTNTLLNGECPDPIRKLLFGGRLIAIGKKDGGVRPIAIGYTWRRIAAKCANAHVSSKVASFLSPIQVGVGVSGGCEATVHAVRRFLTSLPEKFSVVKLDFKNAFNNVNRFQMLQEVYKYIPEIYKFCYSSYSATSHLKYNDHIIESMVGVQQGDPLGPLLFSLTIHPLLKSLICPLRVAYLDDVTLGGSEDSLSHDICNIMENGKVLGPELNLNKCEIVSPCPQTIRHPILQSFKMIPQDESSLLEAPLSFGIAMDKSLSTKIVDLELASSRLPLISRHDALTILRYSLSISKMLYTLRSSPCFNHPALIAFDNKLKECLSTMSNIALSDTQWSQATLPVQKGGLGIRQTSHVAPSAFISSYISTRPLQDSILGHFSSYHDVNFDLALSLWSERYNAVPPTGDKDKMQKFWDAAAIEKCFEQILNFQSDASDRARLLAVSSPRSSDWLHAFPISSCGLHLDDESVRVAIGFRLGARLCEPHTCPCGSIVDSRGIHSLSCKRSAGRASRHHNLNDIVWRALTKASIPSIKEPPGLFRSDGKRPDGLTLIPWQKGKCLAWDVTVSDTLANSYLHVTSSSAGGAAELAARRKLEKYKDLPSVYDFMPIAIETFGPTNEAASEFINILGRKISDITDDNRETSFLRQRISMALQRFNAVCFRGSFSHSDDPASEDNVNPTTSHGLPVSIATAAMTIILADAPDGTMPSDFDSISSSCLFNPLTAPLETSEPFNGAHPLLSSISNDASSYDLEVVGSNEKDRNDVVAYNTDSFNSAATVTKRSRRGSRRSVLDLTIVEAKAMCGEMDNSSSRQLRKRKPHPESNVNRIYETHDMRKQKPTKAMNFIVTDPKTNEGPEGKILENSSAEKSSFSAIKSSESSKILMYVHSFLLEYRNSVAISPLINLSYIPGISYVKDLYGFTGSTLDTPGKPLHCSASHNHQIANGVSWVAGLKKKKVEVLIGTAICPRSAEICVLGGKSQTNFKRRVLSPEVPKLFEPLNIDDIALPRCSTSSIGNMSLYKPSAIAYEVSYDVDLLMLTSRVLCSGSVSPVLNCSFASVQNFHHIALPSHHGRQTLHMKQKKKMQSWRPQIQRVLHFNLQKQQQHQSFDRQHIGFSVSSPGSSGSLPPTHSSTHKPLRGAGPQLSSLATASVDSPVRCPKFRGHQPQNPISSPAGLTPQVLLRPDTDTSQPPQDGYVQPTADLLSPFYVNHPFSLEINALIQPLGRAQSAPTRSDQQLFGLPLLHQQQPHAAGMRRERSSQLIGGEQFSMISELVKSETGGRSECRSADIT

SEQ ID NO: 3182 - protein, 1680 aa, Enchytraeus crypticus
MPNCAGRPFEPCPQARNDSSVKFSLCDLYLCPDCLEDRWPTSRNNETNTSKPYLIQANSKLYIEPVSNVNCLSQGTASVRRNKVSSFQDCSSVSPDSLPAVKHRTSGACSVCFSVHQICKETGAIRVHGKMSNRCPGSHFPPRPESILSLPIQDVNKNPHSTRISASPPEPILEPSSPLHNATSLLLHPTLPYNTIKHIPKAARPSCAKSLANILNKISNCPRDINDWSHLFNFGKDVLIAPPRAGKRMNLSNAIKKRSELFDCRKETALPKYKFNRSPGNSDKLYSLIRSKIEDGNMRAAVRLLCSDDAPAADNPDTLQNLKDKHPILSEVLPPAPDPFTTQSFQASENGILNAVRSFPAGSSAGPDGIRPQHILDLINDRVSGPILLPALTSFTNTLLNGECPDPIRKLLFGGRLIAIGKKDGGVRPIAIGYTWRRIAAKCANAHVSSKVASFLSPIQVGVGVSGGCEATVHAVRRFLTSLPEKFSVVKLDFKNAFNNVNRFQMLQEVYKYIPEIYKFCYSSYSATSHLKYNDHIIESMVGVQQGDPLGPLLFSLTIHPLLKSLICPLRVAYLDDVTLGGSEDSLSHDICNIMENGKVLGLELNLNKCEIVSPCPQTIRHPILQSFKMIPQDESSLLGAPLSFGIAMDKSLSTKIVDLELASSRLPLISRHDALTILRYSLSISKMLYTLRSSPCFNHPALIAFDNKLKECLSTMSNIALSDTQWSQATLPVKKGGLGIRQTSHVAPSAFISSYISTRPLQDSILGHFSSYHDVNFDLALSLWSERYNAVAPTGDKDKMQKFWDAAAIEKCFEQILNFQSDASDRARLLAVSSPRSSDWLHAFPISSCGLHLDDESVRVAIGFRLGARLCEPHTCPCGSIVDSRGIHSLSCKRSAGRASRHHNLNDIVWRALTKASIPSIKEPPGLFRSDGKRPDGLTLIPWQKGKCLAWDVTVSDTLANSYLHVTSSSAGGAAELAARRKLEKYKDLPSVYDFMPIAIETFGPTNEAASEFINILGRKISDITDDNRETSFLRQRISMALQRFNAVCFRGSFSHSDDPASEDNVNPTTSHGLPVSIATAAMTIILADAPDGTMPSDFDSISSSCLFNPLTAPLETSEPFNGAHPLLSSISNDASSYDLEVVGSNEKDRNDVVAYNTDSFNSAATVTKRSRRGSRRSVLDLTIVEAKAMCGEMDNSSSRQLRKRKPHPESNVNRIYETHDMRKQKPTKAMNFIVTDPKTNEGPEGKILENSSAEKSSFSAIKSSESSKILMYVHSFLLEYRNSVAISPLINLSYIPGISYVKDLYGFTGSTLDTPGKPLHCSASHNHQIANGVSWVAGLKKKKVEVLIGTAICPRSAEICVLGGKSQTNFKRRVLSPEVPKLFEPLNIDDIALPRCSTSSIGNMSLYKPSAIAYEVSYDVDLLMLTSRVLCSGSVSPVLNCSFASVQNFHHIALPSHHGRQTLHMKQKKKMQSWRPQIQRVLHFNLQKQQQHQSFDRQHIGFSVSSPGSSGSLPPTHSSTHKPLRGAGPQLSSLATASVDSPVRCPKFRGHQPQNPISSPAGLTPQVLLRPDTDTSQPPQDGYVQPTADLLSPFYVNHPFSLEINALIQPLGRAQSAPTRSDQQLFGLPLLHQQQPHAAGMRRERSSQLIGGEQFSMISELVKSETGGRSECRSADIT

SEQ ID NO: 3183 - protein, 1550 aa, Enchytraeus crypticus
MSNRCPGSHFPPRPESILSLPIQDVNKNPHSTRISASPPEPILEPSSPLHNATSLLLHPTLPYNTIKHIPKAARPSCAKSLANILNKISNCPRDINDWSHLFNFGKDVLIAPPRAGKRMNLSNAIKKRSELFDCRKETALPKYKFNRSPGNTDKLYSLIRSKIEDGNMRAAVRLLCSDDAPAADNPDTLQNLKDKHPIPSEVLPPAPDPFTTQSFQASENGILNAVRSFPAGSSAGPDGIRPQHILDLINDRVSGPILLPALTSFTNTLLNGECPDPIRKLLFGGRLIAIGKKDGGVRPIAIGYTWRRIAAKCANAHVSSKVASFLSPIQVGVGVSGGCEATVHAVRRFLTSLPEKFSVVKLDFKNAFNNVNRFQMLQEVYKYIPEIYKFCYSSYSATSHLKYNDHIIESMVGVQQGDPLGPLLFSLTIHPLLKSLICPLRVAYLDDVTLGGSEDSLSHDICNIMENGKVLGLELNLNKCEIVSPCPQTIRHPILQSFKMIPQDESSLLGAPLSFGIAMDKSLSTKIVDLELASSRLPLISRHDALTILRYSLSISKMLYTLRSSPCFNHPALIAFDNKLKECLSTMSNIALSDTQWSQATLPVKKGGLGIRQTSHVAPSAFISSYISTRPLQDSILGHFSSYHDVNFDLALSLWSERYNAVAPTGDKDKMQKFWDAAAIEKCFEQILNFQSDASDRARLLAVSSPRSSDWLHAFPISSCGLHLDDESVRVAIGFRLGARLCEPHTCPCGSIVDSRGIHSLSCKRSAGRASRHHNLNDIVWRALTKASIPSIKEPPGLFRSDGKRPDGLTLIPWQKGKCLAWDVTVSDTLANSYLHVTSSSAGGAAELAARRKLEKYKDLPSVYDFMPIAIETFGPTNEAASEFINILGRKISDITDDNRETSFLRQRISMALQRFNAVCFRGSFSHSDDPASEDNVNPTTSHGLPVSIATAAMTIILADAPDGTMPSDFDSISSSCLFNPLTAPLETSEPFNGAHPLLSSISNDASSYDLEVVGSNEKDRNDVVAYNTDSFNSAATVTKRSRRGSRRSVLDLTIVEAKAMCGEMDNSSSRQLRKRKPHPESNVNRIYETHDMRKQKPTKAMNFIVTDPKTNEGPEGKILENSSAEKSSFSAIKSSESSKILMYVHSFLLEYRNSVAISPLINLSYIPGISYVKDLYGFTGSTLDTPGKPLHCSASHNHQIANGVSWVAGLKKKKVEVLIGTAICPRSAEICVLGGKSQTNFKRRVLSPEVPKLFEPLNIDDIALPRCSTSSIGNMSLYKPSAIAYEVSYDVDLLMLTSRVLCSGSVSPVLNCSFASVQNFHHIALPSHHGRQTLHMKQKKKMQSWRPQIKRVLHFNLQKQQQHQSFDRQHIGFSVSSPGSSGSLPPTHSSTHKPLRGAGPQLSSLATASVDSPVRCPKFRGHQPQNPISSPAGLTPQVLLRPDTDTSQPPQDGYVQPTADLLSPFYVNHPFSLEINALIQPLGRAQSAPTRSDQQLFGLPLLHQQQPHAAGMRRERSSQLIGREQFSMISELVKSETGGRSECRSADIS

SEQ ID NO: 3184 - protein, 1680 aa, Enchytraeus crypticus
MPNCAGRPFEPCPQARNDSSVKFSLCDLYLCPDCLEYRWPTSRNNETNTSKPYLIQANSKLYIEPVSNVNCLSQGTASVRRNKVSSFQDCSSVSPDSLPAVKHRTSGACSVCFSIHQICKETGAIRVHGKMSNRCPGSHFPPRPESILSLPIQDVNKNPHSTRISASPPEPILEPSSPLLNATSLLLHPTLPYNTIKHIPKAARPSCAKSLANILNKISNCPRDINDWSHLFNFGKDVLIAPPRAGKRMNLSNAIKKRSELFDCRKETALPKYKFNRSPGNSDKLYSLIRSKIEDGNMRAAVRLLCSDDAPAADNPDTLQNLKDKHPILSEVLPPAPDPFTTQSFQASENGILNAVRSFPAGSSAGPDGIRPQHILDLINDRVSGPILLPALTSFTNTLLNGECPDPIRKLLFGGRLIAIGKKDGGVRPIAIGYTWRRIAAKCANAHVSSKVASFLSPIQVGVGVSGGCEATVHAVRRFLTSLPEKFSVVKLDFKNAFNNVNRFQMLQEVYKYIPEIYKFCYSSYSATSHLKYNDHIIESMVGVQQGDPLGPLLFSLTIHPLLKSLICPLRVAYLDDVTLGGSEDSLSHDICNIMENGKVLGLELNLNKCEIVSPCPQTIRHPILQSFKMIPQDESSLLGAPLSFGIAMDKSLSTKIVDLELASSRLPLISRHDALTILRYSLSISKMLYTLRSSPCFNHPALIAFDNKLKECLSTMSNIALSDTQWSQATLPVKKGGLGIRQTSHVAPSAFISSYISTRPLQDSILGHFSSYHDVNFDLALSLWSERYNAVAPTGDKDKMQKFWDAAAIEKCFEQILNFQSDASDRARLLAVSSPRSSDWLHAFPISSCGLHLDDESVRVAIGFRLGARLCEPHTCPCGSIVDSRGIHSLSCKRSAGRASRHHNLNDIVWRALTKASIPSIKEPPGLFRSDGKRPDGLTLIPWQKGKCLAWDVTVSDTLANSYLHVTSSSAGGAAELAARRKLEKYKDLPSVYDFMPIAIETFGPTNEAASEFINILGRKISDITDDNRETSFLRQRISMALQRFNAVCFRGSFSHSDDPASEDNVNPTTSHGLPVSIATAAMTIILADAPDGTMPSDFDSISSSCLFNPLTAPLETSEPFNGAHPLLSSISNDASSYDLEVVGSNEKDRNDVVAYNTDSFNSAATVTKRSRRGSRRSVLDLTIVEAKAMCGEMDNSSSRQLRKRKPHPESNVNRIYETHDMRKQKPTKAMNFIVTDPKTNEGPEGKILENSSAEKSSFSAIKSSESSKILMYVHSFLLEYRNSVAISPLINLSYIPGISYVKDLYGFTGSTLDTPGKPLHCSASHNHQIANGVSWVAGLKKKKVEVLIGTAICPRSAEICVLGGKSQTNFKRRVLSPEVPKLFEPLNIDDIALPRCSTSSIGNMSLYKPSAIAYEVSYDVDLLMLTSRVLCSGSVSPVLNCSFASVQNFHHIALPSHHGRQTLHMKQKKKMQSWRPQIQRVLHFNLQKQQQHQSFDRQHIGFSVSSPGSSGSLPPTHSSTHKPLRGAGPQLSSLATASVDSPVRGPKFRGHQPQNPISSPAGLTPQVLLRPDTDTSQPPQDGYVQPTADLLSPFYVNHPFGLEINALIQPLGRAQSAPTRSDQQLFGLPLLHQQQPHAAGMRGERSSQLIGGEQFSMISELVKSETGGRSECRSADIT

SEQ ID NO: 3185 - protein, 1680 aa, Enchytraeus crypticus
MPNCAGRPFEPCPQARNDSSVKFSLCDLYLCPDCLEYRWPTSRNNETNTSKPYLIQANSKLYIEPVSNVNCLSQGTASVRRNKVSSFQVCSSVSPDSLPAVKHRTSGACSVCFSIHHICKETGAIRVHGKMSNRCPGSHFPPRPESILSLPIQDVNKNPHSTRISASPPEPILEPSSPLHNATSLLLHPTLPYNTIKHVPKAARPSCAKSLANILNKISNCPRDINDWSHLFNFGKDVLIAPPRAGKRMNLSNAIKKRSELFDCRKETALPKYKFNRSPGNSDKLYSLIRSKIEDGNMRAAVRLLCSDDAPAADNPDTLQNLKDKHPILSEVLPPAPDPFTTQSFQASENGILNAVRSFPAGSSAGPDGIRPQHILDLINDRVSGPILLPALTSFTNTLLNGECPDPIRKLLFGGRLIAIGKKDGGVRPIAIGYTWRRIAAKCANAHVSSKVASFLSPIQVGVGVSGGCEATVHAVRRFLTSLPEKFSVVKLDFKNAFNNVNRFQMLQEVYKYIPEIYKFCYSSYSATSHLKYNDHIIESMVGVQQGDPLGPLLFSLTIHPLLKSLICPLRVAYLDDVTLGGSEDSLSHDICNIMENGKVLGLELNLNKCEIVSPCPQTIRHPILQSFKMIPQDESSLLGAPLSFGIAMDKSLSTKIVDLELASSRLPLISRHDALTILRYSLSISKMLYTLRSSPCFNHPALIAFDNKLKECLSTMSNIALSDTQWSQATLPVKKGGLGIRQTSDVAPSAFISSYISTRPLQDSILGHFSSYHDVNFDLALSLWSERYNAVAPTGDKDKMQKFWDAAAIEKCFEQILNFQSDASDRARLLAVSSPRSSDWLHALPISSCGLHLDDESVRVAIGFRLGARLCEPHTCPCGSIVDSRGIHSLSCKRSAGRASRHHNLNDIVWRALTKASIPSIKEPPGLFRSDGKRPDGLTLIPWQKGKCLAWDVTVSDTLANSYLHVTSSSAGGAAELAARRKLEKYKDLPSVYDFMPIAIETFGPTNEAASEFINILGRKISDITDDNRETSFLRQRISMALQRFNAVCFRGSFSHSDDPASEDNVNPTTSHGLPVSIATAAMTIILADAPDGTMPSDFDSISSSCLFNPLTAPLETSEPFNGAHPLLSSISNDASSYDLEVVGSNEKDRNDVVAYNTDSFNSAATVTKRSRRGSRRSVLDLTIVEAKAMCGEMDNSSSRQLRKRKPHPESNVNRIYETHDMRKQKPTKAMNFIVTDPKTNEGPEGKILENSSAEKSSFSAIKSSESSKILMYVHSFLLEYRNSVAISPLINLSYIPGISYVKDLYGFTGSTLDTPGKPLHCSASHNHQIANGVSWVAGLKKKKVEVLIGTAICPRSAEICVLGGKSQTNFKRRVLSPEVPKLFEPLNIDDIALPRCSTSSIGNMSLYKPSAIAYEVSYDVDLLMLTSRVLCSGSVSPVLNCSFASVQNFHHIALPSHHGRQTLHMKQKKKMQSWRPQIQRVLHFNLQKQQQHQSFDRQHIGFSVSSPGSSGSLPPTHSSTHKPLRGAGPQLSSLATASVDSPVRCPKFRGHQPQNPISSPAGLTPQVLLRPDTDTSQPPQDGYVQPTADLLSPFYVNHPFSLEINALIQPLGRAQSAPTRSDQQLFGLPLLHQQQPHAAGMRRERSSQLIGGEQFSMISELVKSETGGRSECRSADIT

SEQ ID NO: 3186 - protein, 1680 aa, Enchytraeus crypticus
MPNCAGRPFEPCPQARNDSSVKFSLCDLYLCPDCLEYRWPTSRNNETNTSKPYLIQANSKLYIEPVSNVNCLSQGTASVRRNKVSSFQDCSSVSPDSLPAVKHRTSGACSVCFSIHQICKETGAIRVHGKMSNRCPGSHFPPRPESILSLPIQDVNKNPHSTRISASPPEPILEPSSPLHNATSLLLHPTLPYNTIKHIPKAARPSCAKSLANILNKISNCPRDINDWSHLFNFGKDVLIAPPRAGKRMNLSNAIKKRSELFDCRKETALPKYKFNRSPGNADKLYSLIRSKIEDGNMRAAVRLLCSDDAPAADNPDTLQNLKDKHPIPSEVLPPAPDPFTTQSFQASENGILNAVRSFPAGSSAGPDGIRPQHILDLINDRVSGPILLPALTSFTNTLLNGECPDPIRKLLFGGRLIAIGKKDGGVRPIAIGYTWRRIAAKCANAHVSSKVASFLSPIQVGVGVSGGCEATVHAVRRFLTSLPEKFSVVKLDFKNAFNNVNRFQMLQEVYKYIPEIYKFCYSSYSATSHLKYNDHIIESMVGVQQGDPLGPLLFSLTIHPLLKSLICPLRVAYLDDVTLGGSEDSLSHDICNIMENGKVLGLELNLNKCEIVSPCPQTIRHPILQSFKMIPQDESSLLGAPLSFGIAMDKSLSTKIVDLELASSRLPLISRHDALTILRYSLSISKMLYTLRSSPCFNHPALVAFDNKLKECLSTMSNIALSDTQWSQATLPVKKGGLGIRQTSHVAPSAFISSYISTRPLQDSILGHFSSYHDVNFDLALSLWSERYNAVAPTGDKDKMQKFWDAAAIEKCFEQILNFQSDASDRARLLAVSSPRSSDWLHAFPISSCGLHLDDESVRVAIGFRLGARLCEPHTCPCGSIVDSRGIHSLSCKRSAGRASRHHNLNDIVWRALTKASIPSIKEPPGLFRSDGKRPDGLTLIPWQKGKCLAWDVTVSDTLANSYLHVTSSSAGGAAELAARRKLEKYKDLPSVYDFMPIAIETFGPTNEAASEFINILGRKISDITDDNRETSFLRQRISMALQRFNAVCFRGSFSHSDDPASEDNVNPTTSHGLPVSIATAAMTIILADAPDGTMPSDFDSISSSCLFNPLTAPLETSEPFNGAHPLLSSISNDASSYDLEVVGSNEKDRNDVVAYNTDSFNSAATVTKRSRRGSRRSVLDLTIVEAKAMCGEMDNSSSRQLRKRKPHPESNVNRIYETHDMRKQKPTKAMNFIVTDPKTNEGPEGKILENSSAEKSSFSAIKSSESSKILMYVHSFLLEYRNSVAISPLINLSYIPGISYVKDLYGFTGSTLDTPGKPLHCSASHNHQIANGVSWVAGLKKKKVEVLIGTAICPRSAEICVLGGKSQTNFKRRVLSPEVPKLFEPLNIDDIALPRCSTSSIGNMSLYKPSAIAYEVSYDVDLLMLTSRVLCSGSVSPVLNCSFASVQNFHHIALPSHHGRQTLHMKQKKKMQSWRPQIQRVLHFNLQKQQQHQSFDRQHIGFSVSSPGSSGSLPPTHSSTHKPLRGAGPQLSSLATASVDSPVRCPKFRGHQPQNPISSPAGLTPQVLLRPDTDTSQPPQDGYVQPTADLLSPFYVNHPFSLEINALIQPLGRAQSAPTRSDQQLFGLPLLHQQQPHAAGMRRERSSQLIGGEQFSMISELVKSETGGRSECRSADIS

SEQ ID NO: 3187 - protein, 1680 aa, Enchytraeus crypticus
MPNCAGRPFEPCPQARNDSSVKFSLCDLYLCPDCLEYRWPTSRNNETNTSKPYLIQANSKLYIEPVSNVNCLSQGTASVRRNKVSSFQDCSSVSPDSLPAVKHRTSGACSVCFSIHQICKETGAIRVHGKMSNRCPGSHFPPRPESILSLPIQDVNKNPHSTRISASPPEPILEPSSPLHNATSLLLHPTLPYNTIKHVPKAARPSCAKSLANILNKISNCPRDINDWSHLFNFGKDVLIAPPRAGKRMNLSNAIKKRSELFDCRKETALPKYKFNRSPGNSDKLYSLIRSKIEDGNMRAAVRLLCSDDAPAADNPDTLQNLKDKHPILSEVLPPAPDPFTTQSFQASENGILNAVRSFPAGSSAGPDGIRPQHILDLINDRVSGPILLPALTSFTNTLLNGECPDPIRKLLFGGRLIAIGKKDGGVRPIAIGYTWRRIAAKCANAHVSSKVASFLSPIQVGVGVSGGCEATVHAVRRFLTSLPEKFSVVKLDFKNAFNNVNRFQMLQEVYKYIPEIYKFCYSSYSATSHLKYNDHIIESMVGVQQGDPLGPLLFSLTIHPLLKSLICPLRVAYLDDVTLGGSEDSLSHDICNIMKNGKVLGLELNLNKCEIVSPCPQTIRHPILQSFKMIPQDESSLLGAPLSFGIAMDKSLSTKIVDLELASSRLPLISRHDALTILRYSLSISKMLYTLRSSPCFNHPALIAFDNKLKECLSTMSNIALSDTQWSQATLPVKKGGLGIRQTSHVAPSAFISSYISTRPLQDSILGHFSSYHDVNFDLALSLWSERYNAVAPTGDKDKMQKFWDAPAIEKCFEQILNFQSDASDRARLLAVSSPRSSDWLHAFPISSCGLHLDDESVRVAIGFRLGARLCEPHTCPCGSIVDSRGIHSLSCKRSAGRASRHHNLNDIVWRALTKASIPSIKEPPGLFRSDGKRPDGLTLIPWQKGKCLAWDVTVSDTLANSYLHVTSSSAGGAAELAARRKLEKYKDLPSVYDFMPIAIETFGPTNEAASEFINILGRKISDITDDNRETSFLRQRISMALQRFNAVCFRGSFSHSDDPASEDNVNPTTSHGLPVSIATAAMTIILADAPDGTMPSDFDSISSSCLFNPLTAPLETSEPFNGAHPLLSSISNDASSYDLEVVGSNEKDRNDVVAYNTDSFNSAATVTKRSRRGSRRSVLDMTIVEAKAMCGEMDNSSSRQLRKRKPHPESNVNRIYETHDMRKQKPTKAMNFIVTDPKTNEGPEGKILENSSAEKSSFSAIKSSESSKILMYVHSFLLEYRNSVAISPLINLSYIPGISYVKDLYGFTGSTLDTPGKPLHCSASHNHQIANGVSWVAGLKKKKVEVLIGTAICPRSAEICVLGGKSQTNFKRRVLSPEVPKLFEPLNIDDIALPRCSTSSIGNVSLYKPSAIAYEVSYDVDLLMLTSRVLCSGSALPVLNCSFASVQNFHHIALPSHHGRQTLHMKQKKKMQSWRPQIQRVLHFNLQKQQQHQSFDRQHIGFSVSSPGSSGSLPPTHSSTHKPLRGAGPQLSSLATASVDSPVRCPKFRGHQPQNPISSPAGLTPQVLLRPDTDTSQPPQDGYVQPTADLLSPFYVNHPFSLEINALIQPLGRAQSAPTRSDQQLFGLPLLHQQQPHAAGMRRERSSQLIGGEQFSMISELVKSETGGRSECRSADIT

SEQ ID NO: 3188 - protein, 1680 aa, Enchytraeus crypticus
MPNCAGRPFEPCPQARNDSSVKFSLCDLYLCPDCLEYRWPTSRNNETNTSKPYLIQANSKLYIEPVSNVNCLSQGTASVRRNKVSSFQDCSSVSPDSLPAVKHRTSGACSVCFSIHQICKETGAIRVHGKMSNRCPGSHFPPRPESILSLPIQDVNKNPHSTRISASPPEPILEPSSPLHNATSLLLHPTLPYNTIKHIPKAARPSCAKSLANILNKISNCPRDINDWSHLFNFGKDVLIAPPRAGKRMNLSNAIKKRSELFDCRKETALPKYKFNRSPGNSDKLYSLIRSKIEDGNMRAAVRLLCSDDAPAADNPDTLQNLKDKHPILSEVLPPAPDPFTTQSFQASENGILNAVRSFPAGSSAGPDGIRPQHILDLINDRVSGPILLPALTSFTNTLLNGECPDPIRKLLFGGRLIAIGKKDGGVRPIAIGYTWRRIAAKCANAHVSSKVASFLSPIQVGVGVSGGCEATVHAVRRFLTSLPEKFSVVKLDFKNAFNNVNRFQMLQEVYKYIPEIYKFCYSSYSATSHLKYNDHIIESMVGVQQGDPLGPLLFSLTIHPLLKSLICPLRVAYLDDVTLGGSEDSLSHDICNIMENGKVLGLELNLNKCEIVSPCPQTIRHPILQSFKMIPQDESSLLGAPLSFGIAMDKSLSTKIVDLELASSRLPLISRHDALTILRYSLSISKILYTLRSSPCFNHPALIAFDNKLKECLSTMSNIALSDTQWSQATLPVKKGGLGIRQTSHVAPSAFISSYISTRPLQDSILGHFSSYHDVNFDLALSLWSERYNAVAPTGDKDKMQKFWDAAAIEKCFEQILNFQSDASDRARLLAVSSPRSSDWLHAFPISSCGLHLDDESVRVAIGFRLGARLCEPHTCPCGSIVDSRGIHSLSCKRSAGRASRHHNLNDIVWRALTKASIPSIKEPPGLFRSDGKRPDGLTLIPWQKGKCLAWDVTVSDTLANSYLHVTSSSAGGAAELAARRKLEKYKDLPSVYDFMPIAIETFGPMNEAASEFINILGRKISDITDDNRETSFLRQRISMALQRFNAVCFRGSFSHSDDPASEDNVNPTTSHGLPVSIATAAMTIILADAPDGTMPSDFDSISSSCLFNPLTAPLETSEPFNGAHPLLSSISNDASSYDLEVVGSNEKDRNDVVAYNTDSFNSAATVTKRSRRGSRRSVLDLTIVEAKAMCGEMDNSSSRQLRKRKPHPESNVNRIYETHDMRKQKPTKAMNFIVTDPKTNEGPEGKILENSSAEKSSFSAIKSSESSKILMYVHSFLLEYRNSVAISPLINLSYIPGISYVKDLYGFTGSTLDTPGKPLHCSASHNHQIANGVSWVAGLKKKKVEVLIGTAICPRSAEICVLGGKSQTNFKRRVLSPEVPKLFEPLNIDDIALPRCSTSSIGNMSLYKPSAIAYEVSYDVDLLMLTSRVLCSGSVSPVLNCSFASVQNFHHIALPSHHGRQTLHMKQKKKMQSWRPQIKRVLHFNLQKQQQHQSFDRQHIGFSVSSPGSSGSLPPTHSSTHKPLRGAGPQLSSLATASVDSPVRCPKFRGHQPQNPISSPAGLTPQVLLRPDTDTSQPPQDGYVQPTADLLSPFYVNHPFSLEINALIQPLGRAQSAPTRSDQQLFGLPLLHQQQPHAAGMRRERSSQLIGGEQFSMISELVKSETGGRSECRSADIT

SEQ ID NO: 3189 - protein, 1680 aa, Enchytraeus crypticus
MPNCAGRPFEPCPQARNDSSVKFSLCDLYLCPDCLEYRWPTSRNNETNTSKLYLIQANSKLYIEPVSNVNCLSQGTASVRRNKVSSFQDCSSVSPDSLPAVKHRTSGACSVCFSIHQICKETGAIRVHGKMSNRCPGSHFPPRPESILSLPIQDVNKNPHSTRISASPPEPILEPSSPLLNATSLLLHPTLPYNTIKHIPKAARPSCAKSLANILNKISNCPRDINDWSHLFNFGKDVLIAPPRAGKRMNLSNAIKKRSELFDCRKETALPKYKFNRSPGNSDKLYSLIRSKIEDGNMRAAVRLLCSDDAPAADNPDTLQNLKDKHPILSEVLPPAPDPFTTQSFQASENGILNAVRSFPAGSSAGPDGIRPQHILDLINDRVSGPILLPALTSFTNTLLNGECPDPIRKLLFGGRLIAIGKKDGGVRPIAIGYTWRRIAAKCANAHVSSKVASFLSPIQVGVGVSGGCEATVHAVRRFLTSLPEKFSVVKLDFKNAFNNVNRFQMLQEVYKYIPEIYKFCYSSYSATSHLKYNDHIIESMVGVQQGDPLGPLLFSLTIHPLLKSLICPLRVAYLDDVTLGGSEDSLSHDICNIMENGKVLGLELNLNKCEIVSPCPQTIRHPILQSFKMIPQDESSLLGAPLSFGIAMDKSLSTKIVDLELASSRLPLISRHDALTILRYSLSISKMLYTLRSSPCFNHPALIAFDNKLKECLSTMSNIALSDTQWSQATLPVKKGGLGIRQTSHVAPSAFISSYISTRPLQDSILGHFSSYHDVNFDLALSLWSERYNAVAPTGDKDKMQKFWDAAAIEKCFEQILNFQSDASDRARLLAVSSPRSSDWLHAFPISSCGLHLDDESVRVAIGFRLGARLCEPHTCPCGSIVDSRGIHSLSCKRSAGRASRHHNLNDIVWRALTKASIPSIKEPPGLFRSDGKRPDGLTLIPWQKGKCLAWDVTVSDTLANSYLHVTSSSAGGAAELAARRKLEKYKDLPSVYDFMPIAIETFGPTNEAASEFINILGRKISDITDDNRETSFLRQRISMALQRFNAVCFRGSFSHSDDPASEDNVNPTTSHGLPVSIATAAMTIILADAPDGTMPSDFDSISSSCLFNPLTAPLETSEPFNGAHPLLSSISNDASSYDLEVVGSNEKDRNDVVAYNTDSFNSAATVTKRSRRGSRRSVLDLTIVEAKAMCGEMDNSSSRQLRKRKPHPESNVNRIYETHDMRKQKPTKAMNFIVTDPKTNEGPEGKILENSSAEKSSFSAIKSSESSKILMYVHSFLLEYRNSVAISPLINLSYIPGISYVKDLYGFTGSTLDTPGKPLHCSASHNHQIANGVSWVAGLKKKKVEVLIGTAICPRSAEICVLGGKSQTNFKRRVLSPEVPKLFEPLNIDDIALPRCSTSSIGNMSLYKPSAIAYEVSYDVDLLMLTSRVLCSGSVSPVLNCSFASVQNFHHIALPSHHGRQTLHMKQKKKMQSWRPQIQRVLHFNLQKQQQHQSFDRQHIGFSVSSPGSSGSLPPTHSSTHKPLRGAGPQLSSLATASVDSPVRCPKFRGHQPQNPISSPAGLTPQVLLRPDTDTSQPPQDGYVQPTADLLSPFYVNHPFSLEINALIQPLGRAQSAPTRSDQQLFGLPLLHQQQPHAAGMRRERSSQLIGGEQFSMISELVKSETGGRSECRSADIT

SEQ ID NO: 3190 - protein, 1680 aa, Enchytraeus crypticus
MPNCAGRPFEPCPQARNDSSVKFSLCDLYLCPDCLEYRWPTSRNNETNTSKPYLIQANSKLYIEPVSNVNCLSQGTASVRRNKVSSFQDCSSVSPDSLPAVKHRTSGACSVCFSIHQICKETGAIRVHGKMSNRCPGSHFPPRPESILSLPIQDVNKNPHSTRISASPPEPILEPSSPLHNATSLLLHPTLPYNTIKHIPKAARPSCAKSLANILNKISNCPRDINDWSHLFNFGKDVLIAPPRAGKRMNLSNAIKKRSELFDCRKETALPKYKFNRSPGNSDKLYSLIRSKIEDGNMRAAVRLLCSDDAPAADNPDTLQNLKDKHPILSEVLPPAPDPFTTQSFQASENGILNAVRSFPAGSSAGPDGIRPQHILDLINDRVSGPILLPALTSFTNTLLNGECPDPIRKLLFGGRLIAIGKKDGGVRPIAIGYTWRRIAAKCANAHVSSKVASFLSPIQVGVGVSGGCEATVHAVRRFLTSLPEKFSVVKLDFKNAFNNVNRFQMLQEVYKYIPEIYKFCYSSYSATSHLKYNDHIIESMVGVQQGDPLGPLLFSLTIHPLLKSLICPLRVAYLDDVTLGGSEDSLSHDICNIMENGKVLGLELNLNKCEIVSPCPQTIRHPILQSFKMIPQDESSLLGAPLSFGIAMDKSLSTKIVDLELASSRLPLISRHDALTILRYSLSISKMLYTLRSSPCFNHPALIAFDNKLKECLSTMSNIALSDTQWSQATLPVKKGGLGIRQTSHVAPSAFISSYISTRPLQDSILGHFSSYHDVNFDLALSLWSERYNAVAPTGDKDKMQKFWDAAAIEKCFEQILNFQSDASDRARLLAVSSPRSSDWLHAFPISSCGLHLDDESVRVAIGFRLGARLCEPHTCPCGSIVDSRGIHSLSCKRSAGRASRHHNLNDIVWRALTKASIPSIKEPPGLFRSDGKRPDGLTLIPWQKGKCLAWDVTVSDTLANSYLHVTSSSAGGAAELAARRKLEKYKDLPSVYDFMPIAIETFGPTNEAASEFINILGRKISDITDDNRETSFLRPRISMALQRFNAVCFRGSFSHSDDPASEDNVNPTTSHGLPVSIATAAMTIILADAPDGTMPSDFDSISSSCLFNPLTAPLETSEPFNGAHPLLSSISNDASSYDLEVVGSNEKDRNDVVAYNTDSFNSAATVTKRSRRGSRRSVLDLTIVEAKAMCGEMDNSSSRQLRKRKPHPESNVNRIYETHDMRKQKPTKAMNFIVTDPKTNEGPEGKILENSSAEKSSFSAIKSSESSKILMYVHSFLLEYRNSVAISPLINLSYIPGISYVKDLYGFTGSTLDTPGKPLHCSASHNHQIANGVSWVAGLKKKKVEVLIGTAICPRSAEICVLGGKSQTNFKRRVLSPEVPKLFEPLNIDDIALPRCSTSSIGNMSLYKPSAIAYEVSYDVDLLMLTSRVLCSGSVSPVLNCSFASVQNFHHIALPSHHGRQTLHMKQKKKMQSWRPQIKRVLHFNLQKQQQHQSFDRQHIGFSVSSPGSSGSLPPTHSSTHKPLRGAGPQLSSLATASVDSPVRCPKFRGHQPQNPISSPAGLTPQVLLRPDTDTSQPPQDGYVQPTADLLSPFYVNHPFSLEINALIQPLGRAQSAPTRSDQQLFGLPLLHQQQPHAAGMRRERSSQLIGGEQFSMISELVKSETGGRSECRSADIT

SEQ ID NO: 3191 - protein, 1679 aa, Enchytraeus crypticus
MPNCAGRPFEPCPQARNDSSVKFSLCDLYLCPDCLEYRWPTSRNNETNTSKPYLIQANSKLYIEPVSNVNCLSQGTASVRRNKVSSFQDCSSVSPDSLPAVKHRTSGACSVCFSIHQICKETGAIRVHGKMSNRCPGSHFPPRPESILSLPIQDVNKNPHSTRISASPPEPILEPSSPLLNATSLLLHPTLPYNTIKHIPKAARPSCAKSLANILNKISNCPRDINDWSHLFNFGKDVLIAPPRAGKRMNLSNAIKKRSELFDCRKETALPKYKFNRSPGNSDKLYSLIRSKIEDGNMRAAVRLLCSDDAPAADNPDTLQNLKDKHPILSEVLPPAPDPFTTQSFQASENGILNAVRSFPAGSSAGPDGIRPQHILDLINDRVSGPILLPALTSFPNTLLNGECPDPIRKLLFGGRLIAIGKKDGGVRPIAIGYTWRRIAAKCANAHVSSKVASFLSPIQVGVGVSGGCEATVHAVRRFLTSLPEKFSVVKLAFKNAFNNVNRFQMLQEVYKYIPEIYKFCYSSYSATSHLKYNDHIIESMVGVQQGDPLGPLLFSRTIHPLLKSLICPLRVAYLDDVTLGGSEDSLSHDICNIMENGKVLGLELNLNKCEIVSPCPQTIRHPILQSFKMIPQDESSLLGAPLSFGIAMDKSLSTKIVALELASSRLPLISRHDALTILRYSLSISKILYTLRSSPCFNHPALIAFDNKLKECLSTMSNIALSDTQWSQATLPVKKGGLGIRQTSHVAPSAFISSYISTRPLQDSILGHFSSYHDVNFDLALSLWSERYNAVAPPGDKDKMQKFWDAAAIEKCFEQILNFQSDAADRARLLAVSSPRSSDWLHAFPISSCGLHLDDESVRVAIGFRLGARLCEPHTCPCGSIVDSRGIHSLSCKRSAGRASRHHNLNDIVWRALTKASIPSIKEPPGLFRSDGKRPDGLTLIPWQKGKCLAWYVTVSDTLANSYLHVTSSSAGGAAELAARRKLEKYKDLPSVYDFMPIAIETFGPTNEAASEFINILGRKISDITDDNRETSFLRQRISMALQRFNAVCFRGSFSHSDDPASEDNVNPPTSHGLPVSIATAAMTIILADAPDGTMPSDFDSISSSCLFNPLTAPLETSEPFNGAHPLLSSISNDASSYDLEVVGSNEKDRNDVVAYNTDSFNSAATVTKRSRRGSRRSVLDLTIVEAKAMCGEMDNSSSRQLRKRKPHPESNVNRIYETHDMRKQKPTKAMNFIVTDPKTNEGPEGKILENSSDEKSSFSAIKSSESSKILMYVHSFLLEYRNSVAISPLINLSYIPGISYVKDLHGFTGSTLDTPGKPLHCSASHNHQIANGVSWVAGLKKKKVEVLIGTAICPRSAEICVLGGKSQTNFKRRVLSPEVPKLFEPLNIDDIALPRCSTSSIGNMSLYKPSAIAYEVSYDVDLLMLTSRVLCSGSVSPVLNCSFASVQNFHHIALPSHHGRQTLHMKQKKMQSWRPQIQRVLHFNLQKQQQHQSFDRQHIGFSVSSPGSSGSLPPTHSSTHKPLRGAGPQLSSLATASVDSPVRCPKFRGHQPQNPISSPAGLTPQVLLRPDTDTSQPPQDGYVQPTADLLSPFYVNHPFSLEINALIQPLGRAQSAPTRSDQQLFGLPLLHQQQPHAAGMRRERSSQLIGGEQFSMISELVKSETGGRSECRSADIT

SEQ ID NO: 3192 - protein, 1680 aa, Enchytraeus crypticus
MPNCAGRPFEPCPQARNDSSVKFSLCDLYLCPDCLEYRWPTSRNNETNTSKPYLIQANSKLYIEPVSNVNCLSQGTASVRRNKVSSFQDCSSVSPDSLPAVKHRTSGACSVCFSIHQICKETGAIRVHGKMSNRCPGSHFPPRPESILSLPIQDVNKNPHSTRISASPPEPILEPSSPLHNATSLLLHPTLPYNTIKHIPKAARPSCAKSLANILNKISNCPRDINDWSHLFNFGKDVLIAPPRAGKRMNLSNAIKKRSELFDCRKETALPKYKFNRSPGNADKLYSLIRSKIEDGNMRAAVRLLCSDDAPAADNPDTLQNLKDKHPILSEVLPPAPDPFTTQSFQASENGILNAVRSFPAGSSAGPDGIRPQHILDLINDRVSGPILLPALTSFTNTLLNGECPDPIRKLLFGGRLIAIGKKDGGVRPIAIGYTWRRIAAKCANAHVSSKVASFLSPIQVGVGVSGGCEATVHAVRRFLTSLPEKFSVVKLDFKNAFNNVNRFQMLQEVYKYIPEIYKFCYSSYSATSHLKYNDHIIESMVGVQQGDPLGPLLFSLTIHPLLKSLICPLRVAYLDDVTLGGSEDSLSHDICNIMENGKVLGLELNLNKCEIVSPCPQTIRHPILQSFKMIPQDESSLLGAPLSFGIAMDKSLSTKIVDLELASSRLPLISRHDALTILRYSLSISKMLYTLRSSPCFNHPALIAFDNKLKECLSTMSNIALSDTQWSQATLPVKKGGLGIRQTSHVAPSAFISSYISTRPLQDSILGHFSSYHDVNFDLALSLWSERYNAVAPTGDKDKMQKFWDAAAIEKCFEQILNFQSDASDRARLLAVSSPRSSDWLHAFPISSCGLHLDDESVRVAIGFRLGARLCEPHTCPCGSIVDSRGIHSLSCKRSAGRASRHHNLNDIVWRALTKASIPSIKEPPGLFRSDGKRPDGLTLIPWQKGKCLAWDVTVSDTLANSYLHVTSSSAGGAAELAARRKLEKYKDLPSVYDFMPIAIETFGPTNEAASEFINILGRKISDITDDNRETSFLRQRISMALQRFNAVCFRGSFSHSDDPASEDNVNPTTSHGLPVSIAIAAMTIILADAPDGTMPSDFDSISSSCLFNPLTAPLETSEPFNGAHPLLSSISNDASSYDLEVVGSNEKDRNDVVAYNTDSFNSAATVTKRSRRGSRRSVLDLTIVEAKAMCGEMDNSSSRQLRKRKPHPESNVNRIYETHDMRKQKPTKAMNFIVTDPKTNEGPEGKILENSSAEKSSFSAIKSSESSKILMYVHSFLLEYRNSVAISPLINLSYIPGISYVKDLYGFTGSTLDTPGKPLHCSASHNHQIANGVSWVAGLKKKKVEVLIGTAICPRSAEICVLGGKSQTNFKRRVLSPEVPKLFEPLNIDDIALPRCSTSSIGNMSLYKPSAIAYEVSYDVDLLMLTSRVLCSGSVSPVLNCSFASVQNFHHIALPSHHGRQTLHMKQKKKMQSWRPQIKRVLHFNLQKQQQHQSFDRQHIGFSVSSPGSSGSLPPTHSSTHKPLRGAGPQLSSLATASVDSPVRCPKFRGHQPQNPISSPAGLTPQVLLRPDTDTSQPPQDGYVQPTADLLSPFYVNHPFSLEINALIQPLGRAQSAPTRSDQQLFGLPLLHQQQPHAAGMRRERSSQLIGREQFSMISELVKSETGGRSECRSADIS

SEQ ID NO: 3193 - protein, 987 aa, Notocelia uddmanniana
MIILLFYNFIFYAFVLSFFYVILVLFKITTLPFMPLSLPDNDPLSASLENKVQCPHCPQPRLFKGQRGLKIHLAKVHNTDLPISSSAPADIPIPCIDTLFAAKLSSLKYSVPVIKRIPRGARISVAQKLSEDFQTVLRSNSPHAWQHFLTFPYRILHVPKSSSNRSSLTSRIKQNCNNPHSVLDSDNAVFAKKHSIYRTIENKVGEGDIGGAARLLFSNDTIAPHNADTLAALQSKHPPSAINLSLPDPPDHTTPALQVSTDEVLKAVLSFRSGSAGGLDGLTPQHLKDLLCNSVGEAGESLLKDLTALSNLMLSGKVNSSITEILYGANLCALIKKDGGIRPIAVGTTYRRLVAKTCCNAISPVLSQYFQPLQLGFGSKGGCEAAVHSLRSYINAHPNDTLLKVDVKNAFNSISRDALLAQVRKEIPNIYNFTWQCYSTSSKLNYKSDILNSASGCQQGDPLGPALFSLAIHPVIQKLNSKFNVWYLDDGVLGGKGNDVLEDFQVLMSEFSSIGLELNSSKCEIYVPDSCPEKVSLFSKIHQLAPNIKEIDKKSLHLLGSPVLEESFPSFLESKIQNFNTVSERLLQINSHPAYTIIRFCLFVPKFTYVLRCSHLWKHPHLLSSLDQIIKDTISAVLNITLDDRSWIQVSLPIRHGGLGIRKTADIALPAFLSSVHGTQNLVAKILNSSPGSATADSTAEAKNAWITACPNATYPQTLHSQRQWDEPLCRLVRNNLYQTSTSLAERARLLASAEWESGMWLHAVPSKNLGTLLDNNTFRLSISLRLGATCVAPHRCHCGDAVGRLAHHGLSCGKSAGRIPRHASLNDIIRRAFVSAGVPAVLEPTGLTRDDGKRPDGMTLIPWKMGRPLVWDATCVDTLAASHLPGTSCRAGSAADSAENLKRRKYGAIDSGFIFEPFGVETLGPWGPGAHRIYIGLCKRLVEASRDRKAGFYLAQRISIAIQRGNAASLLGTLPPGSDLGQIFYL

SEQ ID NO: 3194 - protein, 888 aa, Notocelia uddmanniana
MIILLFYNFIFYAFVLSFFYVILVLFKITTLPFMPLSLPDNDTLSASLENKVQCPHCPQPRLFKGQRGLKIHLAKVHNTDLPISSSAPADIPIPCIDTLFAAKLSSLKYSVPVIKRIPRGARISVAQKLSEDVQTVLRSNSPHAWQHFLTFPYRILHVPKSSSNRSSLTSRIKQNCNNPHNVLDSDNAVFAKKHSIYRTIENKVGEGDIGGAARLLFSNDTIAPHNAALQSKHPPSAINLSLPDPPDHTTPALQVSTDEMLKAVLSFRSGSAGGLDGLTPQHLKDLLCNSVGEAGESLLKDLTALSNLMLSGKVNSSITEILNGGNLCALIKKDGGIRPIAVGTTYRRLVAKTCCNAISPVLSQYFQPLQLGFGSKGGCEAAVHSLRSYINAHPNDTLLKVDVKNAFNSISRDALLAQVRKEIPNIYNCTWQCYSTSSKLNYKSDILNSASGCQQGDPLGPALFSLAIHPVIQKLNSKFNVWYLDDGVLGGKGNDVLEDFQVLMSEFSAIGLELNSSKCEIYVPDSCPEKVSLFSKIHQLAPNIKEIDKKSLHLLGSPVLEESFPSFLESKIQNFNTVSERLLQINSHSAYTIIRFRLFVPKFTYVLRCSHLWKHPHLLSSLDQIIKDTISAVLNITLDDRSWIQASLPIRHGGVGIRKTADIALPAFLSSVHGTQNLVSKILNSSPGSATADSTAEAKNAWITACPNATYPQTLHSQRQWDEPLCRLVRNNLYQTSTSLAERARLLASAEWESGMWLHAVPSKNLGTLLDNNTFRLSISLRLGATCVAPHRCHCGDAVGRLAHHGLSCGKSAGRIPRHASLNDIIRRAFVSAGVPAVLEPTGLTRDDGKRPDGMTLIPWKMGRPLVWDATCVDTLASSHLPGTSCSC

SEQ ID NO: 3195 - protein, 987 aa, Notocelia uddmanniana
MIILLFYNFIFYAFVLSFFYVILVLFKITTLPFMPLSLPDNDPLSASLENKVQCPHCPQPRLFKGQRGLKIHLAKVHNTDLPISSSAPADIPIPCIDTLFAAKLSSLKYSVPVIKRIPRGARILVAQKLSEDFQTVLRSNSPHAWQHFLTFPYRILHVPKSSSNRSSLTSRIKQNCNNPHSVLDSDNAVFAKKHSIYRTIENKVGEGDIGGAARLLFSNDTIAPHNADTLAALQSKHPPSAINLFLPDPPDHTTPALQVSTDEVLKAVLSFRSGSAGGLDGLTPQHLKDLLCNSVGEAGESLLKDLTALSNLMLSGKVNSSITEILYGANLCALIKKDGGIRPIAVGTTYRRLVAKTCCNAISPVLSQYFQPLQLGFGSKGGCEAAVHSLRSYINAHPNDTLLKVDVKNAFNSISRDALLAQVRKQIPNIYNFTWQCYSTSSKLNYKSDILNSASGCQQGDPLGPALFSLAIHPVIQKLNSKFNVWYLDDGVLGGKGNDVLEDFQVLMSEFSAIGLELNSSKCEIYVPDSCPEKVSLFSKIHQLAPNIKEIDKKSLHLLGSPVLEESFPSFLESKIQNFNTVSERLLQINSHSAYTIIRFCLFVPKFTYVLRCSHLWKHPHLLSSLDQIIKDTISAVLNITLDDRSWIQASLPIRHGGLGIRKTADIALPAFLSSVHGTQNLVAKILNSSPGSATADSTAEAKNAWITACPNATYPQTLHSQRQWDEPLCRLVRNNLYQTSTSLAERARLLASAEWESGMWLHAVPSKNLGTLLDNNTFRLSISLRLGATCVAPHRCHCGDAVGRLAHHGLSCGKSAGRIPRHASLNDIIRRAFVSAGVPAVLEPTGLTRDDGKRPDGMTLIPWKMGRPLVWDATCVDTLAASHLPGTSCRAGSAADSAENLKRRRYGSIDSGFIFEPFGVETLGPWGPGAHRIYIGLCKRLVEASRDRKAGFYLAQRISIAIQRGNAASLLGTLPPGSDLGQIFYL

SEQ ID NO: 3196 - protein, 1263 aa, Endotricha flammealis
MNAGLCHGRLIRSFATRGNSMNTRNKNRNINIDDEGDTNTRDSITIVSERVVTHTPVQDVSQGAQATQPATTKAGRPRVRMKWDDDINKFIMRTYYYITKLDTDRTMYIKRLYDEFQQQYPNLKVSEQRIADQKRVIIRNKLLSDEILEEIKKEVTERLKNEEEIHTNNTQNSHFTSTHDLTPNSTNIQHTPLTLTLNNTDIQQHHSDSLELENIYSATMSDASTQTMAASTRLQPTCNLDLQEEELTTTDNIVQELYEKIKTKIAQYEGSDPTSRPKLPKLRENKKLYKLTQIINRNILTKFISIDSDIEQIHTLVYCSAYVICEQLGYKINNYSFRNSNRNPGKPAWQIRLERDIDKLRVDIGRLTQFINNNRSGKVLRAVEAIFKSVKIYSTHERENRRPEEYLDTLKQRLVLKSHRLARYNKSLQRKEDNKLFSTNEKGFYRSLTNKINNRSENDATDMPSSESLKNYWTDLWKVNSNHNDEADWIKREKEKWDGIDEMPFGDLDEEDIEMVTRRLKNWKAAGVDGIHNFWYKKFNILHDRLAKIITDLINGNSELPQFLTTGITYMLPKSNKTNDPSQYRPITCLPTLYKIITSCITNKINSHIEKYNILAEEQKGCRRSHRGCKEQLIIDSTVLKHAHTNNKNISLTYIDYKKAFDSVPHSWLIRIMQIYKINSNIISFLESAIANWKTTISLTLNNSTTDVSNVKIENGIFQGDSLSPLWFCLALNPLSTLLNDTNKGYKLNSETKINHLMYMDDIKLFTKTEKEMKDLVKITSKFSEDINMSFGLDKCKTINIKKGKLTGENCDIDDEIHIEHLEVTETYKYLGIKQAKNIIHTQIKKELVNEYTSRLNKICKKQLYAKNLFKAINTFAVPILTYSFGVIKWSLTDIHRIEIKTRTILTKHKYLHPKSAIERMTVKRNKGGRGFIDLKALFEGQIKNLRDFFYSKAQSSIIHSAIVNLDNSYTPLDLQNKHKTYKTIEERQKEKHETWKSKVLHGRHVNDLEQAHVDVEASNKWLKLGTLYPETEGFMLAIQDQVINTRNYKKHIIKDPNIVSDMCRKCQRQPETIQHITSACPNLTQTDYTHRHNQIANIIHQNLAIKHKLTTENQQHYYQYTPKPVLESTSHKMYFDRAILTDKTIHNNRPDITLLDKDNKTAYLVDIAVVPNTHNIQKTIAEKIHKYTELKEEVLRIWNLDKVYIVPLVLSSTGIIPKSYHQSIKLLGLPENIYILAQKAAILNTCRIVRKFLSDDTNNTDN

SEQ ID NO: 3197 - protein, 1175 aa, Rhagonycha fulva
MRVRADSSESDDFGIDAPLDNNHRDDFGYNLPYEGGRCNLCNLAFTKQKNLVQHYETHHPGAALFFLCTKCTKKFEKYHAGLCHHVKCRGNLPLQKNLHKCPYCERTFATNQGVTTHKRYAHPNQRDKEKKALLEPTPLARVSGNTRSWTEEETKILIQEYIKCSGKNYAATIEPLIPNKSAKQISDRFHYLKTRKKPPPVLAEYLDKVRGLANIATPITTRSRTKNVSRDEDGLLAKDGRSTCSDQVHYKTMKSNNNIPNETPMRRSVNVVNSEEILIATDSEDENYLSPQPGPSTGYIGSPNPTKNWKIAQRLKCVEHPQVAEPAKTLQSIAMKRFPTQMEIDRTVEDLTKLMKQTHEDKNQPKTQKPNRKHKYSERTKTKKSIYAKTQQLYKSNPSKLAEIVVGGNFESLIGNDAIQPPKHLIKDAYEKIWGKQERVEPSNPHLLNPPNNTKISLIDLKTIKAKINKLKTNGAPGPDGLRKKHLKSNSIQNALCILYNLITLTGCYPSQWRQNRTTLIPKAGKNPEDISNWRPITISSVVARIYSACVAAELEKHTTLSRRQRGFVSGNGCYINTTILDDCIRTGKSSSLAAAQLDLTKAYDSIPHPTIKIALREQNVPEVIIEIVEQMYLGVTTIFSGTDIAVDIGQGVKQGDPLSSLLFNLVINRAISRVEKMTGFNILPNQQLSILAFADDLILLANNESDLQTILNVISEELDKIGLKISTSKSACFGITSGKKIWATKELNVSIQGEKLKNYSADERFDYLGATFTLTEGLSNKAQLNNISEAAKKCRKLSLKPAQKTTLFMQYVLPRFSYKLSIDPPSKTTLDAIDNEVRSECKKMLHLPHSTTDQLLYARKRDGGLGLPRLRNMVMLNAIRALSTTKTDSDSFIRAITKKCGFGKKIEAMAKKLNIALPASKKDINMVKLNFKIQEHQRWKSQISQGKGIETFKNNPLANHWLLYPRTLTSGDYIDMLKMRTNTFGVRESLIRAGYRHTNIRCRRCDTKNETLGHVLGECISGKAQRIKRHNNVVQQIAQCQPKSFDIYEEESFATPDGQLLKPDLLIKDGEKAYIVDVTVRYEQGESLAEAKQEKIRKYNVLRDTVKNQLKVNNVEVLPIVLGSRGAIPHTTENALRRLSVGRRTMINMVIGTIRSSISIGRAHIDYANSQRVL

SEQ ID NO: 3198 - protein, 1175 aa, Rhagonycha fulva
MRVHADSSESDDFGIDAPLVNNHRDDLGYNLPYEGGRCNLCNFAFTKQKNLAQHYETHHPGAALFFLCTKCTKKFEKYHAGLCHHVKCRGNLPLQKNLHECPYCERTFATNQGVTTHKRYAHPNQRDKEKKALLEPTPLARVSGNTRSWTEEETKILIQEYIKCSGKNYAATIEPLIPNKSAKQISDRFHYLKTRKKPPPVLAEYLDKVRGLANIATPITTRSRTKNVSRDKDGLLAKDGGSTCSDQIHNKTKKFNNNIPNVTPMRRTVNVVNPEELLIATDSEDENYFSLQPGPSIGYIGSPNPSKNWKIAQRLKCVEHPQVAEPAKTLQSIAMKRFPTQMEIDKTVEDLTKLMKQTHEDKNQPKTQKPNRKHKYSERTKTKKSIYAKTQQLYKSNPSKLAEIVVGGNFDSLIGNDAIQPPKHLIKDAYEKIWGKQERVEPSNPHLLNPPNNTKISLIDLKTIRAKINKLKTNGAPGPDGLRKKHLKSNSIQNALCILYNLITLTGCYPSQWRQNRTTLIPKAGKNPEDISNWRPITISSVVARIYSACVAAELEKHTTLSRRQRGFVSGNGCYINTTVLDDCIRTGKSSSLAAAQLDLTKAYDSIPHPAIKIALREQNVPEVIIEIVKQMYLGVTTIFSGTDIAVDIGRGVKQGDPLSSLLFNLVINRAISRVEKMTGFNILPNQQLSILAFADDLILLANNESDLQTILNVISEELDQIGLKISTSKSACFGITSGGKIWATKELNVSIQGEKLKNYSADEKFDYLGATFTLMEGLSNKAQLKNISEAAKKCRKLSLKPAQKTTLFMQYVLPKFSYKLSIDPPSKTTLDAIDNEVRSECKKILHLPHSTTDQLLYARKRDGGLGLPRLRNMVMLNAIRALSTTKTDSDSFIRAITKKCGFGKKIEAMAKKLNIALPASKKDINMVKLNFKLQEHQRWKSQISQGKGIETFKNNSIANHWLLYPRTLTSGDNIDMLKMRTNTFGVRESLIRAGYRHTNIRCRRCDTKNETLGHVLGECISGKAQRIKRQNNVVQQIAQCQPKSFDIYEEESFATPDGQLLKPDLLIKDGEKAYIVDVTVRYEQGESLAEAKKEKILKYNVLRETVKTQLKVNNVEVIPIVLGSRGAIPHTTENALRRLSVGRRTMINMVIGTIRSSISIGRAHIDYANSQRVL

SEQ ID NO: 3199 - protein, 911 aa, Rhagonycha fulva
MRRTVNVVNPEEIIIATDSEDENYFSPQPGPSIGYIGSPNPSKNLKIAQRLKCVEHPQVAKPAKTLQSIAMKRFPTQMEIDKTVEDLTKLMKQTHEDKNQPKTQKPNRKHKYSERTKTKKSIYAKTQQLYKSNPSKLAEIVVGGNFDSLIGNDAIQPPKHLIKDAYEKIWGKQERVEPSNPHLLNPPNNTKISLIDLKTIRAKINKLKTNGAPGPDGLRKKHLKSNSIQNALCILYNLITLTGCYPSQWRQNRTTLILKAGKNPEDISNWRPITISSVVARIYSACVAAELEKHTTLSRRQRGFVSGNGCYINTTVLDDCIRTGKSSSLAAAQLDLTKAYDSIPHPAIKIALREQNVPEVIIEIVEQMYLGVTTIFSGTDIAVDIGRGVKQGDPLSSLLFNLVINRAISRVEKMTGFNILPNQQLSILAFADDLILLANNESDLQTILNVISEELDQIGLKISTSKSACFGITSGGKIWATKELNVSIQGEKLKNYSDNEKFDYLGATFTLMEGLSNKTQLKNISEAAKKCKKLSLKPAQKTTLFMQYVLPKFSYKLSIDPPSKTTLDAIDNEVRSECKKMLHLPHSTTDQLLYARKRDGGLGLPRLRNMVMLNAIRALSTTKTDSDSFIRAITKKCGFGKKIEAMAKKLNIALPASKKDINMVKLNFKIQEHQRWKSQISQGKGIETFKNNPLANHWLLYPRTLTSGDYIDMLKMRTNTFGVRESLIRAGYRHTNIRCRRCDTKNETLGHVLGECISGKAQRIKRHNNVVQQIAQCQPKSFDIYEEESFATPDGQLLKPDLLIKDGEKAYIVDVTVRYEQGESLAEAKQEKIRKYNVLRDTVKNQLKVNNVEVLPIVLGSRGAIPHTTENALRRLSVGRRTMINMVIGTIRSSISIGRAHIDYANSQRVL

SEQ ID NO: 3200 - protein, 911 aa, Rhagonycha fulva
MRRTVNVVNPEEIIIATDSEDENYFSPQPGPSIGYIGSPNPSKNLKIAQRLKCVEHPQVAKPAKTLQSIAMKRFPTQMEIDKTVEDLTKLMKQTHEDKNQPKTQKPNRKHKYSERTKTKKSIYAKTQQLYKSNPSKLAEIVVGGNFDSLIGNDAIQPPKHLIKDAYEKIWGKQERVEPSNPHLLNPPNNTKISLIDLKTIRAKINKLKTNGAPGPDGLRKKHLKSNSIQNALCILYNLITLTGCYPSQWRQNRTTLILKAGKNPEDISNWRPITISSVVARIYSACVAAELEKHTTLSRRQRGFVSGNGCYINTTVLDDCIRTGKSSSLAAAQLDLTKAYDSIPHPAIKIALREQNVPEVIIEIVEQMYLGVTTIFSGTDIAVDIGRGVKQGDPLSSLLFNLVINRAISRVEKMTGFNILPNQQLSILAFADDLILLANNESDLQTILNVISEELDQIGLKISTSKSACFGITSGGKIWATKELNVSIQGEKLKNYSADEKFDYLGATFTLMEGLSNKTQLKNISEAAKKCKKLSLKPAQKTTLFMQYVLPKFSYKLSIDPPSKTTLDAIDNEVRSECKKMLHLPHSTTDQLLYARKRDGGLGLPRLRNMVMLNAIRALSTTKTDSDSFIRAITKKCGFGKKIEAMAKKLNIALPASKKDINMVKLNFKIQEHQRWKSQISQGKGIETFKNNPIANHWLLYPRTLTSGDYIDMLKMRTNTFGVRESLIRAGYRHTNIRCRRCDTKNETLGHVLGECISGKAQRIKRHNNVVQQIAQCQPKSFDIYEEESFATPDGQLLKPDLLIKDGEKAYIVDVTVRYEQGESLAEAKQEKIRKYNVLRDTVKNQLKVNNVEVLPIVLGSRGAIPHTTENALRRLSVGRRTMINMVNGTIRSSISIGRAHIDYANSQRVL

SEQ ID NO: 3201 - protein, 1175 aa, Rhagonycha fulva
MRVRADSSESDDFGIDAPLVNNHRDDLGYNLPYEGGRCNLCNFAFTKQKNLAQHYETHHPGAALFFLCTKCLKKFEKYHAGLCHHVKCRGNLPLQKNLHKCPYCERTFATNQGVTTHKRYAHPNQRDKEKKALLEPTPLARVSGNTRSWTEEETKILIQEYIKCSGKNYAATIEPLIPNKSAKQISDRFHYLKTRKKPPPVLAEYLDKVRGLANIATPITTRSRTKNVSRDKDGLLAKDGGSTCSDQLHNKTKKFNNNIPNVTPMRRTVNVVNPEELLIATDSEDENYFSPQPGPSIGYIGSPNPSKNWKIAQRLKCVEHPQVAEPAKTLQSIAMKRFPTQMEIDKTVEDLTKLMKQTHEDKNQPKTQKPNRKHKYSERTKTKKSIYAKTQQLYKSNPSKLAEIVVGGNFDSLIGNDAIQPPKHLIKDAYEKIWGKQERVEPSNPHPLNPPNNTKISLIDLKTIRAKINKLKTNGAPGPDGLRKKHLKSNSIQNALCILYNLITLTGCYPSQWRQNRTTLIPKAGKNPEDISNWRPITISSVVARIYSACVAAELEKHTTLSRRQRGFVSGNGCYINTTVLDDCIKTGKSSSLAAAQLDLTKAYDSIPHPAIKIALREQNVPEVIIEIVEQMYLGVTTIFSGTDIAVDIGRGVKQGDPLSSLLFNLVINRAISRVEKMTGFNILPNQQLSILAFADDLILLANNESDLQTILNVISEELDQIGLKISTSKSACFGITSGGKIWATKELNVSIQGEKLKNYSADEKFDYLGATFTLMEGLSNKAQLKNISEAAKKCRKLSLKPAQKTTLFMQYVLPKFSYKLSIDPPSKTTLDAIDNEVRSECKKMLHLPHSTTDQLLYARKRDGGLGLPRLRNMVMLNAIRALSTTKTDSDSFIRAITKKCGFGKKIEAMAKKLNIALPASKKDINMVKLNFKIQEHQRWKSQISQGKGIETFKNNPIANHWLLYPRTLTSGDYIDMLKMRTNTFGVRESLIRAGYRHTNIRCRRCDTKNETLGHVLGECISGKAQRIKRHNNVVQQIAQCQPKSFDIYEEESFATPDGQLLKPDLLIKDGEKAYIVDVTVRYEQGESLAEAKKEKILKYNVLRETVKTQLKVNNVEVIPIVLGSRGAIPHTTENALRRLSVGRRTMINMVIGTIRSSISIGRAHIDYANSQRVL

SEQ ID NO: 3202 - protein, 834 aa, Rhagonycha fulva
MEIDRTVEDLTKLMKQTHEDKNQPKTQKPNRKHKYSERTKTKKSIYAKTQQLYKSNPSKLAEIVVGGNFESLIGNDAIQPPKHLIKDAYEKIWGKQERVEPSNPHLLNPPNNTKISLIDLKTIKAKINKLKTNGAPGPDGLRKKHLKSNSIQNALCILYNLITLTGCYPSQWRQNRTTLIPKAGKNPEDISNWRPITISSVVARIYSACVAAELEKHTTLSRRQRGFVSGNGCYINTTILDDCIRTGKSSSLAAAQLDLTKAYDSIPHPTIKIALREQNVPEVIIEIVEQMYLGVTTIFSGTDIAVDIGQGVKQGDPLSSLLFNLVINRAISRVEKMTGFNILPNQQLSILAFADDLILLANNESDLQTILNVISEELDKIGLKISTSKSACFGITSGKKIWATKELNVSIQGEKLKNYSADERFDYLGATFTLTEGLSNKAQLNNISEAAKKCRKLSLKPAQKTTLFMQYVLPRFSYKLSIDPPSKTTLDAIDNEVRSECKKMLHLPHSTTDQLLYARKRDGGLGLLRLRNMVMLNAIRALSTTKTDSDSFIRAITKKCGFGKKIEAMAKKLNIALPASKKDINMVKLNFKIQEHQRWKSQISQGKGIETFKNNPLANHWLLYPRTLTSGDYIDMLKMRTNTFGVRESLIRAGYRHTNIRCRRCDTKNETLGHVLGECISGKAQRIKRHNNVVQQIAQCQPKSFDIYEEESFATPDGQLLKPDLLIKDGEKAYIVDVTVRYEQGESLAEAKQEKIRKYNVLRDTVKNQLKVNNVEVLPIVLGSRGAIPHTTENALRRLSVGRRTMINMVIGTIRSSISIGRAHIDYANSQRVL

SEQ ID NO: 3203 - protein, 1175 aa, Rhagonycha fulva
MRVHADSSESDDFGIDALLVNNHRDDLGYNLPYEGGRCNLCNFAFTKQKNLAQHYETHHPGAALFFLCTKCTKKFEKYHAGLCHHVKCRGNLPLQKNLHECPYCERTFATNQGVTTHKRYAHPNQRDKEKKALLEPTPLARVSGNTRSWTEEETKILIQEYIKCSGKNYAATIEPLIPNKSAKQISDRFHYLKTRKKPPPVLAEYLDKVRGLANIATPITTRSRTKNVSRDKDGLLAKDGGSTCSDQIHNKTKKFNNNIPNVTPMRRTVNVVNPEELLIATDSEDENYFSLQPGPSIGYIGSPNPSKNWKIAQRLKCVEHPQVAEPAKTLQSIAMKRFPTQMEIDKTVEDLTKLMKQTHEDKNQPKTQKPNRKHKYSERTKTKKSIYAKTQQLYKSNPSKLAEIVVGGNFDSLIGNDAIQPPKHLIKDAYEKIWGKQERVEPSNPHLLNPPNNTKISLIDLKTIRAKINKLKTNGAPGPNGLRKKHLKSNSIQNALCILYNLITLTGCYPSQWRQNRTTLIPKAGKNPEDISNWRPITISSVVARIYSACVAAELEKHTTLSRRQRGFVSGNGCYINTTVLDDCIRTGKSSSLAAAQLDLTKAYDSIPHPAIKIALREQNVPEVIIEIVKQMYLGVTTIFSGTDIAVDIGRGVKQGDPLSSLLFNLVINRAISRVEKMTGFNILPNQQLSILAFADDLILLANNESDLQTILNVISEELDQIGLKISTSKSACFGITSGGKIWATKELNVSIQGEKLKNYSADEKFDYLGATFTLMEGLSNKAQLKNISEAAKKCRKLSLKPAQKTTLFMQYVLPKFSYKLSIDPPSKTTLDAIDNEVRSECKKILHLPHSTTDQLLYARKRDGGLGLPRLRNMVMLNAIRALSTTKTDSDSFIRAITKKCGFGKKIEAMAKKLNIALPASKKDINMVKLNFKLQEHQRWKSQISQGKGIETFKNNSIANHWLLYPRTLTSGDYIDMLKMRTNTFGVRESLIRAGYRHTNIRCRRCDTKNETLGHVLGECISGKAQRIKRHNNVVQQIAQCQPKSFDIYEEESFATPDGQLLKPDLLIKDGEKAYIVDVTVRYEQGESLAEAKKEKILKYNVLRETVKTQLKVNNVEVIPIVLGSRGAIPHTTENALRRLSVGRRTMINMVIGTIKSSISIGRAHIDYANSQRVL

SEQ ID NO: 3204 - protein, 911 aa, Rhagonycha fulva
MRRTVNVVNPEELLIATDSEDENYFSPQPGPSIGYIGSPNPSKNWKIAQRLKCVEHPQVAEPAKTLQSIAMKRFPTQMEIDKTVEDLTKLMKQTHEDKNQPKTQKPNRKHKYSERTKTKKSIYAKTQQLYKSNPSKLAEIVVGGNFDSLIGNDAIQPPKHLIKDAYEKIWGKQERVEPSNPHPLNPPNNTKISLIDLKTIRAKINKLKTNGAPGPDGLRKKHLKSNSIQNALCILYNLITLTGCYPSQWRQNRTTLIPKAGKNPEDKSNWRPITISSVVARIYSACVAAELEKHTTLSRRQRGFVSGNGCYINTTVLDDCIKTGKSSSLAAAQLDLTKAYDSIPHPAIKIALREQNVPEVIIEIVEQMYLGVTTIFSGTDIAVDIGRGVKQGDPLSSLLFNLVINRAISRVEKMTGFNILPNQQLSILAFADDLILLANNESDLQTILNVISEELDQIGLKISTSKSACFGITSGGKIWATKELNVSIQGEKLKNYSADEKFDYLGATFTLMEGLSNKAQLKNISEAAKKCRKLSLKPAQKTTLFMQYVLPKFSYKLSIDPPSKTTLDAIDNEVRSECKKMLHLPHSTTDQLLYARKRDGGLGLPRLRNMVMLNAIRALSTTKTDSDSFIRAITKKCGFGKKIEAMAKKLNIALPASKKDINMVKLNFKIQEHQRWKSQISQGKGIETFKNNPIANHWLLYPRTLTSGDYIDMLKMRTNTFGVRESLIRAGYRHTNIRCRRCDTKNETLGHVLGECISGKAQRIKRHNNVVQQIAQCQPKSFDIYEEESFATPDGQLLKPDLLIKDGEKAYIVDVTVRYEQGESLAEAKKEKILKYNVLRETVKTQLKVNNVEVIPIVLGSRGAIPHTTENALRRLSVGRRTMINMVIGTIRSSISIGRAHIDYANSQRVL

SEQ ID NO: 3205 - protein, 1175 aa, Rhagonycha fulva
MRVRADSSESDDFGIDAPLVNNHRDDLGYNLPYEGGRCNLCNFAFTKQKNLAQHYETHHPGAAQFFLCTKCLKKFEKYHAGLCHHVKCRGNLPLQKNLHKCPYCERTFATNQGVTTHKRYAHPNQRDKEKKALLEPTPLARVSGNTRSWTEEETKILIQEYIKCSGKNYAATIEPLIPNKSAKQISDRFHYLKTRKKPPPVLAEYLDKVRGLANIATPITTRSRTKNVSRDKDGLLAKDGGSTCSDQLHNKTKKFNNNIPNVTPMRRTVNVVNPEELLIATDSEDENYFSPQPGPSIGYIGSPNPSKNWKIAQRLKCVEHPQVAEPAKTLQSIAMKRFPTQMEIDKTVEDLTKLMKQTHEDKNQPKTQKPNRKHKYSERTKTKKSIYAKTQQLYKSNPSKLAEIVVGGNFDSLIGNDAIQPPKHLIKDAYEKIWGKQERVEPSNPHPLNPPNNTKISLIDLKTIRAKINKLKTNGAPGPDGLRKKHLKSNSIQNALCILYNLITLTGCYPSQWRQNRTTLIPKAGKNPEDISNWRPITISSVVARIYSACVAAELEKHTTLSRRQRGFVSGNGCYINTTVLDDCIKTGKSSSLAAAQLDLTKAYDSIPHPAIKIALREQNVPEVIIEIVEQMYLGVTTIFSGTDIAVDIGRGVKQGDPLSSLLFNLVINRAISRVEKMTGFNILPNQQLSILAFADDLILLANNESDLQTILNVISEELDQIGLKISTSKSACFGITSGGKIWATKELNVSIQGEKLKNYSADEKFDYLGATFTLMEGLSNKAQLKNISEAAKKCRKLSLKPAQKTTLFMQYVLPKFSYKLSIDPPSKTTLDAIDNEVRSECKKMLHLPHSTTDQLLYARKRDGGLGLPRLRNMVMLNAIRALSTTKTDSDSFIRAITKKCGFGKKIEAMAKKLNIALPASKKDINMVKLNFKIQEHQRWKSQISQGKGIETFKNNPIANHWLLYPRTLTSGDYIDMLKMRTNTFGVRESLIRAGYRHTNIRCRRCDTKNETLGHVLGECISGKAQRIKRHNNVVQQIAQCQPKSFDIYEEESFATPDGQLLKPDLLIKDGEKAYIVDVTVRYEQGESLAEAKKEKILKYNVLRETVKTQLKVNNVEVIPIVLGSRGAIPHTTENALRRLSVGRRTMINMVIGTIRSSISIGRAHIDYANSQRVL

SEQ ID NO: 3206 - protein, 1174 aa, Rhagonycha fulva
MRVRADSSESDDFGIDAPLDNNHRDDFGYNLPYEGGRCNLCNLAFTKQKNLVQHYETHHPGAALFFLCTKCTKKFEKYHAGLCHHVKCRGNLPLQKNLHKCPYCERTFATNQGVTTHKRYAHPNQRDKEKKALLEPTPLARVSGNTRSWTEEETKILIQEYIKCSGKNYAATIEPLIPNKSAKQISDRFHYLKTRKKPPPVLAEYLDKVRGLANIATPITTRSRTKNVSRDEDGLLAKDGRSTCSDQVHYKTMKSNNNIPNETPMRRSVNVVNSEEILIATDSEDENYLSPQPGPSTGYIGSPNPTKNWKIAQRLKCVEHPQVAEPAKTLQSIAMKRFPTQMEIDRTVEDLTKLMKQTHEDKNQPKTQKPNRKHKYSERTKTKKSIYAKTQQLYKSNPSKLAEIVVGGNFESLIGNDAIQPPKHLIKDAYEKIWGKQERVEPSNPHLLNPPNNTKISLIDLKTIKAKINKLKTNGAPGPDGLRKKHLKSNSIQNALCILYNLITLTGCYPSQWRQNRTTLIPKAGKNPEDISNWRPITILSVVARIYSACVAAELEKHTTLSRRQRGFVSGNGCYINTTILDDCIRTGKSSSLAAAQLDLTKAYDSIPHPTIKIALREQNVPEVIIEIVEQMYLGVTTIFSGTDIAVDIGQGVKQGDPLSSLLFNLVINRAISRVEKMTGFNILPNQQLSILAFADDLILLANNESDLQTILNVISEELDKIGLKISTSKSACFGITSGKKIWATKELNVSIQGEKLKNYSADERFDYLGATFTLTEGLSNKAQLNNISEAAKKCRKLSLKPAQKTTLFMQYVLPRFSYKLSIDPPSKTTLDAIDNEVRSECKKMLHLPHSTTDQLLYARKRDGGLGLPRLRNMVMLNAIRALSTTKTDSDSFIRAITKKCGFGKKIEAMAKKLNIALPASKKDINMVKLNFKIQEHQRWKSQISQGKGIETFKNNPLANHWLLYPRTLTSGDYIDMLKMRTNTFGVRESLIRAGYRHTNIRCRRCDTKNETLGHVLGECISGKAQRIKRHNNVVQQIAQCQPKSFDIYEEESFATPDGQLLKPDLLIKDGEKAYIVDVTVRYEQGESLAEAKQEKIRKYNVLRDTVKNQLKVNNVEVLPIVLGSRGAIPHTTENALRLSVGRRTMINMVIGTIRSSISIGRAHIDYANSQRVL

SEQ ID NO: 3207 - protein, 1175 aa, Rhagonycha fulva
MRVRADSSESDDFGIDAPLVNNHRDDLGYNLPYEGGRCNLCNFAFTKQKNLAQHYETHHPGAALFFLCTKCLKKFEKYHAGLCHHVKCRGNLPLQKNLHKCPYCERTFATNQGVTTHKRYAHPNQRDKEKKALLEPTPLARVSGNTRSWTEEETKILIQEYIKCSGKNYAATIEPLIPNKSAKQISDRFHYLKTRKKPPPVLAEYLDKVRGLANIATPITTRSRTKNVSRDKDGLLAKDGGSTCSDQLHNKTKKFNNNIPNVTPMRRTVNVVNPEELLIATDSEDENYFSPQPGPSIGYIGSPNPSKNWKIAQRLKCVEHPQVAEPAKTLQSIAMKRFPTQMEIDKTVEDLTKLMKQTHEDKNQPKTQKPNRKHKYSERTKTKKSIYAKTQQLYKSNPSKLAEIVVGGNFDSLIGNDAIQPPKHLIKDAYEKIWGKQERVEPSNPHPLNPPNNTKISLIDLKTIRAKINKLKTNGAPGPDGLRKKHLKSNSIQNALCILYNLITLTGCYPSQWRQNRTTLIPKAGKNPEDISNWRPITISSVVARIYSACVAAELEKHTTLSRRQRGFVSGNGCYINTTVLDDCIKTGKSSSLAAAQLDLTKAYDSIPHPAIKIALREQNVPEVIIEIVEQMYLGVTTIFSGTDIAVDIGRGVKQGDPLSSLLFNLVINRAISRVGKMTGFNILPNQQLSILAFADDLILLANNESDLQTILNVISEELDQIGLKISTSKSACFGITSGGKIWATKELNVSIQGEKLKNYSADEKFDYLGATFTLMEGLSNKAQLKNISEAAKKCRKLSLKPAQKTTLFMQYVLPKFSYKLSIDPPSKTTLDAIDNEVRSECKKMLHLPHSTTDQLLYARKRDGGLGLPRLRNMVMLNAIRALSTTKTDSDSFIRAITKKCGFGKKIEAMAKKLNIALPASKKDINMVKLNFKIQEHQRWKSQISQGKGIETFKNNPIANHWLLYPRTLTSGDYIDMLKMRTNTFGVRESLIRAGYRHTNIRCRRCDTKNETLGHVLGECISGKAQRIKRHNNVVQQIAQCQPKSFDIYEEESFATPDGQLLKPDLLIKDGEKAYIVDVTVRYEQGESLAEAKKEKILKYNVLRETVKTQLKVNNVEVIPIVLGSRGAIPHTTENALRRLSVGRRTMINMVIGTIRSSISIGRAHIDYANSQRVL

SEQ ID NO: 3208 - protein, 949 aa, Synergus gifuensis
MDEEQRIMARREAELVVLGTRYINVALAQEFPERTPCSIKSHRRLDSYKAMVLEALEQIRDERRPDPPRRRRGRRSLLEAPNEAEEDPFRIFFASLERPEEDSDDAFHLQELYQICSDTLMRSKEAIALRVSLYLQRILPPVRPGFLHIKVPQVRRPMSKRKERRKQYAKTQLQYNKSRRRCIVDILQQSQDTIQPPREVMEPFWVNVLTQESAADPRFPEVEEIKDFWKPITMEDIEMNMVKRNTAPGPDGLNGKDYWKIPKKVLLCLFNLLLWTERLPKSLLASRTIFIPKAGHEDEPDKYRSITISSILVRGLHRILASRLENAIAIDQRQRGFRSGIDGCRDNVFQLDMILRQHNQSFEPLYMASVDVAKAFPSVSHRALIAALRSFGIPSQFLRYVAYIYENNFTILQGQGWLSGEIKPRRGVRQGDPLSSPIFNIVTHRLLEALPKEVGVRIGDNVVNASAFADDVNLYATTPKGLQSMINILVDFLGQCGMSINVDKSFALGFKPNRKLKITTMDITTKFFVGDRSLRTLRRSDEWTYLGVPFTWAGRKRIQLRGVLVQDLERLTKAPLKPQQRLFALRTMVLPKVYHQLALGNVLLGALKSADKASRSAVRKWLNLPHDVPNAYIHSPVAEGGLGIPSLRWIAPLMRKGRLESLRNVVNPAAHSFLEREIAVCQRRLMDQRIIFNSLSDINNWWATKLHNSVDGGGLSQSAKTPGQHSWVADGTRFLSGKDFINSCRLRISALPTKSRTSRGRHEDRTCRAGCQTPETLNHVISRCFRTHLKRVQRHDAVAKYVAKKFQQDDYQVKLEPHIATEEGLRKPDILAFKNNKVLVLDAQIVGEQFDLRRAHRNKSKYYSENPGILSYIRNELSLPNAGVTFGSITLNWKGVWSAESASDLKGWGFTQKDLKIMSSRVIVGGIAAFRMFNQVTSVRRMHNRVGVG

SEQ ID NO: 3209 - protein, 977 aa, Tuta absoluta
MSQPIPPTAASYDGQSSSLSQNLYFQCELCDGLPKYFKTRRGLNIHIAKKHHPIRISPVPGSTDPILPIQQTEPPNTVHEPNSKPFWKTLSNLKNSVPVIKRIPRGARSSVANSLKSCIDRVVISNSISHWRELLTFSYYVLHVNKDDNRKLSLTQKVKNNCSYPTPRPPAPANASGPKPPAHHSRRPHNVFRAVETKVSDGDLRGASQLLFSSDLIAPDNDETLRSLHDKHPSPLAACQLPDPQQDGNIPPTVTAEDIIPAIMSFKNGSCGGLDGISPQHLKDLVCYSTGAVGNNLASSLAALANVMLAGKVNTEVLDILYGANLCALKKKDGCIRPIAVGTTLRRLVAKICCKHITRPLAAKFQPLQMGFGSKGGCEAAVHATRTILKNDAIQVLLKVDVKNAFNSIDRGALLTQVKENTPAIFQFLWQCYSSPSKLVYKSHLLHSTVGCQQGDPLGPAIFCLGIHPIISSMRSKLNVWYLDDGTLGGQPDEVLDDLQNLISRFSEIGMELNFAKCELYIHPSIAPECRNDILDKFNNVAPNIRTITQDSLRLLRAPLLDEGITPFMQEQIAKFEDTFDRLLKLNPHIALTIIKYCLFVPKFTYVLRCCHLWKFPILLSAVDDQISILLSKILICDLPAEAWSQASLPVRFGGIGIRKVTSVSLPAYLSSAYSCHQLFHKIVGSTLGAAEIVHLSEAVDTWKSLCCHDPPDAMHLQRRWDEPLCQKTQVDLMNACSCPVQRARLLAAFERESGLWLNAVPSKNTGTLLDSCTLSLAVALRLGLKTVHPHQCKCGAPVTEYGHHGLTCRMSAGRIPRHAALNDILRRALASANVPAKLEPNGIVRSDGKRPDGVTLIPWQRGKCIWDTLAPSHIHATCARAGAAAAGAEAAKARKYEEISGSLIFCPVGFETMGTWGPSAKKVIYEVSARLNETTGDRRAGSFFGQRLSLAIQRGNVASLQGNMSDGGALEDLFVV

SEQ ID NO: 3210 - protein, 983 aa, Tuta absoluta
MSQPIPPTAASYDGQSSSLSQNLYFQCELCDGLPKYFKTRRGLNIHIAKKHHPIRISPVSSTTDPILPIQQIEPPNTVHEANSKPFWKTLSNLKNSVPVIKRIPRGARSSVANSLKSCIDRVVISNSISHWRELLTFSYYVLHVNKDDNRKLSVTQKVKNNCSYPTPRPPAPANASGPKPPAHHSRRPHNVFRAVETKVSDGDLRGASQLLFSSDLIAPDNDETLRSLHAKHPSPLAACQLPDPQQDGNIPPTVTAEDIIPAIMSFKNGSCGGLDGISPQHLKDLVCYSTGAVGNNLASSLASLANVMLAGKVNTEVLDILYGANLCALKKKGGGIRPIAVGTTLRRLVAKICCKHITRPLAAKFQPLQMGFGSKGGCEAAVHATRTILKNDAIQVLLKVDVKNAFNSIDRGALLTQVKENTPAIFQFLWQCYSSPSKLVYKSHLLHSTVGCQQGDPLGPAIFSLGIHPIISSMRSKLNVWYLDDGTLGGQPDEVLDDLQNLISRFSEIGLELNFAKCELYIHPSIAPECRNDIQDKFNNVAPNIRTITQDSLRLLGAPLLDEGITPFMQEQIAKFEDKFNRLLKLNPHIALTIIKYCLFVPKFTYVLRCCHLWKFPILLSAVDDQISILLSKILNCDLPAEAWSQASLPVRFGGIGIRKVTSVSLPAYLSSAYSCHQLFHKIVGSTLGAAEIVHLSEAVDTWKSLCCRDPPDAMHLQRRWDEPLCQKTQVDLMNACSCPVQRARLLAAFERESGLWLNAVPSENTGTLLDSCTLSLAVALRLGLKTVHPHQCRCGAPVTEYGHHGLTCRMSAGRIPRHAALNDILRRALASANVPAKLEPNGIVRSDGKRPDGVTLIPWQRGKCMVWDVTCVDTLAPSHIHATCARAGAAAAGAEAAKARKYEEISGSLIFSPVGFETMGTWGPSAKKVIYEVSPRLNETTGDRRAGSFFGQRLSLAIQRGNVASLLGTMSDGGALEDLFIV

SEQ ID NO: 3211 - protein, 720 aa, Tuta absoluta
MSFKNGSCGGLDGISPQHLKDLVCYSTGAVGNNLASSLASLANVMLAGKVNTEVLDILYGANLCALKKKDGGIRPIAVGTTLRRLVAKICCKHITRPLAAKFQPLQMGFGSKGGCEAAVHATRTILKNDAIQVLLKVDVKNAFNSIDRGALLTQVKENTPAIFQFLWQCYSSPSKLVYKSHLLHSTVGCQQGDPLGPAIFSLGIHPIISSMRSKLNVWYLDDGTLGGQPDEVLDDLQNLISRFSEIGLELNFAKCELYIHPSIAPECRNDIQDKFNNVAPNIRTTTQDSLRLLGAPLLDEGITPFMQEQIAKFEDTFDRLLKLNPHIALTIIKYCLFVPKFTYVLRCCHLWKFPILLSAVDDQISILLSKTLNCNLPGEAWSQASLPVRFGGIGIRKVTSVSLPAYLSSAYSCHQLFHKIVVSTLGAAEIVHLSEAVDTWKSLCCRDPPDAMHLQRRWDEPLCQKTQVDLMNACSCPVQRARLLAAFERESGLWLNAVPSENTGTLLDSCTLSLAVALRLGLKTVHPHQCRCGAPVTEYGHHGLTCRMSAGRIPRHAALNDILRRALASANVPAKLEPNGIVRSDGKRPDGVTLIPWQRGKCMVWDITCVDTLAPSHIHATCARAGAAAAGAEAAKARKYEEISGSLIFSPVGFETMGTWGPSAKKVIYEVSARLNETTGDRRAGSFFGQRLSLAIQRGNVASLLGTMSDGGALEDLFIV

SEQ ID NO: 3212 - protein, 983 aa, Tuta absoluta
MSQPIPSTATPYDGQSSTLSQHPYFQCELCNGFPKYFGTRRGLNIHIGKKHKPIRSSPFPGTTDPISSLQQVDPPSTVHESTSTPFWQTLSELKNSIPVIKRIPRGARSSVANSLKSCVDRVVSSNCDLHWRELLTFSYHVLHVNKDSNTKLSLTQKIKNNCRYPAPYQPAPASVVDPKPHAQQRRRPHNIFRAVEEKVSDGDLRGASQLLFSSDLIAPDNEETLHSLHAKHPSPLAACHLPDPQQDGIIPPTVTADDIISAIMSFKNGSSGGLDGLSPQHLKDLVCFSTGDLDSNLSSSLASLVNVMLAGKVSAEILDVLYGANLCALKKKDGGIRPIAVGTTLRRLAAKICCKHISRPLAAKFQPHQMGFGSKGGCEAAVHATRAVLKNDAIQVLLKVDVKNAFNSIDRGALLTQVKEHCPTIFPFLWQCYSKPSKLIYKSHLLHSTVGCQQGDPLGPAIFSLGIHPVISSLQAKLNVWYLDDGTLGGQPDVVLNDLQILISRFSDKGLELNFAKCELYIHPSVAPECRDDIHQKFNDAAPNIRTITQDSLRLLGAPLLDEGISPFIQEQVAKFEDTFDRLLNINPHIALTVIKFSLFVPQFTYVLRCCPLWQFPGLLSGVDDRISILLSRIMNCDLSVDAWSQASLPVRFGGIGVRKVSSVSLPAYLSSAYSCHQLFSKIVSPSLGVAEIVHLPEAVDTWKSLCCRDPPDAMHLQRRWDEPFCEKIQQDLMSSCSCPVQRARLLAVFERESGLWLNAIPSANTGTLLDSCTLSLIIALRLGLKTVHPHQCRCGAPVNELGHHGLSCRMSAGRIPRHAALNDVLSRALVSANVPAKLEPNGIVRSDGKRPDGVTLIPWQRGKCMVWDATCVDTLAPSHIYATCARAGAAAAGAEVAKTRKYEEISGSHIFSPVGFETMGPWGPSAKKLVNEVSARLNETTGDRRAGSFLGQRLSLAIQRGNAASVLGTMSNGGALDDFFLA

SEQ ID NO: 3213 - protein, 981 aa, Tuta absoluta
MSQPIPSTATPYDGQSSTLSQHPYFQCELCNGFPKYFGTRRGLNIHIGKKHKPIRSSPFPGTTDPISSLQQVDPPSTVHESTSTPFWQTLSELKNSIPVIKRIPRGARSSVANSLKSCVDRVVSSNCDLHWRELLTFSYHVLHVNKDSNTKLSLTQKIKNNCRYPAPYQPAPASVVDPKPHAQQRRRPHNIFRAVEEKVSDGDLRGASQLLFSSDLIAPDNEETLHSLHAKHPSPLAACHLPDPQQDGIIPPTVTADDIISAIMSFKNGSSGGLDGLSPQHLKDLVCFSTGYLGSNLSSSLASLVNVMLAGKVSAEILDVLYGANLCALKKKDGGIRPIAVGTTLRRLAAKICCKHISRPLAAKFQPHQMGFGSKGGCEAAVHATRAVLKNDAIQVLLKVDVKNAFNSIDRGALLTQVKEHCPTIFPFLWQCYSKPSKLIYKSHLLHSTVGCQQGDPLGPAIFSLGIHPVISSLQAKLNVWYLDDGTLGGQPDVVLNDLQIPISRFSDIGLELNFAKCELYIHPSVAPECRDDIHQKFNDAAPNIRTITQDSLRLLGAPLLDEGISPFIQEQVAKFEDTFDRLLNINPHIALTVIKFCLFVPQFTYVLRCCPLWQFPGLLSGVDDRISILLSRIMNCDLSVDAWSQASLPVRFGGIGVRKVSSVSLPAYLSSAYSCHQLFSKIVSPSLGVAEIVHLPEAVDTWKSLCCRDPPDAMHLQRRWDEPFCEKIQQDLMSSCSCPVQRARLLAVFERESGLWLNAIPSANTGTLLDSCTLSLIIALRLGLKTVHPHQCRCGAPVNELGHHGLSCRMSAGRIPRHAALNDVLRRALVSANVPAKLEPNGIVRSDGKRPDGVTLIPWQRGKCMVWDATCVDTLAPSHIYATCARASAAAAGAEVAKSRKYEEISGSHIFSPVGFETMGPWGPSAKKLVNEVSARLNETTGDRRAGSFLGQRLSLAIQRGNAASVLGTMSNGGALDDFF

SEQ ID NO: 3214 - protein, 982 aa, Tuta absoluta
MSQPIPSTATPYDGQSSTLSQHPYFQCELCKGFPKYFSTRRGLNIHIGKKHKPIRSSPFPGTTDPISSLQQVDPPNTVHESTSTPFWQTLSELKNSIPVIKRIPRGARSSVANSLKSCVDRVVSSNCDLHWRELLTFSYHVLHVNKDSNTKLSLTQKIKNNCRYPAPYQPAPASVVDPKPHAQQRCRPHNIFRVVEEKVSDGDLRGASQLLFSSDLIAPDNEETLHSLHAKHPSPLAACHIPDPQQDGIIPPTVTADDIIPAIMSFKNGSSGGLDGLSPQHLKDLCLCFSTGDLGSNLSSSLASLVNVMLAGKVSAEILDVVYGANLCALKKKDGGIRPIAVGTTLRRLAAKICCKHISRPLAAKFQPHQMGFGSKGGCEAAVHATRAVLKNDAIQVLLKVDVKNAFNSIDRGALLTQVKEHCPTIFPFLWQCYSKPSKLINKSHLLHSTVGCQQGDPLGPAIFSLGIHLVISSLQAKLNVWYLDDGTLGGQPDVVLNDLQILISRFSEIGLELNFAKCELYIHPSVAPECRDNIHQKFNDAAPNIRTITQDSLRLLGAPLLDEGISPFIQEQVAKFEDTFDRLLNINPHIALTVIKFCLFVPQFTYVLRCCPLWQFPGLLSGVDDRISILLSRIMNCDLSVDAWSQASLPVRFGGIGVRKVSSVSLPAYLSSAYSCHQLFSKIVSPSLGVAEIVHLPEAVDTWKSLCCRDPPDAMHLQRRWDEPLCEKIQQDLMSSCSCPVQRARLLAVFERESGLWLNAIPSANTGTLLDNCTLSLIIALRLGLKTVHPHQCRCGAPVNELGHHGLSCRMSAGRIPRHAALNDVLRRALVSANVPAKLEPNGIVRSDGKSPDGVTLIPWQRGKCMVWDATCVDTLAPSHIHATCARAGAAAAGAEVAKSRKYEEISGSHIFSPVGFETMGPWGPSAKKLVNEVSARFNETTGDRRAGSFLGQRLSLAIQRGNAASVLGTMSNGGALDDFI

SEQ ID NO: 3215 - protein, 722 aa, Tuta absoluta
MSFKNGSSGGLDGLSPQHLKDLVCFSTGDLGSNLSSSLASLVNVMLAGKVSAEILDVLYGANLCALKKKDGGIRPIAVGTTLRRLAAKICCKHISRPLAAKFQPHQMGFGSKGGCEAAVHATRAVLKNDAIQVLLKVDVKNALNSIDRGALLTQVKEHCPTIFPFLWQCNTMCKPSKLIYKSHLLHSTVGCQQGDPLGPAIFSLGIQPVISSLQAKLNVWYLDDGTLGGQPDVVLNDLQILISRFSDIGLKLNFAKCELYIHPSVAPECRDDIHQKFNDAAPNIRTITQDSLRLLGAPLLDEGISPFIQEQVAKFEDTFDRLLNINPHIALTVIKFCLFVPQFTYVLRCCPLWQFPGLLSGVDDRISILLSRIMNCDLSVDAWSQASLPVRFGGIGVRKVSSVSLPAYLSSAYSCHQLFSKIVSPSLGVAEIVHLPEAVDTWKSLCCRDPPDAMHLQRRWDEPFCEKIQQDLMSSCSCPVQRARLLAVFERESGLWLNAIPSANTGTLLDSCTLSLIIALRLGLKTVHPHQCRCGAPVNELGHHGLSCRMSAGRIPRHAALNDVLRRALVSANVPAKLEPNGIVRSDGKRPDGVTLIPWQRGKCMVWDATCVDTLAPSHIYATCARAGAAAAGAEVAKTRKYEEISGSHIFSPVGFETMGPWGPSAKKLVNEVSARLNETTGDRRAGSFLGQRLSLAIQRGNAASVLSTMSNGGALDDFFLA

SEQ ID NO: 3216 - protein, 910 aa, Tuta absoluta
MSQPIPSTATPYDGQSSTLSQHPYFQCELCNGFPKYFVTRRGLNIHIGKKHKPIRSSPFPGTTDPISSLHQVDPPSTVHESTSTPFWQTLSELKNSIPVIKRIPRGARSSVANSLKSCVDRVVSSNCDLHWRELLTFSYHVLHVNKDSNTKLSLTQKIKNNCRYPAPYQPAPASVVDPKPHAQQRRRPHNIFRAVEEKVSDGDLRGASQLLFSSDLIAPDNEETLHSLHAKHPSPLAACHLPDPQQDGIIPPTVTADDIISAIMSFKNGSSGGLDGLSPQHLKDLVCFSTGDLGSNLSSSLASLVNVMLAGKVSAEILDVLYGANLCALKKKDGGIRPIAVGTTLRRLAAKICCKHISRPLAAKFQPHQMGFGSKGGCEAAVHATRAVLKNDAIQVLLKVDVKNAFNSIDRGALLTQVKEHCPTIFPFLWQCYSKPSKLIYKSHLLHSTVGCQQGDPLGPAIFSYGIHPVISSLQAKLNVWYLDDGTLGGQPDVVLNDLQILISRFSDIGLELNFAKCELYIHPSVAPECRDDIHQKFNDAAPNIRTITQDSLRLLGAPLLDEGISPFIQEQVAKFEDTFDRLLNINPHIALTVIKFCLFVPQFTYVLRCCPLWQFPGLLSGVDDRISILLSRIMNCDLSVDAWSQASLPVRFGGIGVRKVSSVSLPAYLSSAYSCHQLFSKIVSPSLGVAEIVHLPEAVDTWKSLCCRDPPDAMHLQRRWDEPFCEKIQQDLMSSCSCPVQRARLLAVFERESGLWLNAIPSANTGTLLDSCTLSLIIALRLGLKTVHPHQCRCGAPVNELGHHGLSCRMSAGRIPRHAALNDVLRRALVSANVPAKLEPNGIVRSDGKRPDGVTLIPWQRGKCMVWDATCVDTLAPSHIYATCARAGAAAVPQIRGDFWEPHFLTRGL

SEQ ID NO: 3217 - protein, 768 aa, Tuta absoluta
MAPHDEDTLRSLRDKHPAPSRQLCFPPPPDLSIGQITFKAEDVVRALNTFHNGSSSGLDGIRPQHLKELTSLAAGESGVRLIESLVKLVNFLYSGRLNPDVCPFLYGASLCALTKKDGGIRPIAVGSTLRRLAAKVGCYHVREDMVAILLPHQLGFGTSQGCEAAIHATRAFVMAPESSGRVVVKLDLKNAFNSIERDCLLSAVKEHIPSLYPFLCQVYASDSNLYYGDDLILSRVGAQQGDPLGPLVFSLAINSIISELKSPLNLWYLDDGTLGGDPDTIVDDLQVLFTRFQGLGLEVNTAKCEFFACSAAASSCLPRFQTVIPGIRELNSESFSLLGSPIFQEAIPEALEAKNSSMTFDRLQHLPAHVALVLLRLCFSIPKSTYLIRTCPTWLFPRQCEVLAETLRLALEGLLNVSLEGDHWTQASLPIRHGGLGVRRVCDVGLAAFLASSRGVSDLVARILSCDGCEVRIPFQEEALSVWIAANPGQSLPDPSHVQRSWDDVGCKVTLERLINEATGVDVARLRAVSTPESGAWLHAMPSPSMGTFLDDDSLRVAVALRLGCNVCEPHLCICGSMVEANGHHALSCQRCSGRFPRHHALNDLLRRALISVNVPCTLEPPGLSRSDGKRPDGLTMVPWKRGRCLIWDATCLSTFAPSHLSRTTRAAGAAAEFGAKQKHSKYSALEASYLFVPFAVETVGPWCGEARTFVAEIGQRMREKGGDPRSGSFLVQRLSVAIQRGNAASLMGTFGPGMIRGGIFDIKMTKT

SEQ ID NO: 3218 - protein, 770 aa, Tuta absoluta
MAPHDEDTLRSLRDKHPAPSRQLCFPPPPDLSIGQITFKAEDVVRALNTFHNGSSSGLDGIRPQHLKELTSFAAGESGVRLIESLVKLVNFLYSGRLNPDVCPFLYGASLCALTKKDGGIRPIAVGSTLRRLAAKVGCYHVREDMVAILLPHQLGFGTSQGCEAAIHATRAFVMAPESSGKVVVKLDLKNAFNSIERDCLLSAVKEHIPSLYPFLCQVYASDSNLYYGDDLILSRVGAQQGDPLGPLVFSLAINSIISELKSPLNLWYLDDGTLGGDPDTIVDDLQVLFTRFQSLGLEVNTAKCEFFACSAAAGSCLPRFQTVIPGIRELNSESFSLLGSPIFQESIPEALEAKNNSITVAFDRLQHLPAHVALVLLRLCFSIPKLTYLIRTCPTWLFPRQCEVLDETLRLALEGLLNVSLEGDHWTQASLPIRHGGLGVRRVCDVGLAAFLASSRGVSDLVARILSCDGCEVRIPFQEEALSVWIAANPGQSLPDPSHVQRSWDDVGCRVTLERLINEATGVDVARLRAVSTPESGAWLHAMPSPSMGTFLDDDSLRVAVALRLGCNVCEPHLCICGSMVEANGHHALSCQRCSGRFPRHHALNDLLRRALISVNVPCTLKPPGLSRSDGKRPDGLTMVPWKRGRCLIWDATCLSTFAPSHLSRTTRAAGAAAEIGAKQKHSKYSALEASYLFVPFAVETVGPWCGEARTFVAEIGQRMREKGGDPRSGSFLVQRLSVAIQRGNAASLMGTFGPGMIRGGIFNIKVTKT

SEQ ID NO: 3219 - protein, 954 aa, Tuta absoluta
MVLCPYCPGSSKEYAGNRGLQIHIGHKHKDVSGGQPAQATAPPASDTIVPITPAGSQSPRSAKNQLFELAILKKSVPVLKHIPKGARCQAAGRLGDIIENCLSSNGVADWFLLLSFAYNALRVPERGDPAALTTKVKRNIESNVIHLPDGSSGSRPYSIYKSIQSKVFEGDLRGAVRLLVSDGSMAPHDEDTLRSLRDKHPAPSRQLCFPPPPDLSIGQITFKAEDVVRALNTFHNGSSSGLDGIRPQHLKELTSLAAGESGVRLIESLVKLVNFLYSGRLNPDVCPFLYGASLCALTKKDGGIRPIAVGSTLRRLAAKVGCYHVREDMVAILLPHQLGFGTSQGCEAAIHATRAFVMAPESSGKVVVKLDLKNAFNSIERDCLLSAVKEHIPSLYPFLCQVYASDSNLYYGDDLILSRVGAQQGDPLGPLVFSLAINSIISELKSPLNLWYLDDGTLGGDPDTIVDDLQVLFTRFQSLGLEVNTAKCEFFACSAAAGSCLPRFQTVIPGIRELNSESFSLLGSPIFQEAIPEALEAKNNSMTVAFDRLQHLPAHVALVLLRLCFSIPKLTYLIRTCPTWLFPRQCEVLDETLRLALEGLLNVSLEGDHWTQASLPIRHGGLGVRRVCDVGLAAFLASSRGVSDLVARILSCDGCEVRIPFQEEALSVWIAANPGQSLPDPSHVQRSWDDVGCRVTLERLINEATGVDVARLRAVSTPESGAWLHAMPSPSMGTFLDDDSLRVAVALRLGCNVCEPHLCICGSMVEANGHHALSCQRCSGRFPRHHALNDLLRRALISVNVPCTLEPPGLSRSDGKRPDGLTMVPWKRGRCLIWDATCLSTFAPSHLSRTTRAAGAAAEFGAKQKHSKYSALEASYLFVPFAVETVGPWCGEARTFVAEIGQRMREKGGDPRSGSFLVQRLSVAIQRGNAASLMGTFGPGMIRGGIFDIKVTKT

SEQ ID NO: 3220 - protein, 1274 aa, Aphis gossypii
MSRRVTRQTATVDYTGSSQIPGPSTRNDADPAPTTTATAPRRRTSSQPPSSQTRPGRVAGPSPQNATGTSVARKQPQINGDMLTYFFPPPATITCPHGDCSAKFRAEVWTSAKQSLGRHLLSMHLVPTTTVVKCTGCDATLGVRPGSHKCTVAIANDGGAADRFACTMIDCTRTYPSKQGLANHMRSHQLRAATVIANVPLPQPATRQRLRANPAPRVARGGDAIRPISPRAAPAPPENMFSSPEHSMTSEDTTIISLSYTSSDTNSTGSSATPLTTASSGLLPAGVDDTITSENNDPANPEIDHMADNTAIPIPDHEEPLVTTNADDDDDISIVSDGSTIEDDDHGDIEVDLVDDEADISRPGNEDLDTILSPDDTTPIHAFLFDARVISRAPVNDNTWASFCSLLDEITTEAAKIVKLPSREAAQSMIRAPFDPEDAQKIQKLYRRNRRQAVRLILAGESLKCDIPVERAEQHFKESWGPSSCDPTIYPQHDREPVHLLPFEAQEVCKRLRKFENTSPGDDGLTYAHWKRLDPSCSLLAVLLNTCLKHRRIPESWKTTTTILIHKKGDPDTISNWRPIALCRTLYKLYTGCLASRMTQWLVAKEVVSHCQKGFLPADGAFEHVYTLQRRLEIARTQKEDCCVAWLDVSNAFGEVPHNALITAIVNSGAGDGLRQIVEDMYTGASSKVITSSGTTNSIPVRSGIRQGCPLSGLLFILAIDPVVRTLQDGSEEHSVLAFADDLCLLEDNPDDLQAKINTADAELKRLGLKINPSKCASLHMSGKSPVGVRQTTVKIREHLIKPLQEGEAASFLGAQVGFNIVPHMASLKQISDIGLAIMRSKLAPWQRLDALKTFFFPSTVHLMRLGTFQKTTWEKIDKIIRPEIKNTLYVPQEAAGDYLYGSTDRGCCGIRLLAEDSDIAAVDSAFKLLSSPDIRVASDARSHVFSTTQNRIGKSPSTEEVGQYLTGEEGGPFGSTRGTGVRGVWSRARMASKRLKVLWNLENGAVKITHRDTTLTPKHRRAVMRSLRNDLRLDRSSDLIAKPDQGRAVECAAAHPASMHFLRNGDYTRFADWRFIHRARLNLVPLNGSASWRSGDRRCRRCGYITESLAHVVDHCMRYTSLYLARHNSVVTRLKNAASSRCEILYENQVCGSGGLRPDLVIKKGKKIFIIDVSIPFDNRINAFKASADERLERYKQTCEELARLHDVEAVVIPIIVGALGSWHPPNDELLKIICSQKYAAMMRKLCVSEVIGFSRDIYIQHLTDIPQRGLQA

SEQ ID NO: 3221 - protein, 927 aa, Protaetia brevitarsis
MHNQNLTLSTQQDLKKPKPKTKPWEVRLERQIENTRKDIALLTLAVGANALSKRVERKVNFILNKYRDDDNQNKIQILDLLKQKLAAKAHRLRRYKESTQRKMQNKLFQANQKAFYRRLENTNNDQPKPQIASTDVLQYWNGIWGLETKHKTNASWIKNEKSKNSKLKYMTDQEITTAEVKDALKKMLNWKAPGIDQIHNFWLKKFSCMHEKLTTLLNNLLMDPHNIPPFFTTGITYLIPKTVIPSQDPGDYRPITCLPTMYKLFTSVITNKIYDHILQHDIITEEQKGCRRGSRGCKEQILIDSVITEETKKTKQDLYWAYIDYKKAFDSVPHSWLKEVLKIYKITPAIVSTLTALMGEWRTNIQLNNDSVGVVRIKKGIFQGDSLSALWFCLALNPLSSTLNNRKSGYRFKNSLVTINHLVYMDDIKLVAKTQKELQQLLKDVEIFSQDIQMQFGVQKCRLNSIRKGEFQMLEPHVINDGENVIEPMDKNEVYKYLGVLQSHKVEHRRMKANVTNTYRERLRQLLKTKLTAGNMAKAVNTYAIPLVTYTFGIIRWTATELHDLNRITRKEFTRNRMHHPHSSAARFHLTRRKGGRGILDMVRMHDRMVTSLRTFFYEKAETSEMHRCIVQTDKKYTPLNLHDPTYRHQAISTDDDLIREWTSKPLHGRYINNVNQQCIDGDASHQWLREGTLFPETEGFLISIQDQVVPTLNYRKHIIKDAQVKDDRCRMCRLKPENIEHLISSCPVMAAKQYTERHNAVAKIIHSWLAWKTGCVAEKTPYYIYRPEAVSESDEARLYWDRTVITDHHIPNNRPDILVIDKIKNICHIIDVAIPAPANISDKHKEKVNKYTPLAAEIKKLWNLDEINIIPVVLGATGEIPYQLHESIARLQLPPKLYIEMQKAVILGTCSIMRSTLNLGMADART

SEQ ID NO: 3222 - protein, 1506 aa, Dysdera silvatica
MKTSKHLTTSPPPLLDRPSFSGDVPSALRGACAPHDISSQRPASDPGHQAHSPPLPGGSASVSKPPRNRPTASQRRRRAAGRLPSSTQAVGPTNTWASVRKAVDNWNPPTCQAEHQPPICDTPGIGHLPPTTPMERAPPLFGKTGPSPISVVELSPMFNVEFSARTTPALDPYSIPTSPAEPATPSPMRSRPETQPQGPGGTSHACSPGSTSSAPSPPSSGPFENVDGTPTTFEYNYSHPASTPFMAQTNPGGSPISPDGLSQGIPLSGNPTYDLINNIVAAVVREVIDRVSELAQRVSPDREGLLGMWPPASAPTHLSVPLVGANLKRSASLPSINNLENQLAALLTSHKIGSSSTTACRGGSSVPTSPVSHHSSMVPDCVNRAPRNTVPQLVNSESDIHDNHDTMVNPAWLDRDIQRDGDLLIFLFPLRKAMECPEKGCGFTSCCDTWTSSKKSVERHLEQTHRIRTISQCFCRLCSRRLPKKVSKHTCFRRVPHITPSPIPTNWVWCNQCPFRAPNRAALAGHLKKHKRDLIQTNADAVLPAPATRKRVKATARDTARRDPRTLDVPEPPAANVMVTTEPSPPAPQRESQALTHGASPPAPQNRSPAPRGTISTPDLDSQPLEDPDPEIEFEWTQASIPPEQGFHHELREIVNPEEDPAVAALTRRLQEAGNHWSTDQGWCTFEDLVAEATDFAQRTNSINPHPTPRNTSNFNPVDPSDCKTIQKMYRRNHRRVIWLITGEEAPRCSLPVDEVQEHFQKTWGPVEVDLCIFENTCPENSETFTLTEVTRETVSNTIRACENSALGPDRLTYAHWRKPDPEAKILTSIFNICLKSKKVPQTWKVARTILLPKDTEPRNYNDWRPIALSNTIYKVLAKCIAGQMANWLHHHSRLASGQKGFLPFDGVFEHNFVLNNFLDDARQGKHDACVAWLDCANAFGSVSHDAIIPALRHVGVHEDLARLISDIHIGATTQVLTANGITEAINIRAGVKQGCPLSGLLFNIILNPVLQVVQGVDSNHHKILAYADDLVILAKSPEQLQQLVHLAEQALAKLGITLNPKKCAGIHLCGKTPVGTRPLSLKVSGRKVRSLRDGEFYQFLGRPTGFMVPSQKTRLQQIVKLGLAIARSRLAPWQRLDALKSFFYPSLAFAMRTGQFTKSEWGQVDDILRAEIKRTASLPDEAANQYIYGPVKASCLGIPKAAEDSDLYLIDNVAKLLLSRDPMVADIAIKRVQDMVKRRIGRDPSDKDIEDFLSGKADGEYRLTTNAMGNHWSKARNAARRIGVTWTLDNRTPQPHYDGEIITPSRRNTLMKQIRERLRDNRLRQLILHRPQGKVLECASLDPVSGHFLREGEFTRFADWRFIHRARLGLLPLNGTRKEMGDPDAKCRTCGYGYESLPHVLNHCMDGVTMPLAQKRHDALLERIVKASRSRYNILRHNEAVPNTNLRPDLVLQEKYQKILIIDVTVPFDNRKQAFDKARQTKMAKYAPLIPIYKPLLLTLPFSHL

SEQ ID NO: 3223 - protein, 930 aa, Alatina alata
MTEKVNAAVDFMMTTNITQTNDLIRAASVWVADQLGLKKSAKAKKSEPWWKRRIEGDIKKLKQEVNILERERKGELGNKKHAKVANLIEKYRVKKKGLQTVIEELKQRMVAKSAKIKRYEQRITQFRQNRLFNVDQKKFYAELNGGTNRRGDVPNADESRKFWSSIWSIEKEHNSDAEWLNVLKQGNDKHHQERVIINKEKVKAQCQRIPNWKAPGKDGVQGYWIKKLNNLHTRIASQLNGILGGEVELPAWMTYGRTVLCQKDPAKGTAVENYRPITCLPIMWKLLTGMLSEEMYVYMEREQLLPEEQKGCKRGSRGTKDQLLIDKTILKDCKKRHTNLAMAWIDCKKAYDFVSHSWISECMEIFGIAENVRSFLTRSMNQWKLALTSNGEDLGDVDVRRGIFQGDSLSPLLFILSLIPLSLILRKANACYEWGKKEYKLNHLLFIDDLKLFGKNEKEIDSLVSTVQIFSQDIGMEFGLKKCGMLILKRGKTVLCDGIKLPDGEVLKEVEQEGYTYLGILEFDKIKENEMKEKVIKEYKRRLRLILKSKLNGKNKISAMNTWAVAILRYGAGILEWKDNDLKSLDRKTRKIMTMHGAFHPKSDVDRLYLSRHEGGRGLMSIEHCIRGEENSLGLYVKSSMEKLIEGVCVAGTLKTEGTISKKAWKRERSQALKRKWTEKRMYGQFVREMPEEVDKLKSWKWLVQSDLKIETEALLCAAQEQAIRTNYIKHHVDKSMDSPLCRMCLKKGESVQHIISECEKLAQREYKRRHDNLARLVHWKMCEKFGLDRKEKWYEHTPEGVTENADTKILWDINIQCDNVIEARRPDIVLIDKQEKSCMLIDIAVPADGRVYRKEREKVEKYQELKRELRRIWKMKKIQVVPVVVGALGSVSKDFENWMKKIDIVVNVGLVQKTALLGTARILRKVLEM

SEQ ID NO: 3224 - protein, 1143 aa, Alatina alata
MSNYNISNNDVNGAGTSGEGSSSGRCSLDEQRGPGRYPTTARMSWNKEVNKVVMECFYRSNPFNEEGRPIRGYRQRMFREWRERGMFDSTEQRICDQARAIRKNGWLSDLELEMIKRKIEDEAQNEDGNLDNEGQSVIVNEESEVRNEQVDYNYQVNDAGVIRHDVDEAETNDVEIDQEQRQIVEQLKEIMAEERTTEGIMFKTVENKTLRCKTEEVNRAIKFMETSNITQTNDLIRAAGVWVADQLGLKKITYRKKNEPRWKRRIEGDIKRLKQEVNLLEREKKGELGAKKKRKLKDLEARYRVKRKGLKTVIEELKQRMIAKSAKVKRYEQRMTQFRQNRMFNIDQKKIYKELNGGGNSLSDVPDAEESRRFWGDIWSVEKEHNREARWLKDLKNENNGDHQQEMMKISAENVQKQCRKIPNWKAPGKDGVQGYWIKNLNNLHVRIACQLNKILEGEDILPTWMTYGRTVLCQKDPAKGNAVENYRPITCLPLMWKLLTGMIAEEMYVYLERENLLPEEQKGCRRGSRGTKDQLLIDKTVLRDCRRRHTNLAMTWIDYKKAYDFVPHSWISECMEMVGIAENVRNFLQRSMEQWKLLLTSNGEDLGCVDVKRGIFQGDSLSPLLFVLCMIPLSLVLRKVNACYEWGKKEYKLNHLLFMDDLKLFGKNEEQIDSLVNTVHIFSTDIGMEFGLRKCGVVTLKRGKIARCEGIELPDGEVMKEVEQEGYTYLGIVELDKIKENEMKKKITKEYKRRLRLVLKSKLHGRNKITAMNAWAVAVFRYGARILEWKGCELKTLDRTTRKTKTMYGAFHPKSDVDRLYLKRCEGGRGLISIEHCVKGEENSLGLYVLNSEEKLIQGIRTSGTIATESTISKSEFKRQTAQELKQKWTEKKMYGQFIREMPEKVDKDKTWNWLVRSDLKVETEALLCAAQEQAIRTNYVKHHIDKSIDNPLCRMCGKRGESVQHIVSECEKLAQKEYKRHHDNVAKKIHWELCKKNTFVHNDKWYEHNPEGVTENECVKLLWDMNIQCGNVIEARRPDIVIIDKKEKSCVIVDVAVPADGRVHEKEREKVEKYQDLRREIRRMWQLRNVQVVPVVVGALGSVTKEFDRWMGKLGVPVGVGAAQKTALLGTARILRKVLEM

SEQ ID NO: 3225 - protein, 1145 aa, Alatina alata
MSDINRLNNDVNGAGTSCEGSSSGRCPLGEQQGPGRYPVTARMKWNKEVNVVVMECFYRSKPFDNNGKCIRGYRQRMFREWRDRGMFDSTEQRVCDQARAIRKNGWLSELELELIKRKIEEEDPNESGVTECEDQVQTISEEHNNRSDQLNTTNNQEYANNREELEIDGNDSEIVEEEIAQEEKDIILQLKEIIADGRTVEGVTFKKVDKKTLQYMTEKVNAAVNFMMTTNITQTNDLIRAASVWVADQLGLKKSAKAKKSEPWWKRRIEGDIKKLKQEVNILERERKGELGNKKQGKVANLIEKYRVKKKGLQTVIEELKQRMVAKSAKIKRYEQRITQFRQNRLFNVDQKKFYAELNGGTNRRGDVPNADESRKFWSSIWSIEKEHNSDAEWLNVLKQGNDKHHQERVIINKEKVKAQCQRIPNWKAPGKDGVQGYWIKKLNNLHTRIASQLNGILGGEVELPAWMTYGRTVLCQKDPAKGTAVENYRPITCLPIMWKLLTGMLSEEMYVYMEREQLLPEEQKGCKRGSRGTKDQLLIDKTILKDCKKRHTNLAMAWIDYKKAYDFVPHSWISECMEIFGIAENVRSFLTRSMNQWKLALTSNGEDLGDVDVRRGIFQGDSLSPLLFILSLIPLSLILRKANACYEWGKKEYKLNHLLFMDDLKLFGKNEKEIDSLVSTVQIFSQDIGMEFGLKKCGMLILKRGKTVLCDGIKLPDGEVLKEVEQEGYTYLGILEFDKIKENEMKEKVIKEYKRRLRLILKSKLNGKNKISAMNTWAVAILRYGAGILEWKDNDLKSLDRKTRKIMTMHGAFHPKSDFDRLYLSRHEGGRGLMSIEHCIRGEENSLGLYVKSSMEKLIEGVCVAGTLKTEGTISKKAWKRERSQALKRKWTEKRMYGQFVREMPEEVDKLKSWKWLVQSDLKIETEALLCAAQEQAIRTNYIKHHVDKSMDSPLCRMCLKKGESVQHIISECEKLAQREYKRRHDNLARLVHWKICEKFGLDRKEKWYEHTPEGVTENADTKILWDINIQSDNVIEARRPDIVLIDKQEKSCMLIDIAVPADGRVYGKEREKVEKYQELKRELRRIWKMKKIQVVPVVVGALGSVSKDFENWMKKIDIVVNVGLVQKTALLGTARILRKVLEM

SEQ ID NO: 3226 - protein, 1142 aa, Alatina alata
MSDINRLNNDVNGAGTSCEGSSSGRCPLGEQQGPGRYPVTARMKWNKEVNVVVMECFYRSKPFDNNGKCIRGYRQRMFREWRDRGMFDSTEQRVCDQARAIRKNGWLSELELELIKRKIEEEDPNESGVPECEDQVQTISEEHNNRSDQLNTINNQEYANNREELEIDGNDSEIVEEEIAQEEKDIILQLKEIIADGRTVEGVTFKKVDKKTLQYMTEKVNAAVNFMMTTNITQTNDLIRAASVWVADQLGLKKSAKAKKSEPWWKRRIEGDIKKLKQEVNILERERKGELGNKKQGKVANLIEKYRVKKKGLQTVIEELKQRMVAKSAKIKRYEQRITQFRQNRLFNVDQKKFYAELNGGTNRRGDVPNADESRKFWSSIWSIEKEHNSDAEWLNVLKQGNDKHHQERVIIDKEKVKAQCQRIPNWKAPGKDGVQGYWIKKLNNLHTRIASQLNGILGGEVELPAWMTYGRTVLCQKDPAKGTAVENYRPITCLPIMWKLLTGMLSEEMYVYMEREQLLPEEQKGCKRGSRGTKDQLLIDKTILKDCKKRHTNLAMAWIDYKKAYDFVPHSWISECMEIFGIAENVRSFLTRSMNQWKLALTSNGEDLGDVDVRRGIFQGDSLSPLLFILSLIPLSLILRKANACYEWGKKEYKLNHLLFMDDLKLFGKNEKEIDSLVSTVQIFSQDIGMEFGLKKCGMLILKRGKTVLCDGIKLPDGEVLKEVEQEGYTYLGILEFDKIKENEMKEKVIKEYKRRLRLILKSKLNGKNKISAMNTWAVAILRYGAGILEWKDNDLKSLDRKTRKIMTMHGAFHPKSDVDRLYLSRHEGGRGLMSIEHCIRGEENSLGLYVKSSMEKLIEGVCVAGTLKTEGTISKKAWKRERSQALKGKWTEKRMYGQFVREMPEEVDKLKSWKWLVQSDLKIETEALLCAAQEQAIRTNYIKHHVDKSMDSPLCRMCLKKGESVQHIISECEKLAQREYKRRHDNLARLVHWKMCEKFGLDRKEKWYEHTPEGVTENADTKILWDINIQCDNVIEARRPDIVLIDKQEKSCMLIDIAVPADGRVYGKEREKVEKYQELKRELRRIWKMKKIQVVPVVVGALGSVSKDFENWMKKIDIVVNVGLVQKTALLGTARILRKV

SEQ ID NO: 3227 - protein, 899 aa, Alatina alata
MYSNNNNNNNVNVNGIMFKKVEKKTLRCKTEEVNRAIKFMKTSNITQTNDVIRAAGVWVADQLGLKKITYRQKNEPRWKRRIEGDITRLKQEVNLLEREKKGELGAKKKGKLKDLEARYRVKRKRLKTVIEELKQRMIAKSAKVKRYEQRMTQFRQNRMFNVDQKKIYKELNGDGNSSSDVPDAEESRRFWGDIWSVEKEHNREARWLKDLKNENNGDHQQEMMRISAENVQKQCRKIPNWKAPGKDGVQGYWIKNLNNLHMRIACQLNKILEGEDNLPTWMTYGRTVLCQKDLAKGNAVDNYRPITCLPLMWKLLTGMIAEEMYIYLERENLLPEEQKGCRRGSRGTKDQLLIDKTVLRDCRRRHINLAMAWIDYKKAYDFVPHSWIIECMEMVGIAENVRNFLQRSMDQWKLSLTSNGEDLGSVDVKRGIFQGDSLSPLLFILSMIPLSLVLRKVNACYEWGKKEYKVNHLLFMDDLKLFGKNEEQIDSLVKTVHIFSTDIGMEFGLRKCGVVTLKRGKLARCEGIELPDGEVMKEVEQDGYTYLGIVELDKIKENEMKKKITKEYKRRLRLVLKSKLNGRNKITAMNTWAVAIFRYGAGILEWKGCELKSLDRTTRKTMTMYGAFHPKSDVDRLYLKRYEGGRGLISIEHCVRGEENSLGLHVKNSEEKLIQGICTSGTIETESTISKREFKRQNAQELKQKWTEKRMYGQFVREMPEKVDKGKTWNWLVRSDLKVETEALLCAAQEQAIRTNYVKHHIDKSLDSPLCRMCGKRGESVQHIVSECEKLAQKEYKRRHDNVAKKIHWELCKKNALEHHEKWYEHNPEGVTENEGVKLLWDINIQCDNVIEARRPDIAIIDKKEKSCVIVDVAVPADGRVHEKEREKGGEIPGPAEGN

SEQ ID NO: 3228 - protein, 1197 aa, Alatina alata
MASTRGSLNRGLGNRCTPMPAMGDSREATSTSSDCTPQLVLTTASNGVEPSDLEEKGNASSCREIELPRPGSEQVTKRSKTNERRVNLYTGKKTPKKRKVNLKRKWTKKEYEIAVECKIRAQVDGIKRGIGRAVHNHWKSKDMFDINEKLLMNQIRTIFTKGWLTDLEIESIKRKVYDETMKENQDIVSSNRILTNEESTDPTRTENASDEILTNDEDANENHVTREVLDDKELDGEGQELLERLKAVMNRTEKGKIHNLRSFERIKVKQVTAKVNSILSYIPIADITEARDLIQGAAILVGELRDAKDPRKRKEKEPFWKRRIEGDIKRLRKDLSKIDAWFKGKWQKCNKRQKEDLDRKYRLKAKGFTMVMEELKQRITAKGTKIKRYMSRIKQFQSNRVFTSNQGRFFRTLQGETKSTATPNPQQATQFWSEIWGNEVQHNNKAEWIQNLEGKLTNTKQVNVNLTVEDVKRKVKTVPNWKGPGPDGIHGYWIKNLTSLHVKIVESLNNCLTKGDVPEWLVEGRTTLIMKDVSKGGVVSNYRPIACLNLLWKLLSGMLSDKTYEFLESNDILPVEQKGCRKVCHGTKDQLAIDRCVMRNCKRRKTNLSMAWIDFQKAYDMVPHSWIIHTMKMVGMADNIIEIIANSMPKWKTNLYADGKLLGPVSIRRGIFQGDSFSPLLFVVTLIPITHVLRTIKMGYSIEKNGPMINHLLFMDNMKLYGKSDNEIDSLVKTVEKCSIDVGMAFGVSKCAVITMKRGKRVKSQGIKLPNGDEMTEPDSKGYKYLGVLELDTVLLKEMKAKVRGEYIKRVTLLLKSKLNGRNLFLALNSWAVSVVWYSAAFLNWTKSELCVMDRNTRKLLVKFGATHPKSNVQRIYIKRKAGGRGLISVEECIANEVRGIHKYLVSSTETLLKAVVKEDGIDKHVIEGKAEYKERIEREKKEVLINMNLHGKFEESTKELKSDESWNWLSKGVLKRETESLIMAAQEQALNTNFVKRNIYKMNVSDKCRLCGDRVETVTHIVSACSMAANKEYKRRHNKVCQNLHWQLCRKYGIPTSDKWFQHKPEAVQENDKVKLYWDFMVQCDNTVEHRKPDIILVDKQTNKCKIIDVACPADQNLIIKRNEKLRNYSDLRIQIARMWDKETTVVPVIIGALGSVPKDIHTYLNQLGIDYDLQILQHSVLLGTANILRKVLAMG

SEQ ID NO: 3229 - protein, 965 aa, Tomocerus qinae
MDTNTSSVCEICGKMCKGERGLKIHISKAHGEAFRNTLTSQYSPSPHPLDENLDSSCPTIVTELDKAKERLREYLQKFDDLCNDPFDESGFQILYDQFLVDIQIAQEKLPAPTHPAKRFYNIRKNKKCFVSNAIRSGFSQSSNPERKDKERRNNNRRNYQNQLIQHYYYFNRKKCVDLVMNSSKNIRCNIDMVKLHSAFKERWNSPNDNIRSEYESIPSLAEQIHLDSKFSSMITKEEVENALKGMNSDSSPGVDFIYTRTLKVVVCPKVLARIFSIMLNQNVIPHSMKIAKTILVYKSGCQDDPKNWRPISICSTLRRLYERIITSMVNRYYTTCPFQSGSAHAPGTFVNTAILDGCLKMAKTKRKDLSILFLDILKAYDMVGHLHLKRTLETLFLPTFLRQTLNNLIIDNQTRLEVNGRKSNSIFFTKGIFQGSPLSSLLFNLSIDHILQNLSEVEVSKKFGFKINEVLSPLSTLGFIDDTVLLANSKSSAIILFTEANNLFEEVGLTLNVDKTKIIHILKGDLIDTEFSIDSNHTISTLKTGQTIKYLGVNFANEIFFDKSTFTKNLSSNLNSLVSTPLLFPNQKLSIINTFIWPKFIYTIQSSNLCRLSKSFLEDIDKIIRSSIKEMLCLPHDFPNNCLYSSTKHKGLGVIRATWEAPLQNYNISLTLQRFNNKYVTELKDLPFQQESCIQRMGIVDEIKNVDVRSLTVRQISVKLRDILRMKEYSSWRSLSFHGKGVDQFTQCEKINKLLFFKTGLTSSEWINYLKMIPNVTASRSIPGRSQDGTHCRRCNENNETLSHILGYCPYGLLHRNARHHQIRTIIAESFKEKGLEVYEEVHTIALDGSNRRVDILIIDHNFQKGYIFDPTIRFEAVTDQAMLVDTEKKNIYNSCIPDLQNKYSIRYEFEVIGLYIGARGTISSYFENIRKRFNLPSQLLEEVAIVAVKGSASILQHHLYNSQS

SEQ ID NO: 3230 - protein, 963 aa, Tomocerus qinae
MDTNTSSVCEICGKTCKGERGLKIHTSKAHGEAFRNTLTSQYSPSPHPLDENLDSSCPTIVTELDKAKERLREYLQKFDDLCNDPFDETGFQNLYDQFLVDIQIAQKKLPAPTHPAKRFYNIRKNKKCFVSNSNRSGFSQSSNPERKDKERRNINRRNYQNQLIQHYYYFNRKKCVDLVMNNSKNIRCNIDMVKLHSAFKERWNSPNDNIRSEYESIPSLAEQMHLDSKFSSIITKEEVENALKGMNSDSSPGVDFIYTRTLKVVVCPNVLARIFSIMRHQNVIPQSMKIAKTILVYKSGCQDDPKNWRPISICSTLRRLYERIITTMVNRYYTTCPFQSGSAHAPGTFVNTAILDGCLKLAKTKKRDLSILFLDILKAYDMVGHLHLKRTLETLFLPTFLRKTLNNLILDNQTRLEVNGKKSNSISFTRGIFQGSPLSSLLFNLSIDHILQNLSEVEVSTKFGFKINEILNPLSTLGFMDDTVLLANSKSSAIVLFTEANNLFEEVGLKLNVDKTKIIHILKGDLIDTEFSIDSNHNISTLKTGQTIKYLGVNFANEIFFDKSTFTKNLSSNLNSLVSTPLLFPNQKLSIINTFIWPKFIYTIQSSNLCRLSKSFLEDIDKIIRSSIKEMLCLPHDFPNSCLYSSTKHKGLGVIRATWEAPLQNYNISLTLQRFNNRYVTELKDLPFQQESCIQRMGIADEIKSIDVRNLTVRQISSKLRDILRMKEYSSWRSLSFHGKGVDQFTHCEKINKLLFFKTGLTSSEWINYLKMIPNVTASRSIPGRSQDGTHCRRCNENNETLSHILGYCPYGLLHRNARHHQIRTIIAESFKEKGLEVYEEVHTIALDGSNRRVDILIIDHNFQKGYIFDPTIRFEAVTDQAMLVDTEKKNIYNSCIPDLQNKYSIHYEFEVIGLYIGARGTISSYFENIRKRFNLPSQLLEEVAIVAVKGSASILQHHIYNS

SEQ ID NO: 3231 - protein, 970 aa, Tomocerus maximus
MDTTTNSTCPTADLVPCPTCGKSFKGERGVKIHTSKVHGQQFRNSLTSQYSPQTLNESQPATPTIITDLDIAKEKLKDYAMKFENLEGDDNFDEPNFHKLIAEFLSDLQKTQEKLPAPIHPAKRYYNLRKNKQCFIQKNGKGYSQCTNPIRSDRERRNRNRRDYQNQLIQHYYYFNRKKCVNILMQNSKKVSCDIPINILHQSFKMRWSTNNDEVRAEYEPKPSGDEQTLLNSSFCPVITKEDVEKAIKGMNTDSSPGIDFIYVRTLKIAVCPKTLAVIFTLMIKHNIIPDFMKKAKTILVYKDGCKTEPKNWRPISICSTLRRLYERIISSMVSRYYSTCPLQSGSAHAPGTYINTSILDGCLKLAKSKRKDLIILFLDILKAYDMVGHIHMYKTLDSISLPDYLRNTLKNLIANNSTKIEVQGKKSDEIIFERGIFQGSPLSSLLFNMSIDHILQQLSEVEVSKTFGYKINETLHNLSTLGFMDDTVLLANSVNSATTLFTMAKNLFEDIGLQLNVNKTNIIHIEKGILIENKLLIEENHSIQTLKKDEVMKYLGVNFTNQIILDKNTFMKNLTSSLNCLVSTPLLFPSQKLSIISTFIWPKFVYTIQSTNLCLFSKSFLEDVDKAIRSSIKEMLYLPSDFPNSCMYSSAKHKGLGVVRAIWEAPLQNFNICLTLERFNNKYVRELRDLSNQKENCIQRLGISDEIANLDVASLTVRQVSQKIRDILRNKEYTSWCSLGFHGKGVQQYSQCEKINKALFYKSGLSSSEWTSYLKMIPNVTASRSIPGRSQDGTHCRRCNEIYETLSHILGNCPFGALLRNSRHHVIRTMIANSFRKKGLEVYEEIHTIARNNSNRRIDILVIDHSKEQAWILDPTVRFESSNDQAVEVDIEKKMIYEDCIPNIQQKYSIQYDIEVIGLFVGARGTISTFFENFRKKFNLPTELLEEVAIGAVKGSASILQNHLFKSKQ

SEQ ID NO: 3232 - protein, 968 aa, Scirpophaga incertulas
MSQLQSSTGQATDVGEKIVKCELCTQPKFFHSNRGLKIHIGKVHKNSTTLESLSQLNFHQQSSEDLVESSNTAEINSFWKTISKLKNNVPIVKRIPRGARISVASSLSHAIDNIIKNNSSQNWVQLLTFAYRVLHVHNENDNTLSLTQKIKNNCSQPPQHIDSIQIKKRRQDNPFDVHRIESKMNEGDIKGACQLIFSNDTIAPDSSETIFNLKLKHPSPATTLQLPDPPELSDLSPLTNEKEVHDAILSFRNGSAGGLDGLSPQHFKDLLSYSNGDSSKFLLSKITQLCNLMLSGKVPRDITGIVYGANLCALKKKDGGVRPIAVGCTIRRIVSKICVKKVLPSLTSKFQPIQLGFGSKSGCEAAVHATRAYVNNGGEVLLKVDVKNAFNSLDRGTLLTEVKKEIPILYRYLWQCYSEPTNLIYKNNTIHSAVGCQQGDPLGPAIFSLAIHPIISQLNSKFNVWYLDDGTIGGETVSVLEDFRSLISSFGNIGLELNFSKCELFIAKTVTMDRRKKILSDFKSLAPNITVVEDNSLILLGAPVLDNAIPPFINELIKKFQNSSDRLFQINPHMALFIIRYCLFVPKFMYVLRSSNLWCFTTELTLVDNLIKETLTKILNCPFDNRAWLQATLPVRFGGLGVRSISSVALPAFLSSAHSALQLYRMIISPSVGSVELPHLADARNAWSSKCSNVIFPSVPESQKQWDEPVCKNIQASLISTSIDSIDRARLIAVSEKESGQWLQALPSANVGTLLDRLSLTIAVCLRLGTRIVHPHQCVCGDAVDERGLHGLSCIRSAGRMSRHTALNSIIHRSFATAGIPSILEPVGIYRSDGKRPDGLTVGPWKLGRPLIWDATCSDTLAPSHVCSTSLSAGSAAIHAEGRKRSKYCNIGPNYIFAPFAVETMGPWGPEAKKIVHDLSALLIEASGDQRAGSYLCQRISLAIQRGNVASILGTVPMGPELQDIFYL

SEQ ID NO: 3233 - protein, 998 aa, Eriocheir sinensis
MREGGQLFHQPAHTRRVPSMPTTEMPGHWNAASCPSRAPPSQHPTVQQGPPATPCLACNSVNDRKQIRTCAACQRQAHLSCIGLTVTRAQSNTLPIWHCADCLRPTLLAGPAGDPLPNQDSTPTDLAAWALLKRRTRVPKRIPRRKRHRFASDLADLIFSATEQNSATAWWRLLSYLYTSLGNPVHNSTPVTTSATRPHLTENNRTEAHNDALARHITSKCADGDIRGALRLLTTPDTVAQSDAGAIEELRAKHPPASPDEDLQHYLRDQNNSTPFEFSEAEVLAAIQSMPRGSSAGLDGIRPLHLQQLTTKQTAEAGSRLLSALTALCRHAAAGHIPDSARNAFFGASLIAIKKKQGGLRPIAIGSSYRRLIGRLVAKRTTASLSSQLISTQLGVGAPLGCEAAVHAVRENTRTNRDSDELLVKVDLSNAFNSVSREAVLSQVSQRCPSVLPLVRQAYAQPTPLFISDHVIWSCRGVQQGDPLGPLLFALAIDPIIQNLRSPLNIWYLDDGTLAGPAESVIADISTLLPALQRIGLKVNCQKCELTRLDDTQAVNISIPALPDATTVPLHSLSLLGAPIHAEGLPDALEDSTQSSKRMIERVDGIGMYLAFFLLSRYSVVPRCTYLMRAAPTYLAPENLRRIDDIIRTAISSICNIDLPEDSWIQASLPTRLSGIGIRRLEDVALPVSISSMSATQELVGRITCRSNDDGPTLLAPALTAFADLIRPQDAQDFSAEPPLQQRQLDEAASRKRLDTLLEECSQVHRPRLLAAAEPHSGAWLNALPVEKLGLLLDEAVRVGVALRLGIPVCLPHRCKCGAMADSLGHHQLSYPRDPGRLPRHAAINDIIRRCLAAAGVPALLQPRGLDRGDGRRPDGITITPFSNGRSLVWDATCSNTFNSTQVTACAVTPGAAARAAKQRRQARYSALLQRYRFEPLAVETTGVLGPAASKFLRELGRRITAQTGEKLETCWFKQRVSLAIVRGNAAAITVPATANII

SEQ ID NO: 3234 - protein, 1133 aa, Chionoecetes opilio
MPGSRAPGLCCICTKDIQHCVGCICARSGRACFNCNKGIDCRNPSGRFQGEEGEDEAADVDLELQDEGRLAGSQRASGSNPSGLNQGEAGEEEAASDDQVLQDEGRWDGSQSASGETGGPTVRTPVPPPRTPPLPSRPRASATPAPSQGDDATQHPPRGPAPAPPAPLPEMGPAPAPPAPPLPPLCFVCNLVNLIKRTVTCPACQREAHLSCVGLTRAQAAVLPIWNCNACVHPPLADPADNPLPDRVPAPADLAAGLADLKQRTRVPSHIPRYKQHRVATELADLITQALDQSTAGAWWNLLSYAHLSIGIPANHTPATHTRPRRRHTNEDYLLIKDNDALARRIRSKCADADVRGALRLLTTPDTVAPPNAETVAELRTKHPPAPPGEDLAPLYIDQPTTTPLDITVEDVMAAIQSMPPGSSAGLDGIRPLHLRQLTSKRNAEAGVRLLTALTALCSHAISGHIPDHARNAFFGASLIAIRKKQGGLRPIAIGSSYRRLVSKLVARRMTTALASQLAPTQLGVGTPLGCEAAVHAVRNYVSSHYGSDQVLVKLDLSNAFNSVSREAVLRQVGLRFPAAMPLIWQAYAQPTPLFVADEVIWSRRGVQQGDPLGPLLFAMAIDPIIQSQSLNSPLGLWYLDDGTLAGTADSVSADIATLVPALQRIGLGVNTQKCEVTFLHGNEITDETFPALPEARIIPLSTLSLLGAPIRAESLPAALDTASQDTRRMIDRVDGIGSHAALFFLSRYAAVPRCTYLMRAAPTHLAPQDLHSIDEAMRSAISLSCNIDITDKRWTQASLPIRLGGIGVRRMGDVALPAYISSLSATRDLIRQINGRQGDDGSAQLDPALAAFSDLYPTPDDPDILNANTQIPQRKLDEAASLCRRATLLQDSNQVHRARLLAAAEPHTGAWLGALPVEKLGLLLPDEAVRVGVALRLGAPVCLPHRCKCGSTADNLGHHQLSCCRDPGRLSRYAAINDIIRRGLAAAGVQALLEPRGLDRDDGRRPDGVTLTPFSFGRSLLWDATCTNTFGATHVNDCAISPGAAARAAERRKRARYTALALRYRFEPLAVETTGVLGPAISKLLAELGRRITAQTGEKRETHWIRQRISLAIVRGNAAAITVPLTKATSLS

SEQ ID NO: 3235 - protein, 971 aa, Chionoecetes opilio
MASMPACAVCDVDSRTSVSYGARSCPSCSEFFRRRVDNDPGACVHGGKCEITLHTRHLCAPCRFRKCRTAGMRPRASATPAPSQGDETTQHSTEAGPAPATPPCIVCDSVNIRKQTCSACRRPAHQTCVGLTRVQASTLPIWNCNACLHLAPLADPVDNPLPDHEPAPADLAAGLADLKRRMRVPSHIPRRKQHRVATELADLITKALDQSTATAWWNLLSYAHLSLGNPANNTPSTHTRPRRKHTNEDHPQINGNDALARRIRSKCADADVRGALRLLTTSDTVAPPNAETVAELQTKYPPAPPEEDLLPLGRDQPTTTPLDITVEDVMAAIQSMPPGSSAGLDGIKPLHLRQLTSKRNAESGVRLLTALTALCRRVISGRIPDPARNAFFGASLIAIRKKQGGLRPIAIGSSYRRLASKLVAKRMATSLASQLAPTQLGVGTPLGCETAVHAVRSYVSSHHGSDQVLVKLDLSNAFNSVTREAVLTQVGRRFPAAMPLIRQAYAQPTPLFVAAKVIWSCRGVQQGDPLGPLLFALAIDPIIQNLHSPLGLWYLDDGTFAGTADSVSTDIATLVPALQLIGLKVNSQKCEATFLHGNEVMDETFPELPEARITPLSTLSLLGAPICAESLPEALDTASQDTKRMIERVDGIGSHAALMRAAPTYLAPQDLLNIDEAMRSAISLTCNIALTDKSWIQASLPTRLGGIGVRRMEDVALPAYISSLSATRDLIRLINGRAGDDGSAQLASALTAFPDLYPTLDDLDFNANTQIPQRKLDEAASRCRLDTLLQDSNQVHRARLIAAAEPHTGAWLDNLPVEKLGLLLPDEAVRVGVAMRLGAPVCLPHRCKCDSTADSLGHHQLSCRRDPGRLLRHAAINDIVRRGLAAAGVPALLEPRGLDRGDGRRPDGVTLTPFSIGRSLLWDATCTKHLRRYPRHRLRHQPRSRRPPRRATQTRALRGFGTAIPVRAPRS

SEQ ID NO: 3236 - protein, 1073 aa, Chionoecetes opilio
MASLPACAVCHAHSRKGVSYGARSCPSCSQFFRCRVDDDPGACAHGGKCEITPHTRHLCAPCRLRKCRTAGMRPRASATPAPFRGDETTRHSTEAGPAPATPPCIVCDSVNIRKQIVTCSACRRPAHQTRVGLTRVQASALPIWNCNACLHLAPLADPVDNPLPDHEPAPADLAAGLADLKRRMWVPSHIPRRKQHRVATELSDLITRALDQSTATAWWHLLSYAHLSLGNPANSTPSTHTRPPRKHTNEDHPQINGNDALARRIRSKCADADVRGALRLLPTSDTVAPPNAETVAELQTKHPPAPPEEDLSPLCRDQPTTTPLDITVEDVMAAIQSMPPGSSAGLDGIRPLHLRQLTSKRNAEAGVRPLTALTAPCRRAISGHIPDPARNAFFGAGLIAIHKKQGGPRPLAIGSSYCRLASKLVAKRTATSLASQLAPTQLGVGTPLGCETAVHAVHSYVSSHHGSDRVLAKLDLSNAFNSVTREAVLTQVGRRFPAAVPLIRQAHARPTPLFLADKVIWSCRGVQKGDPLGPLLFALAIDPIIQNLHSPLGSWYPEDGTLAGTADSVTTDIATQVPALLSTGLKVNSQKCEATFLHGNEVTDETFPALPDARITPLRTLSLPGAPICAQSLPEALDTASQDTKRMIERVDGIGSHAALFFLSRYASVPRCTYLMHAAPTHPAPRDLLNIHEAMRSAISLTCNIALTDKSWTRASLPTRLGGIGVRRREDVALPAYISSLSATRDLIRLINGRAGDDGSARLSPALAAFSDLCPTLDHTDFNANTQIPQRKLDEAASRCRLDTLLQDSNRVHRARLLAAAEPHTGAWLDALPVEKLGLLFPDEAVRVGVALRPGAPMRPGAPMRPGAPMRPGAPVRPGAPVCLPHRCKCGSTADSLGHHRLSCCRDPGRLSRHAAIDDIIRRGLAAAGVPALLEPRGLDRGDGRRPDGVTLTPFSIGRSLLLDATCTNTFGAAHVTNCAVSPGAAARAAEQRKRTRYAALAQQCRFEPLAVETTGLLGPAISKLLAELGRRITAQMGEKRETCWIRQRISLAIVRGNAAAITVPLTEAASLL

SEQ ID NO: 3237 - protein, 1049 aa, Chionoecetes opilio
MASLPACAVCDADSRKGVSYGARSCPSCSEFFRRRVDNDPGACAHGGKCEITLHTRHLCAPCRLRKCRTAGMRPRASATPAPSQDDETTQHSTEAGPAPATPPCIVCDSVNIRKQIVTCSACRRPAHQTCVGLTRVQASALPIWNCSACLHLVPLADPVGNPLPDHEPAPADLAAGLADLKRRMRVPSHIPRRKQHRVATELADLITKALDQSTATARWNLLSYAHLSLGNPANNTPSTHTRPRRKHTNEDHPQINGNDALVRRIRSKCADADVRGALRLLTTSDTVAPPNAETVAELQTKHPPAPPEEDLSPLCRDQPTTTPLDITVEDVMAAIQSMPPGSSAGLDGIRPLHLRQLTSKRNAEAGVRLLTVLTALCRRTISGRIPDPARNAFFGASLIAIRKKQGGVRPIAIGSSYCHLASKLVAKRMATSLASQLAPTQLGVGTPLGCETAVHAGRSYVSSHYGSDQGLVKLDLSNAFNSVTREAVLTQVGRRFPAAMPLIRQAYAQPTPLFVADKVIWSCRGVQQGDPLGPLLFALAIDPIIQNLHSPLGLWYLDDGTLAGTADSVSTDIATLVPALQRIGLKVNSQKCEATFLHGNEVMDETFSELPDARITPLSTLSLLGAPICAESLPEALNTASQDTKRMIERVDGIGSHAALFFLSRYASVPRCTYLMRAAPTYLTPWDLLNIDEAMRSAISLTCNIALTDKSWIQASLPTRLGGIGVRRMEDVALPAYISSLSATRDLIRLINGRAGDDGSAQLAPALTAFSDLYPTLDDTDFNANTQIPQRKLDEAASHCRLDTLLQDSNQVHRARLLAAAEPHTGAWLDALPVELLGLLLPDEAVRVGVAMRLGAPVCLPHRCKCGSTADSLDHHQLSCCREPGRLPRHAAINDIIRRGLAAAGVPALLELRGLDRGDGRRPDGVTLTPFSIGRSLLWDTTCTNTFCATHVTDCAISPGAAARAAEQRKRTRYAALAQRYRFEPLAVETTGLLGPAISKLLAELGRRITTQTGEKRETCWIRQRISLAIVRGNAAAITVPLTEAASLL

SEQ ID NO: 3238 - protein, 978 aa, Chionoecetes opilio
MRPRASATPAPSQGDETTQHSTEAGPAPATLPCIVCDSVNIRKQIVTCSACRRPAHQTCVDLTRVQASALPIWNCNACLHLAPLADPVDNPLPDNEPAPADLAAGLADLKRRMRVPSHIPRRKQHRVATELADLITKALDQSTATAWWNLLSYAHLSLGNPANNTTSTHTRPRRKHTNEDHPQINGNDALAPRIRSKCADADVRGALRLLTTSDTVAPPNAETVAELQTKHPPAPPEEDRSPLYRDQPTTTPLDITVEDVMAAIQSMPPGSSAGLDGIRPLHLRQLTSKRNAEAGVRLLTALTALCRRAISGRIPDPARNAFFGASLIAIHKKQGGLRPIAIGSSYRRLASKLVAKRMAMSLASQLAPTQLGVGTPLGCETAVHAVRSYVSSHYGSDQVLVKLDLSNAFNSVTREAVLTQVGRRFPAAMPLIRQAYAQPTSLFVADKVIWSCRGVQQRDPFRLLLFALAIDPIIQNLHSPLGLWYLDDGTLAGTADSVSTDIATLIPALQRIGLKVNSQKCEAIFLHGNDVMDETFPELPDARITPLSTLSLLGAPICAESLPEALETASQDTKRMIERVDGIGSHAALFFLSRYASVPRCTYLMGAAPTYLAPRDILNIDEAMRSAISLTCNIALTDKSWIQTSLPTRLGGIGVRRMEDVSLPAYISSLSATRDLIRLINGRAGDDGSTQLAPALTAFSDLYPTLDDTDFNANTHIPQRKLDEAASRCRLDTLLQDSIQVHRARLLAAAEPHTGACLDALPVEMLGLLLPDEAVRVGVAMRLGAPVCLPHRCKGSSTADSLGHHQLSCCRDPGRLPRHAAINDIIRRGLAAAGVPALLEPRGLDRGDGRRPDGVTLTPFSIGRSLLWDATCTNTFGATHVTDCAISPGAAARAAEQRKRTRYAALAQRYRFEPLAVETTGLLGPAISKLLAEFGRRITTQTGEKRETCWIRQRISLAIVRGNAAAITVPLTEAASLL

SEQ ID NO: 3239 - protein, 866 aa, Chionoecetes opilio
MRVPSHIPRRKQHRVATELADLITKALDQSTATAWWNLLSYAHLSLGNPANNTPSTHTRPRRKHTNEDHPQINGNDALARRIRSKCADADVRGALRLLTTSDTVAPPNAVTVAELQTKHPPAPSEEDLLPLCRDQPTTTPLDITVEDVMAAIQSMPPGSSAGLDGIRPLHLLQLTSKRNAEAGVRLLTALTALCRRAISGRIPDPARNAFFGASLIAIRKKQGGLRPIAIGSSYRRLASKLIAKRMATSLASQLAPTQLGVGTPLGCETAVHAVRSYVSSHHGSDQVLVKLDLSNAFNSVTREAVLTQVGRRFPAAMPLIRQAYAQPAPLFVADKVIWSCRGVQLGDPLGPLLFALAIDPIIQNLHSPLGLWYLDDGTLAGTADSVSTDIATLVPALQRIGLKVNSQKCEATFLHGNEVMDETFPELPDARITPLSTLSLLGAPICAESLPEALDTASQDTKRMIERVDGIDSHAALFFLSRYASVPRCTYLMRAAPTYLAPQDLLNIDEAMRSAISLTCNTALTDKSWIQASLPTRLDEIGVRRMEDVALPAYISSLSATRDLIRLINGRAGDDGSAQLASALTAFSDLYPTLDDLDFNANTQIPQRKLDEAASHCRLDTLLQDSNQVHRARLLAATEPHTGAWLDALPVEKLGLLLLDEAVRVGVAMRLGAPVCLPHRCKCGSTADSLGHHQLSCRRDPGRLPRHAAINDIIRRGLAAAGVSALLEPQGLDRGDGRRPDGVTLTPFSIGKSLLWDATCTNTFGATHVTDCAISPGAAARAAEQRKRARYAALAQRYRFEPLAVETTGLLGPAISKLLAELGRRITTQTGEKRETCWIRQRISLAIVRGNAAAITVPLTEAASLL

SEQ ID NO: 3240 - protein, 885 aa, Rhopilema esculentum
MCVEPSSTTPALCDNMSWAQDLKTAINVEDLACPVDLESIAPGRPTDETRSLIDSEFAEWIRSVIISPVTRNRRPGGMARNVAGMNSSKLRRYQYARIQGLYKRNRGRCADEVLSGKWTEVAGTSVQMKDMEPVWRGIMETPSVSDTRTPVSVGPILWQLLAPVTVHELEQTLRNSSKTAPGPDSISWKQLKGISANALVSHFNLWQLASYQPSPMRLGRTVLLEKVRGSLDPLKQRPITIASYVIRTFHKIMANRLESTLPWSVRQKAFIKGDGIAQNVWLLKNIIEEHKNSLTPLCLAFVDVKKAFDSVSHETILIAARRMGVPEPLVEYLKEFYRDSKTVLEVGGERSAEIKTARGVKQGDPLSAYLFNAVVEMALADLDPHIGVYVGKEKLNALAYADDVVLLASSPKGLQSQLDAFVKSLGRGGLEISAGANGKSASLRIDVDGKAKRWVVNPHDFLKAGEESVPALSVTQGYKYLGITISASRASCIAKKVLDDGMKELSKAPLKPQQRLYLLRLLLIPKLYHTLVLSNVTDKTLMWLDCCVRSAVRSWLRLPKDTTNAFFHAKERDGGLAIPSLRHSVPIMRSNRLGELVSSADPAVVEMLVTKKFQHLLRKSEKLPKLGGVAVASKTAASLRWRDLLHSSVDDRGLISHPDVPQIHRWISDGSSLMSGAEFIGCVQLRAGVLPTAKRASRGRPARRVDCDACGRIETVGHILQVCRRTWGHRIRRHDNLCNFVAGKLTRKGYRVSQEVFMNLPNGTKMKPDLVVSRDGVSYVIDITVVADNANLDSEHRSKVSKYEVQCMTDFVQRLHGNSAVVYTEMAMNWRGAMAPLFFQSMTELGLSQNDLKLISVKTVTDGMKTYIAHRRGTHRRPAYEVHRL

SEQ ID NO: 3241 - protein, 1235 aa, Hycleus cichorii
MAPVSIPTQTIEKKKGKGIVPKTKNLDHAATKVDHPKPCVSHVGRIDKNHNPSGAERINNSSSPPANLPVRAEDSDTTDFDHDESESSDSPDNDSIDDSDFDNNLGSQPSKQLICPKCRKLFQSASGLRRHQKRPCTSDFNCRYCGACFSKFSGLRQHERRVHREQYEEEHLEKYAEICRVCGSSYATFAGLRQHHRQRHADVPFEHDSVLYRRVAKAELSSKESVSNKALTYKTGLTLDQLRRIRAKQEYKDLLAQMSSSTRLSTSRYSGNVSTAKSPSPANYNNNVEVVDATAVTSTLSKRMSIDMLTVQPSVPELTENLMSDEESDENLDNCPGYRLFYDDPTPEPIPDTLPEPPVTAELRTPFADHLATAVETFKSIDPQLSSLAQSALTGCTDELTDALDRYLSSRFKQTSNRKVNSYARERKQCPPYGVRLSGSGKRAEKYKKAQDLYRKNRRMLTDIIITDKTFDASYEQPNISDVERLYSDIFETASPPDNSPFVFDSPTTRLDEPIAADDVARAKMGWRCSAPGSDGIALKDIVRCPNNVLCVVFNIILYRSCMPTSWLVMRTTLIPKTGDLKDSSNWRPITVGPGLQRLLHRILAARLSSVVTLNSSQRGFTDIDGTLANSLILNQFIQLKSKKLLPFSIVSLDVRKAFDMVSHHSVKRALLGRGLTGVLIDYIFKTLDCSSTTIRIGSAVTRPIKINRGVRQGDPLSPLLFNIVLDELLLQLQSVGLGGHINDTLRCPAMAFADDIVLLSDTVEDMRDSLNVAERFFSMRGMSLNPNKCHAISITIANRRTIAMKEPLFFVGGRPITMVRQTNPFKYLGHGFDSKGILRPCLPNLDIWLRRLCAAPLKPDQKLVLLKQYIVPKILYGLQNPKVTLKTLKEGDRLIRMAVKRFMHLNLHTPDAVLYARLRNGGIGIPELSSSIPGTLLKRIDTLTEINDDFVLSYVLQSVDVRNLVDRLHRMVGPIAPDLKWREKIISGPLTRGLQAAGEDEASRSWVDARPFGWTGRDYVRAIQLRTANLPTRAIPSNPPNQRKCRGGCYNDETLAHVLQVCPVTHGARINRHNEIVKKVISNCRKHKLNVELEPHVRHVDGTLFKPDIALHGENNTVIISDVQVTWASDTPLESVWERKKKVYDCIKFRQAAGRLWPNKFLTFCPIIIEARGIWPRANRTAEKLLRIDRQTKRGCVLSALKWGSSIHRMFSKNVYRTGPGPPGGFFQNLRPTT

SEQ ID NO: 3242 - protein, 1221 aa, Hycleus cichorii
MKNNNEKLAAAKVKQLRPCDEHVGRDRNSIKRSGAEYRTYSSSPPANHTASAVDNVYIDNDSRESSSDNYTDNDSTTDSDFPITGNARSSSKRFLCHKCGKAYLSASGLRRHSKRQCSSHFNCGHCQAKFPTYRGLRQHMKRVHPEQYDDEHLRVYKETCGVCGASFTGFAGLRQHHRQRHADVPFAADCALFTRIAEAEASLKGKMTYKALIRKTGLTRDQLRRAREKPAYKDLLNRMINLASRRSSYRFSQAPQPAPLSYGNSSNNDIVSDVSTPTVVGLRRSGPIKLQATGETFENRPLSTLSGQQLIIDDLEEEYHLSPGYRLFDEDFSPERRQVDVPASPVPPGDDSPYMEIIANSIEKYKVSDPHLSRLASVALEGSDEDVAGAMELWLNVTFRKSSCRNLRAASDAFQRRPAYGVRSSGRGKRAANFKKAQDLFRRNRRVLTDIIISNKTFDSSPETPNIADVEDLYVSILESASPSDDSPFVVHHSAIQIDEPITDEIVANAKLGWRCSAPGSDGLSLRDITRCPNDKLSLFFNIVLFRCCLPSSWCSMRTTLIPKNGDSSDPSNWRPITVGSGMQRLLHRILASKLLSVVSLNGNQRGFINLDGTLANSLILDHFIRTKTRQILPFNVVSLDVRKAFDTVSHHSIIRALRGRGLTGTWIEYIIKTLGTSSTVIKVGQNTTRPIKINRGVRQGDPLSPILFNIVIDELLQQLYGLGIGGRIDESVRCPAMAFADDIVLLADDVGEMHDILGVAERFFLARGMSLNSNKCHAISTKIVGRRAIAVKDRIFCVDGNYISMVRQTNPFRYLGHEFDSRGILKPCLPNLDTWLRRLCSAPLKPDQKLILLKQHIVPKIFYGLQNPKVTARTLKEGDRLIRLAAKRFLHLNIHTPDAVLYARLRNGGIGIPELSSSIPRTLLKRIESLLDVSDDDTLSCVMRTDDMRHLIYRLKRLLGPVASDLKWLEKISSGPLTRGLEAAVDDVASRSWIDWKPMWWTGRDYVRAIQLRTANLPTKAIPSNPPNQRKCRGGCNNDETLAHVLQVCPVTHGPRISRHNDIVKKIANCCRKRQLNIEVEPHVRHVDGTLFKPDLVVHERDNRTIISDVQISWASDASLESVWERKRKIYDCPKFRQAAGRLWPNHSLTFCPVIIEARGIWPRANSIAEKVLKIDKQTKRSCVLSTIKWGCSIHRMFTKNVWRRGPGPPGGFFRQITQQ

SEQ ID NO: 3243 - protein, 1284 aa, Hycleus cichorii
MVGAVDVSVPSYRILRKRKPIDYNESGASTSKAAVCAPSTSKAQMNFNKEDKKFNNTKNLKAASKGEHAVPCVDHVGRNKTIKLRSGTEIRVYTSPPQADPISSADDIATSSKNGSENLYSADSDNIRSDNFDDTDDDEDFTPESDSSSDLGASASSSFVCNKCGKRFKSASGRRRHLKHPCTTDHVCRICGFKFPKRSGLRQHERLAHRDLYMEEQLMLNSEVCNICNAAFSSYAGLRQHHRVRHGDTPFEGDFKMFEKVAKVEASLGGQMNYKTVMRKTGLTRDQIRRMREKQPYKDLLFKILHPTTSSEVQNITDADNDVSASDEELLSSNVEAVPNVIENVLTDVNRPYDATTNSDNSHASMDVPVNLYSAPIGDDNHLLDLTPTTSSADELVTTPITEEPVLNGAISRSPTIREFLTSVTVQQDRFDPGIIRLVEVALNDNDDRALVRTLDEWLSRRFQSGRNRRTNVPYVSRQHRPAYGAGLSGRGRRAAKYKKAQDLFKKNKRMLTDIIISDRYADSPNELPAVQDVEDLYSEIFETPSPRDDAPFTGFRSSVSLDDPITADDVAHAKAGWKCSAPGPDGVPLKEVMLCSDEQLSVLYSIIIYRNCLPTSWSTMRTTLIPKSGDLKSATNWRPITVSSGLQRLLHRILVFRLTSVVELHRSQRGFINIDGTLANSIILDHFIKTRNLKNLPSNIVSLDLRKAFDMVSHHSVLRALRGHGLSGLWIDYIATTLDNASTIIKVGQLTTRSIKISRGVRQGDPLSPFLFNLVIDELLLLLDGLQLGGHINESTRCSAMAFADDIVLLTDTVEDMRDALALTETFFQMRGMKLNPEKCHAASTCIVNRKIIANYKPLFYVDGRPISMVRQTNPFKYLGHQFDSKGILKPCLPNLDIWLKRLCTAPLKPDQKLIILKQHIVPRILYGLQNPKVTSKILKEGDRLIRLAVKRFLHLNLHTPDAVLYAKLRNGGIGVPELSSVVPGTLLKRLTNLSNYTDDVILAAVLQSAEVASLIDRLSRMIGPIQPDERWREKLATGPLTRGLEAAGEDVASRSWVDGKPYGWTGRDYVRAIQLRTANLPTRAIPSNPPNQRKCRGGCQNDETLAHVLQVCPVTHGARINRHNEIVRKIVSSCRKKRMNVTEEPHIRHLDGTLYKPDIVVHTEDNKIIVSDVQVSWASDTTLESVWLRKKNVYDCQKFRQAAGRQWPNKSFIFCPIIIEARGIWPRANNFAEKLLKIDRQTKKSCIHSALKWGSSIHRMFSKNVWRTGPGPPGGFFGHLNL

SEQ ID NO: 3244 - protein, 1019 aa, Sacculina carcini
MATPNAVCGVCNAVARAGPSTPICPACKIFFSRNKDRNMSCNRGGNCPLTPTDRSCAGCRLARCLAVGVDQQTPDSTSSQQLCAHCNTPSANKRTISCAACEQIYHLTCVGVTRSQADVLPAWHCRGCLRLQAECGDIHSPEGIDTNENTPDDLATALASLRQQRHVRQHVPRALRHRVAADLTERITAALQQRTPTAWWRLLSYAATGPLSTGITTPQPGACHHTRPRPQNEDAVVSRSVRAKCADGDIRGALRILTSDDAVAGVSDEVTQALEAKHPPSSEDEPQWPQDQLPQGPSFDASDVKAAVHALPKSSSGGLDGLRPMHVRQLLAPQTAEAGNQLLKALTALINCCTQGLIPDFAKGAFFSARLVALRKKSGGLRPIAVGSIFRRIASKLVAGKLASALAHELRPVQLGVCTRMGCEAAVHATRHFISTTKGQRGHVLVKLDVANAFNCVNRRTLLDEVSRRFPVALPLVAQAYGQPTPLFHGTRRIWSCRGVQQGDPLGPALFALAVDPVAQQLESPLNVWYLDDATIGGPSDVVQSDIRRLVPVLHDIGLTLNTTKCEAIGLGPSDDDTADTLIQRHLPGATCTPAATATLLGAPLESGGIPAALDNIHHQLELLIRRTTNIGSHPALFFLSRYASVPRAMYLMRAAPVYRATSQLVTIDESLRSAIGSCCNVDLDDDQWEQAALPVRLGGIGARRLIDVALPAHIASMEAAGDLVSHIIDRQRGDRPGLPAPPVEEFVSRMCPAFSQQNVPESLTQRHLDTSASEHRLNSMLQRANQVDRARLLAAAAPHSGAWLSALPISSLGLLLPDEAVRVGVALRLGAAIQQPHRCRCGSTTDRWGHHSLSCCHNVGRLPRHTALNDIVHRSLASAGVAAVLEPRGLNRGDGRRPDGITIFPFRRGKSLVWDVTCTNTFSSAHLLEGAVAPGAAARAAEETKRRRYLDLSQRYDFAPLAIETTGVLGSTFDDLIKIIGRRITERSGEPRETAWLRERVSLAVVRGNAATITGSPN

SEQ ID NO: 3245 - protein, 1018 aa, Sacculina carcini
MATPNAVCGVCNAVARAGPSTPICPACKIFFSRNKDRNMSCNRGGNCPLTPTDRSCAGCRLARCLAVGVDQQTPESTSPQQLCAHCNTPSANKRTISCAACEQIYHLTCVGVTRSQADVLPAWHCRGCLRLQAECGDIHSPEEDTNDNTPDDLATALASLRQQRHVRQHVPRALRHRVAADLTERITAALQQRTPTAWWRLLSYAATGPLSTGITTPQPGACHHTRPRPQNEDAVVSRSVRAKCADGDIRGALRILTSDDAVAGVSDEVTQALEAKHPPSTVDEPQWPQDQLPQGPSFDASDVKAAVHALPKSSSGGLDGLRPMHVRQLLAPQTAEAGSQLLKALTALINCCTQGLIPDFAKGAFFSARLVALRKKSGGLRPIAVGSIFRRIASKLVAGKLASALAHELRPVQLGVCTRMGCEAAVHATRHFISTTKGQRGHVLVKLDVANAFNCVNRRTLLDEVSRRFPVALPLVAQAYGQPTSLFHGTRRIWSCRGVQQGDPLGPALFALAVDPVAQQLESPLNVWYLDDATIGGPSDVVQSDIRRLVPALHDIGLTLNTTKCEATGLGPSDDDTADTLIQRHLPGATCTPAATATLLGAPLESGGIPAALDNIHHQLELLIRRTTNIGSHPALFFLSRYASVPRAMYLMRAAPVYRATSQLVTIDESLRSAIGSCCNVDLDDDQWEQAALPVRLGGIGARRLIDVALPAHIASMEAAGDLVSHIIDRQRGDRPGLPAPPVEDFVSKMCPAFSQQNVPESLTQRHLDTNASEHRLNSLLQRANQVDRARLLAAAAPHSGAWLSALPISSLGLLLPDEAVRVGVALRLGAAIQQPHRCRCGSTTDRWGHHSLSCCHNVGRLPRHTALNDIVHRSLASAGVAAVLEPRGLNRGDGRRPDGITIFPFRRGKSLVWDVTCTNTFSSAHLLEGAVAPGAAARAAEETKKRRYSDLSQRYDFAPLAIETTGVLGSTFDDLIKIIGRRITERSGEPRETAWLRERVSLAVVRGNAATITGSPN

SEQ ID NO: 3246 - protein, 1018 aa, Sacculina carcini
MATLNATCAVCDAAARAGTSMPICPACKIFFVRNKDRNMACNRGGNCPLTPTDRSCAVCRLARCLAVGVDQQTPDSTSPQQLCAHCNTPSANKRTISCAACEQIYHLTCVGVTRSQADVLPAWHCRGCLRLQAECGDIHPPEGIDTSDNTPDDLATALASLRQQRHVRQHVPRALRHRVAADLTERITAALQQRTPTAWWRLLSYAATGPLSTGITTPQPGARHHTRPRPQNDDAVVSRSVTAKLADGDIRGALRILTSDDAVAGVSDEVTRALEAKHPPSTEDEPQWPQDQLPGPSFDDRDVKAAVHALPKSSSGGLDGLWPMHVRQILAPQTVEAGNQLLEALTALINCCAQGLIPDFAKGAFFSARLVALRKKSGGLRPIAVGSIFRRIASKLVAGKLASALAHELRPVQLGVCTRMGCEAAVHATRHFISTTKGQRGHVLVKLDVANAFNCVNRRTLLDEMSRRFPVALPLVAQAYGQPTPLFHGTRRIWSCRGVQQEDPLGPALFALAVDPVAQQLESPLNVWYLDDATIGGPSDVVQSDIRRVVPALNDIGLTLNTTKCEAIGLGPSDDDTADTLIQRHLPGATSTPAAMATLLGAPLESGGIPAALDNIHRQLELLIRRTTNIGTHPALFFLSRYASVPRAMYLMRAASVNRANSQLVTIDESLRSAIGNCCNIDLDDDQWEQAALPVRLGGIGARRLIDVALPAHIASMEAAGDLVSRIIDRQRGDRPGLPAPPVEEFVSRMCPAFSQQNVPESLTQRHLDTNASEHRLNSLLQRANQVDRARLLAAAAPHSGAWLSALPISSLGLLLPDEAVRVGVALRLGAAIKQPHRCRCGSMTDRWGHHSLSCCHNVGRLPRNTALNDIVYRSLASAGVAAVLEPRGLNRGDGRRPDGITIFPFRRGKSLVWDVTCTNNFSSAHLLEGAVAPGAAARAAEETKKRRYSDLSQRYDFAPLAIETTGVLGSAFDDLIKTIGRRITERSGEPRETAWLRQRVSLAVVRGNAAAITGSPN

SEQ ID NO: 3247 - protein, 695 aa, Sacculina carcini
MHVRQLLAPQTAEAGNQLLKALTALINCCAQGLIPDFAKGAFFSARLVALRKKSGGLRPIAVGSIFRRITSKLVAGKLASALAHELRPVQLGVCTRMGCEAAVHATRHFISTTKGQRGHVLVKLDVANAFNCVNRRTLLDEVSRRFPVALPLVAQAYGQPTPLFHGTRRIWSCRGVQQGDPLGPALFALAVDPVAQQLESPLNVWYLDDATIGGPSDVVQSDIRRLVPALHDIGLTLNTTKCEAIGLGPSDDDTADTLIQRHLPGATSTPAAMATLLGAPLESGGIPAALDNIHRQLELLIRRTTNIGSHPALFFLSRYASVPRAMYLMRAAPVYRATSQLVTIDESLRSAIGNCCNVDLNDDQWEQAALPVRLGGIGARRLIHVALPAHIASMEAAGDLVSRIIDRQRGDRPGLPAPPVEEFVSRMCPAFSQQNVPESLTQRHLDTNASEHRLSSLLQRSNQVDRARLLAAAAPHSGAWLSALPISSLGLLLPDEAVRVGVALRLGAAIQQPHRCRCGSMTDRWGHHSLSCCHNVGRLPRHTALNDIVYRSLASTGVAAVLEPRGLNRGDGRRPDGITIFPFRRGKSLVWDVTCTNTFSSAHLLEGAVAPGAAARAAEETKKRRYSDLSQRYDFAPLAIEATGVLRSAFDDLIKTIGRRITERSGEPRETAWLRQRVSLAVVRGNAAAITGSQN

SEQ ID NO: 3248 - protein, 695 aa, Sacculina carcini
MHVRQLLAPQTAEAGNQLLKALTALINCCAQGLIPDFAKGAFFSARLVALRKKSGGLRPIAVGSIFRRIASKLVARKLVSALAQELRPVQLGVCTRMGCEAAVRATRHFISTTKGQRGHVLVKLDVANAFNCANRRTLLDEVSRRFLVALPLVAQAYGQPTPLFHGTRRIWSCRGVQQGDPLGPALFALAVDPVAQQLESPLNVWYLDDATIGGPSDVVQSDIRRLVPALHDIGLTLNTTKCEAIGLGPSDDDTADTLIQRHLPGATSTPAAMATLLGAPLESGGIPAALDNIHRQLELLIRRTTNIGSHPALFFLSRYASVPRAMYLMRAAPVYRATSQLVTIDESLRSAIGNCCNVDLDDDQWEQAALPVRLGGIGARRLIDVALPAHIASMEAAGDLVSRIIDCQRGDRPGLPAPPVEEFVSRMCPAFSQQNVLESLTQRHLDTNASEHRLNSLLQRSNQVDRARLLAAAAPHSGAWLSALPISSLGLLLPDEAVRVGVALRLGAAIQQPHRCRCGSMTDRWGHHSLSCCHNVGRLPRHTALNDIVYRSLASAGVAAVPEPRGLNRGDGRRPDGITVFPFRRGKSLVWDVTCTNTFSSAHLLEGAVATGAAARAAEETKKRRYSDLSQRYDFAPLAIETTGVLGSAFDDLIKIIGRRITERSGEPRETAWLRQRVSLAVVRGNAAAITGSQN

SEQ ID NO: 3249 - protein, 1018 aa, Sacculina carcini
MATPNAVCGVCNAVARAGPSTPICPACKIFFSRNKDRNMSCNRGGNCPLTPTDRSCAGCRLARCLAVGVDQQTPDSTSPQQLCAHCNTPSANKRTISCAACEQIYHLTCVGVTRSQADVLPAWNCRGCLRLQAECGDIHSPEEDTNDNTPDDLATALASLRQQRHVRQHVPRALRHRVAADLTERITAALQQRTPTAWWRLLSYAATGPLSTGITTPQPGACHHTRPRPQNEDAVVSRSVRAKCADGDIRGALRILTSDDAVAGVSDEVTQALEAKHPPSTVDEPQWPQDQLPQGPSFDASDVKAAVHALPKSSSGGLDGIRPMHVRQLLAPQTAEAGSQLLKALTALINCCTQGLIPDFAKGAFFSARLVALRKKSGGLRPIAVGSIFRRIASKLVAGKLASALAHELRPVQLGVCTRMGCEAAVHATRHFISTTKGQRGHVLVKLDVANAFNCVNRRTLLDEVSRRFPVALPLVAQAYGQPTPLFHGTRRIWSCRGVQQGDPLGPALFALAVDPVAQQLESPLNVWYLDDATIGGPSDVVQSDIRRLVPALHDIGLTLNTTKCEATGLGPSDDDTADTLIQRHLPGATCTPAATATLLGAPLESGGIPAALDNIHHQLELLIRRTTNIGSHPALFFLSRYASVPRAMYLMRAAPVYRATSQLVTIDESLRSAIGSCCNVDLDDDQWEQAALPVRLGGIGARRLIDVALPAHIASMEAAGDLVSHIIDRQRGDRPGLPAPPVEDFVSKMCPAFSQQNVPESLTQRHLDTNASEHRLNSLLQRANQVDRARLLAAAAPHSGAWLSALPISSLGLLLPDEAVRVGVALRLGAAIQQPHRCRCGSTTDRWGHHSLSCCHNVGRLPRHTALNDIVHRSLASAGVAAVLEPRGLNRGDGRRPDGITIFPFRRGKSLVWDVTCTNTFSSAHLLEGAVAPGAAARAAEETKKRRYSDLSQRYDFAPLAIETTGVLGSTFDDLIKIIGRRITERSGEPRETAWLRERVSLAVVRGNAATITGSPN

SEQ ID NO: 3250 - protein, 1016 aa, Sacculina carcini
MATLNETCAVCDAAARAGTSTPICPACKIFLSRNKDRNMSCNRGGNCPLTPTDRSCAGCRLARCLAVGVDQQTPDSTSPQQLCAHCNTPCANKRTISCAACEQIYHLTCVGVTRSQADVLPAWHCRGCLRLQAECGDIHSPEGIDTKDNTPDDIATALASLRQQRHVRQHVPRALRHRVAADLTERITTALQQRTPTAWWRLLSYAATGPLSTGITTPQSGARHHTRPRPQNEDAVVSRSVRAKCADGDIRGALRILTSDDAVAGLSDEVTQALEAKHPPSTEDEPQWPQDQLPQGPSFDASDVKAAVHALPKSSSGGLDGLRPMHLRQLLAPQTSEAGNQLLKALTALINCCSQGLIPDFAKGAFFSARLVALRKKSGGLRPIAVGSIFRRIASKLVAGKLASALAHELHPVQLGVCTRLGCEAAVHATRHFLSANKGRRGHVLVKLDVANAFNCVNRRTLLDEVSRRFPVALPLVAQAYGQPTPLFHGTRRIWSCRGVQQGDPLGPALFALAVDPVAQRLESPLNVWYLDDATIGGPSDVVQSDIRRLVPALHDIGLTLNPTKCKAIGLGPSDDDTADTLIQRHLPGSSSTPAATATLLGAPLESGGIPAALDNIHHQLELLIRRTTNIGSHPALFFLTRYASVPRAMYLMRAAPVYRATSQLVTIDESLRSAIGSCCNVDLDDDQWEQAALPVRLGGIGARRLIDVALPAHIASMEAAGDLVSHIIDRQRGDRPGLPAPPVEEFVSKMCPAFSQDQPLTQRHLDTSASELRWNNLLQRANQVDRARLLAAAAPHSGAWLSALPISSLGLLLPDEAVRVGVALRLGAAIQQPHRCRCGSTTDRWGHHSLSCCHNVGRLPRHTALNDIVHRSLASAGVAAVLEPRGLNRGDGRRPDGITVFPFRRGKSLVWDVTCTNTFSSAHLLEGAVAPGAAARAAEETKKRRYSDLSQRYDFAPLAIETTGVLGSTFDDLIKIIGRRITERSGEPRETAWLRERVSLAVVRGNAATITGSPN

SEQ ID NO: 3251 - protein, 1016 aa, Sacculina carcini
MATLNETCAVCDAAARAGTSTPICPACKIFLSRNKDRNMSCNRGGNCPLTPTDRSCAGCRLARCLAVGVDQQTPDSTSPQQLCAHCNTPSANKRTISCAACEQIYHLTCVGVTRSQADVLPAWHCRGCLRLQAECGDIHSPEGIDTNDNTPDDLATALASLRQQRHVRQHVPRALRHRVAADLTERITTALQQRTPTAWWRLLSYAATGPLSTGITTPQPGARHHTRPRPQNEDAVVSRSVRAKCADGDIRGALRILTSDDAVAGLSDEVTQALEAKHPPSTEDEPQWPQDQLPQGPSFDASDVKAAVHALPKSSSGGLDGLRPMHLRQLLAPQTAEAGNQLLKALTALINCCAQGLIPDFAKGAFFSARLVALRKKSGGLRPIAVGSIFRRIASKLVAGKLASALAHELRPVQLGVCTRLGCEAAVHATRHFLSANKGRRGHVLVKLDVANAFNCVNRRTLLDEVSRRFPVALPLVAQAYGQPTPLFHGTRRIWSCRGVQQGDPLGAALFALAVDPVAQRLESPLNVWYLDDATIGGPSDVVQSDIRRLVPALHDIGLTLNTTKCEAIGLGPSDDDTADTLIQRLLPGSTSTPAAMATLLGAPLESGGIPAALDNIHHQLELLIRRTTNIGSHPALFFLSRYASVPRAMYLMRAAPVYGATSQLVTIDESLRSAIGNCCNVDLDDDQWEQAALPVRLGGIGARRLIDVALPAHIASMEAAGDLVSHIIDRQRGDRPGLPAPPVEEFVSKMCPAFSQDQPLTQRHLDTSASELRWKNLLQRANQVDRARLLAAAAPHSGAWLSALPISSLGLLLPDEAVRVGVALRLGAAIQQPHRCRCGSMTDRWGHHSLSCCHNVGRLPRHTALNDIVHRSLASAGVAAVLEPRGLNRGDGRRPDGITIFPFRRGKSLVWDATCTNTFSRAHLLEGAVAPGAAARAAEETKRRRYLDLSQRYDFAPLAIETTGVLGSTFDDLIKIIGRRITERSGEPRETAWLRQRVSLAVVRGNAAAITGLLN

SEQ ID NO: 3252 - protein, 1016 aa, Sacculina carcini
MATLNETCAVCDAAARAGTSTPICPACKIFLSRNKDRNMSCNRGGNCSLTPTDRSCAGCRLARCLAVGVDQQTPDSTSPQQLCAHCNTPSANKRTISCAACEQTYHLTCVGVTRSQADVLPAWHCRGCLRLQAECGDIHSPEGIDTNDNTPDDIATALASLRQQRHVRQHVPRALRHRVAADLTERITTALQQRTPTAWWRLLSYAATGPLSTGITTPQAGARHHTRPRPQNEDAVVSRSVRAKWADGDIRGALRILTSDDAVAGLSDEVTQALEAKQPPSTEDEPQWPQDQLPQGPSFDANDVKAAVHALPKSSSGGLDGLRPMHLRQLLAPQTAEAGNQLLKALTALINCCAQGLIPDFAKGAFFSARLVALRKKSGGLRPIAVGSIFRRIASKLVAGKLTSALAHELRPVQLGVCTRLGCEAAVHATRHFLSANKGRRGHVLVKLDVANAFNCVNRRTLLYEVSRRFPVALPLVAQAYGQPTPLFHGTRRIWSCRGVQQGDPLGPALFALAVDPVAQRLESPLNVWYLDDATIGGPSDVVQSDIRRLVPALHDIGLTLNTTKCEAIGLGPSDDDTADTLIQRHLPGSTSTPAAMATLLGAPLESGGIPAALDNIHHQLELLIRRTTNIGSHPALFFLSRYASVPRAMYLMRAAPVYRATSQLVTIDDSLRSAIGSCCNVDLDDDQWEQAALPVRLGGIGARRLIDVALPAHIASMEAAGDLVSHIIDRQRGDRPGLPAPPVEEFVSKMCPAFSQDQPLTQRHLDTSASELRWNNLLQRANQVDRARLLAAAAPHSGAWLSALPISSLSLLQPDEAVRVGVALRLGAAIQQPHRCRCGSMTDRWGHHSLSCCHNVGRLPRHTALNDIVHRSLASAGVAAVLEPRGLNRGDGRRPDGITIFPFRRGKSLVWDATCTNTFSRAHLSEGAVAPGAAARAAEETKRRRYLDLSQRYDFAPLAVETTGVLGSTFDDLIKIIGRRITERSGEPRETAWLRQRVSLAVVRGNAAAITGLLN

SEQ ID NO: 3253 - protein, 1016 aa, Sacculina carcini
MATLNETCAVCDAAARAGTSTPICPACKIFLSRNKDRKMSCNRGGNCPLTPTDRSCAGCRLARCLAVGVDQQTPDSTSPQQLCAHCNTPSANKRTISCAACEQIYHLTCVGVTRSQADVLPAWHCRGCLRLQAECGDIHSPEGIDTSDNTPDDIATALASLRQQRHVRQHVPRALRHRVAADLTERITTALQQRTPTAWWRLLSYAATGPLSTGIKTPQPGARHHTRPRPQNEDAVVSRSVRAKCADGDIRGALRILTSDDAVAGLSDEVTQALEAKHPPSTEDEPQWPQDQLPQGPSFDASDVKAAVHALPKSSSGGLDGLRPMHLRQLLAPQTAEAGNQLLKALTVLINCCAQGLIPDFAKGAFFSARLVALRKKSGGLRPIAVGSIFRRIASKLVAGKLASALAHELRPVQLGVCTRLGCEAAVHATRHFLSANKGRRGHVLVKLDVANAFNCVNRRTLLDEVSRRFPVALPLVAQAYGQPTPLFHGTRRIWSCRGVQQGDPLGPALFALAVDPVAQRLESPLNVWYLDDATIGGPSDVVQSDIRRLVPALHDIGLTLNTTKCEAIGLGPYDDDTADTLIQRHLPGSTSTPAAMATLLGAPLESGGIPAALDNIHHQLELLIRRTTNIGSHPALFFLSRYASVPRAMYLMRAAPVYRATSQLVTIDESLRSAIGSCCNIDLDDDQWEQAALPVRLGGIGARRLIDVALPAHIASMEAAGDLVSHIIDRQRGDRPGLPAPPVEEFMSKMCPAFSQDQPLTQRHLDTSASELRWNNLLQRANQVDRARLLAAAAPHSGAWLSALPISSLGLLLPDEAVRVGVALRLGAAIQQPHRCRCGSMTDRWGHHSLSCCHNVGRLPRHTALNDIVHRSLASAGVAAVLEPRGLNRGDGRRPDGITIFPFRRGKSLVWDATCTNTFSRAHLLEGAVAPGAAARAAEETKRRRYLDLSQRYDFAPLAVETTGVLGSTFDDLIKIIGRRITERSGEPRETAWLRQRVSLAVVRGNAAAITGLLN

SEQ ID NO: 3254 - protein, 996 aa, Sacculina carcini
MATLNETCAVCDAAARAGTSTPICPACKIFLSRNKDRNMSCNRGGNCPLTPTDRSCAGCRLARCLAVGVDQQTLDSTSPQQLCAHCNTPSANKRTISCAACEQIYHLTCVGVTRSQADVLPAWHCRGCLRLQAECGDIHSPEGIDTNDNTPDHIATALASLRQQRHVRQHVPRALRHRVAADPTERITTALQQRTPTAWWRLLSYAATGPLSTGITTPQPGARHHTRPRPQNEDAVASRSVRAKCADGDIRGALRILTSDDAVAEPQWPQDQLPQGPSFDASDVKAAVHALPKSSSGGLDGLRPMHLRQLLAPQTAEAGNQLLKALTALINCCAQGLIPDFAKGVFVSARLVALRKKSGGLRPIAVGSIFRRIASKLVAGKLASALAHELRPVQLGVCTRLGCEAAVHATRHFLSANKGRRGHVLVKLDVANAFNCVNRRTLLDQVSRRFPVALPLVAQAYGQPTPLFHGTRRIWSCRGVQQGDPLGPALFALAVDPVAQRLESPLNVWYLDDATIGGPSDVVQSDIRRLVPALHDIGLTLNTTKCEAIGLGPYDDDTADTLIQRHLPGSTSKPAAMATLLGAPLESGGIPVALDNIHHQLELLIRRTTNIGSHPALFFLSRYASVPRAMYLMRAAPVYRATSQLVTIDESLRSAIGSCCNIDLDDDQWEQAALPVRLGGIGARRLIDVALPAHIASMEAAGDLVSHIIDRQRGDRPGLPAPPVEEFVSKMCPAFSQDQPLTQRHLDTSASELRWNNLLQRANQVDRARLLAAAAPHSGAWLSALPISSLGLLLPDEAVRVDVALRLGAAIQQPHRCRCGSMTDRWGHHSLSCCHNVGQLPRHTALNDIVHRSLASAGVAAVLEPRGLNRGDGRRPDGITIFPFRRGKSLVWDATCTNTFSRAHLLEGAVAPGAAARAAEETKRRRYLDLSQRYDFAPLAVETTGVLGSTFDDLIKIIGRRITERSGEPRETAWLRQRVSLAVVRGNAAAITGLLN

SEQ ID NO: 3255 - protein, 990 aa, Sacculina carcini
MATLNETCAVCDAAARAGTSTPICPACKIFLSRNKDRDMPCNHGGNCPLTPTDRSCAGCRLARCLAVGVDQQTPDSTSPQQLCAHCNTPSANKRTISCAACEQIYHLTCVGVTRSQADVLPAWHCRGCLRLQAECGDIHSPDGIDTNDNIPDDIATALASLRQQRHVRQHVPRALRHRVAADLTERITTALQQRTPTAWWRLLSYAATDPLSTGITTPQPGARHHTRPRPQNEDAVVSRSVRAKCADGDIRGALRILTSDDAVAGLSDEVTQVLEAKNPPSTEDEPQWPQDQLPQGPSFDASDVKAAVHALPKSSSGGLDGLRPLHLRQLLAPQTAEAGNQLLKALTALINCCAQGLIPDFAKGAFFSARLVTLRKKSGGLRPIAVGSIFRRIASKLVAGKLASALAHELRPVQLGVCTRLGCEAAVHATRHFLSANKGRRGHVLVKLDVANAFNCVNRRTLLDEVSRRFPVALPLVAQAYGQPTPLFHGTRRIWSCRGVQQGDPLGPALFALAVDPVAQRLESPLNVWYLDDATIGGPSDVVQSDIRRLVPALHDIGLTLNTTKCEAIGLGPSDDDTADTLIQRHLPGSTSTPAAMATLLGAPLESGGIPAALDNIHHQLELLIRRTTNIGSHPALFFLSRYASVPRAMYLMRAAPVYRATSQLVTIDESLRSAIGSCCNVDLDDDQWEQAALPVRLGGIGARRLIDVALPAHIASMEAAGDLVSHIIDRQRGDRPGLPAPPVEEFVSKMCPAFSQDQPLTQRHLDTSASELRWNNLLQRANQVDRARLLAAAAPHSGAWLSALPISSLGLLLPDDAVRVGVALRLGAAIQQPHRCRCGSMTDRWGHHSLSCCHNVGRLPRHTALNDIVHRSLASAGVAAVLEPRGLNRGDGRRPDGITIFPFRRGKSLAWDATCTNTFSRAHLLEGAVAPGAAARAAEETKRRRYLDLSQRYDFAPLAVETTGVLGSTFDDLIKIIGRRITERSGEPR

SEQ ID NO: 3256 - protein, 1013 aa, Sacculina carcini
MATLNETCAVCDAAARAGTSTPICPACKIFLSRNKDRNMSCNRGGNCPLTPTDRSCAGCRLARCLAVGVDQQTPDSTSPQQLCAHCNTPSANKRTISCAACEQIYHLTCVGVTRSQADVLPAWHCRGCLRLQAECGDIHSPEGIDTNDNTPDDLATALASLRQQRHVRQHVPRALRHRVAADLTERITTALQQRTPTAWWRLLSYAATGPLSTGITTPQPGARHHTRPRPQNEDAVVSRSVRAKCADGDIRGALRILTSDDAVAGLSDEVTQALEAKHPSSTEDEPQWPQDQLPQGPSFDASDVKAAVHALPKSSSGGLDGLRPMHLRQLLAPQTAEAGNQLLKALTALINCCTQGLIPDFAKGAFFSARLVALRKKSGVLRPIAVGSIFRRIASKLVAGKLASALAHELRPVQLGVCTRLGCEAAVHATRHFLSANKGRRGHVLVKLDVANAFNCVNRRTLLYEVSRRFPVALPLVAQAYGQPTPLFHGTRRIWSCRGVQQGDPLGPALFALAVDPVAQRLESPLNVWYLDDATIGGPSDVVQSDSRRLVPALHDIGLTLNTTKCEAIGLGPSDDDTADTLIQRHLPGSTSTPAAMATLLGAPLESGGIPAALDNIHHQLELLIRRTTNIGSHPALFFLSRYASVPRAMYLMRAAPVYGATSQLVTIDESLRSAIGSCCNVDLDDDQWEQAALPVRLGGIGARRLIDVALPAHIASMEAAGDLVSHIIDRQRGDRPGLPAPPVEELMCPAFSQDQPLTQRHLDTSASELRWNNLLQRANQVDRARLLAAAAPHSGAWLSALPISSLGLLLPDEAVRVGVALRLGAAIQLPHRCRCGSMTDRWGHHSLSCCHNVGRLPRHTALNDIVHRSLASAGVAAVLEPRGLNRGDGRRPDGITIFPFRRGKSLVWDATCTNTFSRAHLLEGAVAPGAAARAAEETKRRRYLDLSQRYDFAPLAVETTGVLGSTFDDLIKIIGRRITERSGEPRETAWLRQRVSLAVVRGNAAAITGLLN

SEQ ID NO: 3257 - protein, 1369 aa, Emmelina monodactyla
MQNSLQTNKRYNLRRRLPQTASIIETELENIPENTPISHSSSPISSTYSLFASPNSSTHSYNLRPESRSSSESYMSDGAVLEADAYNPTLTTGPTRARKRWSEDMNRFIWRTYLVATSLETRPRGYLDTLYKEFNSKFPNVNATKQRLGDQRRAIVNNKLLTDEILTEIRSEVTALLGTTENLLNFSITSQNNTLQSTSHNLQTQSAECLPSRTRMSWTPEINENVIRIYYTVTENETDKTNYRKKLHSKFTQLYPSLNHLSEQRVSDQLRAILNNNYITSQRLQEIKNEVSLILQNDNQNRVRDDLLSSLNTSNDFQLGLETQNIDLDVSSLSTSQDFVVNEQDATENFHSITEQTNIDRIFNETLTIFNNTDPTSRPYIPKQKPSRRLTNVVNYINKNILPKYLNTDQDFITLQTIIYTAAYTTAICNGTKINNNTDVTVRKPKQLNKPHWQLRLEKKVELLRSDIGRLTQFIRGNRSRKVLVAVNRIKLVYQTHAQHENPNSTMEHYLDTLKQKLSTTASRLKRYLACTNRKKQNALFNTNEKCFYRKISSQSVNKNTASLELPSAAQFHEFWANIWQKPVLHNDNANWLGQVSANCEAMTFNNITIDAFIKVISRTHNWKAPGTDKIHNFWYKKFTSAYPYIHTHINNFIQSPHTMPDYIAQGVTYMIPKDTDTKNPAKYRPITCLQTIYKILTACISETIYEHLETHNLLAEQQKGSRKKSQGCKEQLTLDNIVMRNALKNKKNVYAMYIDYKKAFDSVPHSWLLYILQVYKIHPSIVAFLEHTMKKWQTHLNINADGATITTEPIAICRGIFQGDSLSPLWFCLALNPLSYLLDNSNNGINLTHFNDQFKLTHLMYMDDIKLYASSKTELDDLARITQDFSNDIHMAFGIDKCKILSVERGKIVLNSYLLDNDQTIEPLLENETYKYLGFQQARQINQKTAKTEIIQKFKHRLTLILKTELNSRNCIKAINTFAIPILTYSFGIISWSKSDLVKFQRIINTLMTKFRKHHPKTCTQRMTLPKLDGGRGLIDVKNLHNKQITTLRQYFYTKSQTSQLHKLAIATDLKLTPLNLNNTSIQPNELIITNTEKITQWSQKALHGRHLADLSHAYVDKQESNAWLKRGELFPETEAFMLAIQDQVICTRNYKKHITKELPPNSSDICRHCNRAPETIQHITGACSRLVQTDYKHRHDQIANIIHQNIAHKLKLIPEKIAYYKYQPQTILENQQFKLYWDRTIITDRTVHCNRPDITLHNKTNKITYLIDIAVPNTHNLQTTISEKITKYQELAVELKRQWRSETVHIVPIVLSTTGVIPKSMKQSLAVLDLPSKSTINLMQKAAILNTCRITRKFLSSTSVLSTFITS

SEQ ID NO: 3258 - protein, 1362 aa, Emmelina monodactyla
MENLNTNKKYNLRRRLPQNAPCLQGRLRNISENSYQSNNGTTSPISSTQSLFESPNSSNSYNLRSQSRCSSVSHMSDGAVMEVEANSPTLTAVQTQTRKRWSEDMNRFIWRTYLVTTSLETRTSGYLDTLHREFNSTFPHMNASKQRLGDQRRAIVNNKLLTEEILKEIREEVTLLLSQNSDHSLSVTLQSDASQNINTQFSAGSLPTRTRMSWTSEINETIMKLYYEVTDLECDKTNYRKKLHAKFKETYPYLNHVSEQRISDQLRAIVNNNYISNQRLQEIKNEVIQALQNNELNEIHEHNTPPIIDENVQNTDSLSHITNTIPVSQTPQIVNDLDIEADSSITYIENTKIDQVFNDTLATFINTDPISRPYIPKQKTSRRLAYIVDYINKYLIPQHINSEQDFLHLQTIIYTSAYTAATCNGSKITSRPNNTMRINIQLHKPRWQVRLEKKVEQLRADIGRLTQFIRGNRNRKVVAAVKKIKANYQIHAQYENSNTTLEQYLDTLKQKLSSTANRLKRYLACTNRKKQNTLFNTNEKLFYRNISSPISPAANIPSELPSATELHRFWANIWQAPVHHNKDASWLNEINNDFENMPFNHIPVETFNKVMSRTHNWKAPGTDKIHNFWYKKFTSTHPHIHTHINNFILSPDTIPDYITQGTTYMIPKDTETQNPANYRPITCLQTIYKILTACISEIIYDHLDRHNILTEQQKGSRKNSQGCKEQLTLDSIVMRQAVKNKKDIHVMYIDYRKAFDSVPHSWLLQILQTYKIHPTIISFLEHTMHKWQTHLLLKQGNRTISTEPILIRRGIFQGDALSPLWFCLALNPLSQLLNQCNTGFSLKNNSEQFKLTHLMYMDDIKLYASTKTELDKLAGITQDFSKDIHMAFGVEKCKLLSINRGKIVSNTFTLDNNDVIEPLIENETYKYLGFQQAKQINQKTTKAELKRKFKFRLSLILKTELNSQNCIKAINSFAIPILTYSFGIIFWSKTDLINLQRIINTQMTKFRKHHPKTCIQRMTLPKLDGGRGLIDVKNLHNKQITTLRQYFYEKSQKSLLHKLATDLDHKLTPLNLNATQSQPNEQITTNCEKITQWSQKVLHGRHLADLSQNHVDKQESNAWLKRGELFPETEAFMMAIQDQVIATRNYRKHITKDLPPNCTDICRHCQRAPETIQHITGACSRLVQTDYKHRHDQIAGIIHQNIAFKFQLLPNKIAYYKYKPQTILENQQYKLYWDRTIITDRTVHCNRPDITLHNKIDKITYLIDIAVPNTHNLQATISEKLTKYQDLAIELRSQWRSERVHIIPIVLSSTGVIPKSLKQSLNALDIPSKTTTYLLQKAAILNTCRITRKFLSSSVTSTFTSS

SEQ ID NO: 3259 - protein, 1371 aa, Emmelina monodactyla
MQNSFQKNKKYNLRRRRLPQTASSIETELENIPENTSISHLSSPTSSTYSLFASPNSSTHSYNLRPQSRSSSMSYMSDGAVLEADAYNPTLTTGPTRARKRWSEDMNRFIWRTYLIATSLETRPRGYLDTLFKEFNNQFPNVNATKQRLGDQRRAIVNNKLLTDEILTEIRSEVTALLGTTENLSSISITCQNNTLQCTSHNLQTQSTECLPSRTRMNWTSEMNENVIRIYYTVTENETDKTNYRKKLHSKFTQLYPNLNHLSEQRVSDQLRAILNNNYISSQRLQEIKNEVFLILHNDQQNQVRDDLLSSLNTSNDFQLGLETQNIDLNVPSLPTTLDLVINEQEATETYYHSITEQTNIERIFNETLSIFNNTEPTSRPYIPKQKPSRRLANIVSYINKYILPKYLNTEQDFITLQTLIYTAAYTTAICNGTKINNNVDVSTIKPKKINKPRWQLRLERKVELLRSDIGRLTQFIRGNRSRKVLAAVNRIKLVYQTHAQHENPNSTMEHYLDTLKQKLSSTASRLKRYLACTNRKKQNALFSTNEKCFYRKLSSQSVNTNTASSELPSAAQFHEFWANIWQKPVLHNDNANWLRQINANCEAMAFNSITIDAFIKIIGRTHNWKAPGTDKIHNFWYKKFTTTHSYIHTHINNFIQSPHTMPDYITHGITYMIPKDTDTKNPAKYRPITCLQTIYKILTACISETIYEHLETHNLLAEQQKGSRKNSQGCKEQLTLDNIVMRNASKNKKNVYAMYIDYRKAFDSVPHSWLLYVLHVYKIHPSIVAFLEHTMKKWQTHLNINADGSTITTEPIAICRGIFQGDSLSPLWFCLALNPLSYLLDKSNNGVNLTNSNDQYKLTHLMYMDDIKLYASSKTELDYLAQITQDFSNDIHMAFGIDKCKILSVERGKIVHNSYLLDNNQTIEPLLENETYKYLGFQQARQIDQKTAKTEIIQKFKHRLTLILKTELNSRNCIKAINTFAIPILTYSFGIISWSKSDLVKFQRIINTLMTKFRKHHPKTCTQRMTLPKLDGGRGLIDVKNLHNKQITTLRQYFYTKSQNSQLHKLAIATDLKLTPLNLNNTNTQPNELIITNTEKITQWSQKVLHGRHLADLSHAYVDKQESNSWLKRGELFPETEAFMLAIQDQVICTKNYKKHITKELPPNSSDLCRHCNRAPETIQHITGACSRLVQTDYKHRHDQIANIIHQNIAHRLKLIPEKIAYYKYQPQTILENQQFKLYWDRTIITDRTVHCNRPDITLHNKTNKITYLIDIAIPNTHNLQTTISEKITKYQELAVEIKSQWRSETVHIVPIVLSTTGVIPKSMKQSLAVLDLPSKSTIYLMQKAAILNTCRITRKFLSSTSVLSTFTTS

SEQ ID NO: 3260 - protein, 1369 aa, Emmelina monodactyla
MQNSLQTNKRYNLRRRLPQTASIIETELENIPENTSISHSSSPISSTYSLFASPNSSTHSYNVRPESRSSSESYMSDGAVLEADAYNPKLTTGPTRARKRWSEDMNRFIWRTYLVATSLETRPRGYLDTLYKEFNSKFPNVNATKQRLGDQRRAIVNNKLLTDEILTEIRSEVTALLGTTENLLNFSITSQNNTLQSTSHNLQTQSAECLPSRTRMSWTPEINENVIRIYYTVTENETDKTNYRKKLHSKFTQLYPSLNHLSEQRVSDQLRAILNNNYITSQRLQEIKNEVSLILQNDNQNRVRDDLLSSLNTSNDFQLGLETQNIDLDVSSLSTSQDFVVNEQDATENFHSITEQTNIDRIFNETLTIFNNTDPTSRPYIPKQKPSRRLTNVVNNINKNILPKYLNTDQDFITLQTIIYTAAYTTAICNGTKINNNTDVTVRKPKQLNKPHWQLRLEKKVELLRSDIGRLTQFIRGNRSRKVLVAVNRIKLVYQTHAQHENPNSTMEHYLDTLKQKLSTTASRLKRYLACTNRKKQNALFNTNEKCFYRKISSQSVNTNTASLELPSAAQFHEFWANIWQKPVLHNDNANWLGQVSANCEAMTFNNITIDAFIKVISRTHNWKAPGTDKIHNFWYKKFTSAYPYIHTHINNFIQSPHTMPDYIAQGVTYMIPKDTDTKNPAKYRPITCLQTIYKILTACISETIYEHLETHNLLVEQQKGSRKKSQGCKEQLTLDNIVMRNALKNKKNVYAMYIDYKKAFDSVPHSWLLYILQVYKIHPSIVAFLEHTMKKWQTHLNINADGATITTEPIAICRGIFQGDSLSPLWFCLALNPLSYLLDNSNNGINLTHFNDQFKLTHLMYMDDIKLYASSKTELDDLARITQDFSNDIHMAFGIDKCKILSVERGKIVLNSYLLDNDQTIEPLLENETYKYLGFQQARQINQKTAKTEIIQKFKHRLTLILKTELNSRNCIKAINTFAIPILTYSFGIISWSKSDLVKFQRIINTLMTKFRKHHPKTCTQRMTLPKLHGGRGLIDVKNLHNKQITTLRQYFYTKSQTSQLHKLAIATDLKLTPLNLNNTSIQPNELIITNTEKITQWSQKALHGRHLADLSHAYVDKQESNAWLKRGELFPETEAFMLAIQDQVICTRNYKKHITKELPPNSSDICRHCNRAPETIQHITGACSRLVQTDYKHRHDQIANIIHQNIAHKLKLIPEKIAYYKYQPQTILENQQFKLYWDRTIITDRTVHCNRPDITLHNKTNKITYLIDIAVPNTHNLQTTISEKITKYQELAVELKRQWRSETVHIVPIVLSTTGVIPKSMKQSLAVLDLPSKSTINLMQKAAILNTCRITRKFLSSTSVLSTFITS

SEQ ID NO: 3261 - protein, 921 aa, Junonia oenone
MKLPHLPLCNGSKIITENISNNNGRLLKPRWQSRLENKIKHLRADIGHVTQFIRGNRNRKIAATVDRIKTTYQIHAQFENPNTELEHYLDTLKQKLSTLASRLKRYLACTKRKTQNSSFNNNEKSFYRSLSSNVFNTKSTPTDLPSASDFYQYWSRIWQNPVHHNDTASWITELNTQDYADMPFTHISLETFTQVISRTHNWKAPGTDKIHNYWYKKFTCTHPVIYNHLNNFIEQPNTIPDYITEGVTYMIPKDTDLKNPKNYRPITCLQTIYKILTACISDNIYTHLDRNKILAEQQKGCRKNSQGCKEQLTLDAIVMKEAVKNRNNIHMMYIDYRKAFDSVPHSWLLHVLRIYKVHPTLISFLENIMNHWQTKLNIKQDDRTITTELIKIQRGIFQGDALSPLWFCLALNPLSHLLDISQSGYKLRQDNEYFLLSHLMYMDDIKLYSNSKTELDKLAGITQNFSKDIQMDFGVDKCKILSINRGKIISNSYMLDNNNTIESLLENQTYKYLGFHQTRQIVQKTTKTDLTHKFKYRLSLILKTQLNSRNCIKAINSFAIPILTYSFGIISWSKSDLVKLQRTINTQMTKYRKHHPKTCTHFSTLRNYFHDKVRTSQLHKYIVSMDRKLTPLNLNDTQKQPNEHITTIEDKITQWSQKVLHGRHLTDLNQNYVDKMESNAWLKHGQLFPETEAFMMAIQDQVIATKNYKKHITKDLPPHQSDVCRLCNRQPETIQHITGACSRLAQNDYKHRHDQIANIIHQILAYKYKLIPQKTAYYKYQPQTVLENLQYKLYWDRTILTDRTVYCNRPDITLHNKIDKITYLIDIAIPNTHNIQSTIAEKLSKYQELAIELKTQWKSDRVHIIPIILSTTGVIPKSLKQSLDSLNIATNTTIHQLQKAVILNTCRITRKFLSSTSVVST

SEQ ID NO: 3262 - protein, 1375 aa, Hestina assimilis
MENNNNNNKTFKKYNLRRRLPKIASFTEANQKNIADKASELISHPSSPISSTHSFFQSPSSSSHTFNRKPQSRSPSITYESANVVQEADANNPVPTADTIRTRQKWSEQMNRFIWRTYLIASSLEKRPRGYLDILHKEFTQKFPHVKASRQRLGDQKRAIINNKLLPQTILDEIKSEVLILLQNTECQNNSTFTLTAPVPHLQIINTAQASSQNHTDTNKQTRPRMRWTSDINETLIRFYYEVTELETDKTNYRKKLHTKFVEYYPHLNHLSEQRISDQLRAILNNKYITDQKLQEIKNSVQIYISNTQIHHIHNIDQNSLAVNISEIALKATENNNTQDTQTSNTVTQNEERNDTNTGHTIDTANIDKVFIETLDAFKNSDPIARPHIPKQKSSHRLSFIVNYINEKIIPQHINPDLDFPTLQTIVYAAAYSTAICNGYKMKPLKDSINKIIRKPHWQIRLEKKIVLLRADIGRLTQFIRGNRKQKILDTVDRIKNKYEIHSKYENPNTEIEHYLDTLKQKLSTTASRLRRYLACTKRKKQNALFHNNEKAFYRNLSSETIISNSKNCSEFPSANDLHQFWSRIWQDPVHHNSNASWFKKVRTPCTNMLFTHISLDIFTQVISSLHNWKSPGSDKIHNFWYKKLTTLHPYIHNHINTFIQNPNTIPEYITQGITYMIPKDTDTKNPANYRPITCLQTIYKIITACISKILHQHVEIHNVLAEQQKGCRKNSKGCKEQLTLDAIAMRQSFKKKRNIHTMFIDYRKAFDSVPHSWLLHILHIYKIHPKIISFLEHTMNLWQTNLVIRQDTMSITTELIRIRRGIFQGDALSPLWFCLALNPLSDLLNISNSGYKLRHNREHFTLSHLMYMDDIKLYANSKTELHKLAGITQDFSKDIHMNFGVDKCKILSIDRGKIVNNTYTLDNNEIIEPLLENQTYKYLGFQQARQITQNTTKTDLIRKFKHRLTLILKTQLNSKNCIKAINTFAIPILTYSFGIITWSKSDLMKLQRIINTQMTTFRKHHPKTCTQRLTLPKSDGGRGLIDIYNLHNKQISTLRKYFYEKSQTSELHKYATEIDSKLTPLNLSDRQTQPNEHFISRQDKITQWRQKVLHGRHLADLSETHVDKEESNAWLKRGDLFPETEAFMLAIQDQIIPTRNYKKYISKELSSQQSDNCRHCNRASETIQHITGACSRLAQTDYKHRHDQICNIIHQNLAHKHKLIPKKIPYYKYQPQTVLENRQCKLYWDRTIITDRTVHCNRPDITLHNKVDKTTYLIDIAIPNTHNIQSTISEKLAKYQELAIELKTQWKTERVHIIPIILSTTGVIPKTLKQSLESLSMPIKTTIHQLQKAVLLNTCRITRKFLSSTSVASTFVTN

SEQ ID NO: 3263 - protein, 1368 aa, Junonia stemosa
MESRNTNKKYNLRRRLPRIASVIEGNPNTPSANLHSNTTNNISRPESHISSNYSLFETSSSSQSYDIRPQSRSSTVSSMSVNVVLEATANNPAPITVPTRARQRWSEEMNRFIWRTYLVATCLEKRQRGYLDTLHKEFILKFPNVNASRQRLGDQRRAIVNNKLLPQNVLDEIKSEVINLLRETENEPQSHPSITDITQMLLPLQNNTHNQSSRTRMSWTTEVNESIVKLYYEVTEIEKDKTNYRKKLHIKFIQYYPHLNHLNEQRISDQLRAIINNKYITDQRLQELKNAVIAQSRDTQTHLHNNNDCYTLIDNISEDTIRIEPENSTNIMNTQTSQSNTQNEQNYDTYTIPNLTFDHAKIDKVFTDSLAIFENTHPTARPHIPKQKTSRRLAYIVDYLNKHIIPNHINTNQDFLYLQTIIYTAAYTTAVCNGSKINLENISTTNKRSYKPRWQTRLENKIKNLRADIGQLTQFIKGNRSRKILATVDKIKTTYRIHAQYEHPNTEMEHYLDTLKQKLGTTASRLKRYLACTNRKSQNSLFNNNEKSFYRNLSSNAPNTNSITTDMPSASDFHQYWSRIWQDPVHHNYNASWINELDTQNYTDMPFSHIPLEIFTQVINRTHNWKAPGTDKIHNYWYKKFTSTHPFIYNHLNCFIQSPNVIPEYITEGVTYMIPKETDLKNPKNYRPITCLQTIYKILTACVSEIVYTHLDINKILAEQQKGCRKNSQGCKEQLTLDGIVMRQALKKRTNIHMMYIDYRKAFDSVPHSWLLHILHIYKIHPTLISFLENIMQHWHTNLNIKQDNKTITTEPIKIQRGIFQGDALSPLWFCLALNPLSRLLDISQSGYKINQDKEYFLLSHLMYMDDIKLYANSKAELDKLAGITQEFSKDIHMDFGVDKCKILSINRGKIVSNSYTLDNNNTIESLLENQTYKYLGFHQSRQIVQKTTKIDLISKFKYRLSLILKTQLNSRNCIKAINSFAIPILTYSFGIITWSKSDLIKLQRIINTQMTKYRKHHPKTCTQRLTLPKSEGGRGLIDIQNLHNTQITTLRKYFHDKARTSLLHKFIVGMDRKVTPLNLNDTQKQPNEHITTFKDKITQWSQKVLHGRHLTDLNQNYVDKTESNAWLKHGQLFPETEAFMMAIQDQVITTKNYKKHITKDLPPHQSDICRLCNRAPETIQHITGACSRLAQNDYKHRHDQISNIIHQTLAYKHKLIPQKIAYYKYQPQTILENSEYKLYWDRTIITDRTVHCNRPDITLHNKKDKITYLIDIAIPNTHNIQSTIAEKLSKYQELAIEVKTQWKSDRVHIIPIILSTTGVIPKSLKQSLDSLNIPINTTIHQLQKAVILNTCRITRKFLSSTSVVSIR

SEQ ID NO: 3264 - protein, 1368 aa, Junonia neildi
MESRNTNKKYNLRRRLPRIASVIEGNPNTPSANLHSNTTNNISRPESPISSNYSLFETSSSSHSYDIRPQSRSSTVSSMSVDVVLEATANNPAPITVPIRARQRWSEEMNRFIWRTYLIATSLEKRQRGYLDTLHKEFVLKFPNVNASRQRLGDQRRAIVNNKLLPQNVLDEIKSEVINLLRETENEPQSHPSITDLTQMSSPLQNNTHNQSSRTRMSWTTEVNESIVKLYYEVTEIEKDKTNYRKKLHIKFIQYYPHLNHLNEQRISDQLRAIINNKYITDQRLQELKNAVIAQSRDTQTHLHNNNDCYTLIDNISEDTIRIEPENSTNIMNTQTSQSNTQNEQNYDTYTIPNLTFDHAKIDKVFTDSLAIFENTHPTARPHIPKQKTSRRLAYIVDYLNKHIIPNHINTNQDFLYLQTIIYTAAYTTAVCNGSKINLQNISTTNKRSYKPRWQTRLENKIKNLRADIGQLTQFIKGNRSRKILATVDKIKTTYRIHAQYEHPNTEMEHYLDTLKQKLGTTASRLKRYLACTNRKSQNSLFNNNEKSFYRNLSSNAPNTNSITTDMPSASDFHQYWSRIWQDPVHHNYNASWINELDTQNYTDMPFSHIPLEIFTQVINRTHNWKAPGTDKIHNYWYKKFTSTHPFIYNHLNCFIQSPNVIPEYITEGVTYMIPKETDLKNPKNYRPITCLQTIYKILTACVSEIVYTHLDINEILAEQQKGCRKNSQGCKEQLTLDGIVMRQALKKRTNIHMMYIDYRKAFDSVPHSWLLHILHIYKIHPTLISFLENIMQHWHTNLNIKQDNKTITTEPIKIQRGIFQGDALSPLWFCLALNPLSRLLDISQSGYKINQDKEYFLLSHLMYMDDIKLYANSKAELDKLAGITQEFSKDIHMDFGVDKCKILSINRGKIVSNSYTLDNNNTIESLLENQTYKYLGFHQSRQIVQKTTKIDLISKFKYRLSLILKTQLNSRNCIKAINSFAIPILTYSFGIITWSKSDLIKLQRIINTQMTKYRKHHPKTCTQRLTLPKSEGGRGLIDIQNLHNTQITTLRKYFHDKARTSLLHKFIVGMDRKVTPLNLNDTQKQPNEHITTFKDKITQWSQKVLHGRHLTDLNQNYVDKTESNAWLKHGQLFPETEAFMMAIQDQVITTKNYKKHITKDLPPHQSDICRLCNRAPETIQHITGACSRLAQNDYKHRHDQISNIIHQTLAYKHKLIPQKIAYYKYQPQTILENSEYKLYWDRTIITDRTVHCNRPDITLHNKKDKITYLIDIAIPNTHNIQSTIAEKLSKYQELAIEVKTQWKSDRVHIIPIILSTTGVIPKSLKQSLDSLNIPINTTIHQLQKAVILNTCRITRKFLSSTSVVSIR

SEQ ID NO: 3265 - protein, 960 aa, Junonia grisea
MNTQTSQSNTQNEQNYDTYTIPNLTFDHAKIDKVFTNSLAIFENTHPTARPHIPKQKTSRRLAYIVDYLNKHIIPNHINTNQDFLSLQTIIYTAAYTTAVCNGSKINLENISTINKRSYKPRWQTRLENKIKNLRADIGQLTQFIKGNRSRKILATVDKIKTTYRIHAQYEHPNTEMEHYLDTLKQKLGTTASRLKRYLACTNRKSQNSLFNNNEKSFYRNLSSNAPNTNSITTDMPSASDFHQYWSRIWQDPVHHNYNASWINELDTQNYTDMPFSHIPLEIFTQVINRTHNWKAPGTDKIHNYWYKKFTSTHPFIYNHLNCFIQSPNAIPEYITEGVTYMIPKETDLKNPKNYRPITCLQTIYKILTACVSEIVYTHLDINKILAEQQKGCRKNSQGCKEQLTLDGIVMRQALKKRTNIHMMYIDYRKAFDSVPHSWLLHILHIYKIHPTLISFLENIMQHWHTNLNIKQDNKTITTEPIKIQRGIFQGDALSPLWFCLALNPLSRLLDISQSGYKLNQDKEYFLLSHLMYMDDIKLYANSKAELDKLAGITQEFSKDIHMDFGVDKCKILSINRGKIVSNSYTLDNNNTIESLLENQTYKYLGFHQSRQIVQKTTKIDLRSKFKNRLSLILKTQLNSRNCIKAINSFAIPILTYSFGIITWSKSDLIKLQRIINTQMTKYRKHHPKTCTQRLTLPKSEGGRGLIDIQNLHNTQITTLRKYFHDKARTSLLHKFIVGMDRKVTPLNLNDTQKQPNEHITTFKDKISQWSQKVLHGRHLTDLNQNYVDKTESNAWLKHGQLFPETEAFMMAIQDQVITTKNYKKHITKDLPPHQSDICRLCNRAPETIQHITGACSRLAQNDYKHRHDQISNIIHQTLAYKYKLIPQKIAYYKYQPQTILENSEYKLYWDRTIITDRTVHCNRPDITLHNKKDKVTYLIDIAIPNTHNIQSTIAEKLSK

SEQ ID NO: 3266 - protein, 1152 aa, Junonia evarete
MITPMQNNTHDQSFRTRMSWPTEVNESIVKLYYEVTEVEKDKTNYRKKLHTKFIQNYPHLNHLSEQRIADQLRAIINYKYITEQRLQELKNDVVAQTQLTLIDNNSIDTTIEIENVQHTQTPESNTENDQTCESSTIPNLTFDHAKIDKIFADSLAIYKNTDPTVRPHIPKQKTSRRLAYIVDYLNKHTIPSHININQDFLSLQTIIYTAAYTTAVCNGSKINSENILNTQKRILKPRWQIRLESKIKHLRADIGRLTQFIRGNRNSQILATVDRIKVTYKIHAQHENPNTEMEHYLDTLKQKLSTSASRLKRYLACTNRKTQNSLFNNNEKSFYRKLSSNSYTANSNPTEMPSASEFHQYWSRIWQNPVYHNDNASWISELETQNYTDMPFNHISLDTLTQVISRTHNWKAPGTDKIQNYWYKKFTSTHPLILNHLNNFIQSPNTLPNYITEGVTYMIPKNTDSKNPKNYRPITCLQTIYKILTACISDNIYTHLDINNIMAEQQKGCRKKSQGCKEQLTLDAVVMKQALKKRNNIHMMYIDYRKAFDSVPHSWLLHILRIYRVHPTLVSFLEHIMNHWQTNLNIKQDNATITTERIKIQRGIFQGDSLSPLWFCLALNPLSNLLNISKSGYKLRQNNECFSLSHLMYMDDIKLYANSKTELDKLAEITQKFSNDICMDFGVDKCKILSIVRGKIVNNSYTLDNNNIIESLLENQTYKYLGFHQTRQIIQKTTKIDLMRKFKYRLSLILKTQLNSRNCIKAINSFAIPILTYSFGIITWSKSDLIKLQRIINTHMTKYRKHHPKSCTQRLTLPKAEGGRGLIDIQNLHNTQISTLRKYFHDKARTSQLHKFTVSMDNKLTPLNLNDPQKQPNEHITTDKEKIMQWSRKVLHGRHLTDLNQNYVEKKESNAWLKQGQLFPETEAFIMAIQDQVIATKNYKKYITKDLPPHQSDICRLCNRAPETIQHITGACSRLAQNDYKHRHDQISNIIHQILAYKYKLIPQKTAYYKYQPQTVLENAQYKLYWDRTIITDRTVHCNRPDITLHNKIEKTTYLIDIAIPNTHNIQSTIAEKLSKYQDLAIELKTQWRSDRVHIIPIILSTTGVIPKSLKQSLDSLNIPINTTIHQLQKAVILNTCRITRKFLSSTSVVST

SEQ ID NO: 3267 - protein, 1373 aa, Junonia coenia
MELSNTKNKYNLRRRLPRIASSIEGYQNTLTANVHNTTDVISRPSSPLSPTHSLFESTTSSSHTYDIRPQSRSSTISSMSVDVVQEATANNPAPITVPKRARQRWSEEMNRFIWRTYLIATSLETRPRGYLDTLHKEFALKFPNVNTSRQRLGDQRRAIVNNKLLPLNVLEEIKSEVINSLQENENQRETQTHANTTDITQNTIPIQINTHNQASRTRMSWTSEINESIVKLYYEVTEIEKDKTNYRKKLHTKFIQNYPHLNHLSEQRISDQLRAIINNKYITDQRLEILKSNVTARSKATQIHSQNDNDCNTLNDNFSADTITETENSISLPHTQTSQHNTQNVQNYDNTIVLPITSDNFTFDNTKIDKVFTDALAIFKNTHPTARPHIPKQKTSRRLAYVVDYLNKHTIPNHINTNQDFLSLQTIIYTAAYTTAVCNGSKINSENISNSNKRLLKPRWQSRLENKIKQLRADIGHLTQFIRGNRNKKIVATVDRIKTTYEIHAQYENPNTELEHYLDTLKQKLSTLASRLKRYLACTNRKTQNSSFNNNEKSFYRNLSSNALNTKTTPIDLPSASDFHQYWSRIWQNPVHHNDNASWITELNTQDYADMPFTHISLETFTQVISRTHNWKAPGTDKIHNYWYKKFTCTHPFIHNHLNNFIQLPNTIPDYITEGVTYMIPKDTDLNNPKNYRPITCLQTIYKILTACVSDNIYTHLDRNKILAEQQKGCRKNSQGCKEQLTLDAIVMREALKKRNNIHMMYIDYRKAFDSVPHSWLLHVLRIYKVHPILISFLENIMNHWQTKLNIKQDDKTITTEQIKIQRGIFQGDALSPLWFCLALNPLSHLLDISQSGYKLRQDNEYFLLSHLMYMDDIKLYSNSKTELDKLAGITQNFSKDIHMDFGVDKCKILSINRGKIVSNSYVLDNNNTIESLLENQTYKYLGFHQSRQITQKTTKIDLTHKFKYRLSLILKTQLNSRNCIKAINSFAIPILTYSFGIITWSKSDLIKLQRTINTQMTKYRKHHPKTCTQRLTLPKSEGGRGLIDIQNLHNSQISTLRKYFHDKARTTQLHKYIVNMDRKLTPLNLNDTQKQPNEHITTIKDKITQWSQKVLHGRHLTDLNQNYVDKMESNAWLKHGQLFPETEAFMMAIQDQVIATKNYKKHITKDLPPHQSDICRLCNRQPETIQHITGACSRLAQNDYKHRHDQISNIIHQILAYKYKLIPQKIAYYKYQPQTVLENPQYKLYWDRTIITDRTVHCNRPDITLHNKTDKITYLIDIAIPNTHNIQSTIAEKLSKYQELAIELKTQWKSDRVHIIPIILSTTGVIPKSLKQSLDSLNIPTNTTIHLLQKAVILNTCRITRKFLSSTSVVST

SEQ ID NO: 3268 - protein, 1359 aa, Hypolimnas misippus
METKNINKKYNLRRRLPRIASSLEGNQNTLSANVHGTTVDVISSPSSPISSTHSLFESTSLSPHSYDIRPPPRTSISSMTVDVVQQAHANNPAPITVPTRARQRWSEEMNRFIWRTYLIATSLETRPRGYLDTLHKEFLLKFPNVNASRQRLGDQRRAIANNKLLPINVLDEIKTEVIKLLHENESEVQSHPNTTYISQTTTHNHTSRTRMSWTSEINESLVKLYYEVTEIERDKTNYRKKLHTKFIQYYPHLNHLSEQRISDQLRAIFNNKYITDQKLQEIKNAVTTHSQITQIQQLNDNCSNTLSNNISVNMITEAENSVNIPLTQISQNNIQTDQNDTTTLTNFNFDDTKIEKVFTDSLAIFKNTQPTARPHIPKQKTSRRLAYIVDYLNKHIIPNHTNTHQDFISLQTIIYTAAYTTAVCNGSKLNSEDNLHLNKKSFKPHWQTRLENKIKNLRADIGRLTQFIGGNRNRKILATVKRIKTTYQIHAQYENPNTELEHYLDTLKQKLSTTASRLRRYLACTNRKTQNSLFNNNEKSFYRNHLTDTFISNDNTSELPSASDFYQYWSRIWQDPVHHNENANWLTEFNAQNYGDMDFNHISQDTFTQVINKTHNWKAPGTDKIHNFWYKKFTSTHLYIYNYLNHFLQSPNTIPDYITQGITYMIPKDTDTKNPKNYRPITCLQTIYKILTACISEHIYVHLNKNNILAEQQKGCRKNSQGCKEQLTLDSIVMKQALKKRNNIHVMYIDYRKAFDSVPHSWLLHVLHIYKIHPTLVSFLEHTMHHWKTNLNIKQGNISITTEHIKIRRGIFQGDALSPLWFCLALNPLSHLLNIGKFGYKLSHDKEYFLLSHLMYMDDIKLYANSKTELDKLADITQDFSKDIYMDFGVDKCKILSVNKGKIVTNNYTLENNNIIESLLENQTYKYLGIHQTRQIIQKTTKADLIRKFKHRLSLILKTQLNSKNCIKAINSFAIPILKYSFGIISWSKSDLIKLQRIINTQMTKYRKHHPKTCTQRLTLPKSEGGRGLIDIQNLHNTQISTLRKYFHNKIHTSHLHKLAVALDNKLTPLNLNDIQKQPNEHITTTEHKLIQWSQKILHGRHLADLNQNYVDKNESNAWLKHGRLFPETEAFIMAIQDQVIATKNYKKHITKDLPPHQSDICRLCNKTPETIQHITGACSRLAQNDYKHRHDQISNIIHQTLAHKYKLISQKTAYYKYKPQTILENSQYKLYWDRTIITDRTVHCNRPDITLHNKTDKTTYLIDIAIPNTHNIQSTIAEKLSKYQELAIELKTQWRSDRVHIIPIILSTTGVIPKSLKQSLDSLNIPINTTIHLMQKAVILNTCRITRKFLSSTSVVST

SEQ ID NO: 3269 - protein, 864 aa, Hestina assimilis
MEHYLDTLKQNLSTAASRLKRYLVCTKRKKQNTLFQNNEKSFYRNLSAETTNAEIKHSQLPSARDLHQFWSQIWQHPVHHNNNASWLNKIKTPYSDMNFNHISMDTFTQVINTLHNWKAPGSDKIHNFWYKKLTTLHPYIHNHINNFIQTPNTIPQYIAQGITYMIPKDTDTKNPAKYRPITCLQTIYKILTACISRMIYQHLEAHTVMTEQQKGCKKNSQGCKEQLTLDAIAMKQSLKKKFNIHAMFIDYKKAYDSVPHSWLLHILHLYKIHPKLISFLEHTMSIWQTNLNIRLDSTTITTEPIRIRRGIFQGDALSPLWFCLALNPLSDLLNISNLGYKLRHNKDHFTLSHLMYMDDIKLYAGSKKELYKLAGITQEFSKDIHMNFGVEKCKILSIDRGKIVNNTYTLDNNETIEALTENETYKYLGFQQARQISQKSTKTELIRTFKYRLSLILNTHLNSRNCIKAINTFAIPVLTYSFGIITWFKIDLIKLQRIINTQMTKFRKHHPKTCTQRLTLSKSEGGRGLIDIQNLHNKQISTLRKYFYERSQNSELHKYAIAIDTKLTPLNLNDSQIQPNEHITSRQDKITQWRQKVLHGRHLADLSESHIDKEESNAWLKRGDLFPETEAFMLAIQDQIIPTKNYKKYITKEIPPHQSDNCRHCNRAPETIQHITGGCSRLAQTDYKHRHDQICSIIHQNLAHKYKLISKKIAYYKYQPQIILENRQYKLYWDRTIITDKTVHCNRPDITLHNKIDKITYIIEIAIPNTHNIQSTISEKLTKYQELAIELKTQWRSERVHIIPIILSATGVVPKTLKKSLDSLALPIKPTIYQLQKAVILNTCRITRKFLSSTSVSSTLTFNI

SEQ ID NO: 3270 - protein, 1295 aa, Junonia zonalis
MSVDVVQEATADNPAPITVPKRARQRWSEEMNRFIWRTYLIATSLETRPRGYLDTLHKEFVLKFPNVNTSRQRLGDQRRAIVNNKLLPLNVLEEIKSEVINSLQENENQRETQTHANITDIAQNTIPMQINTHNQASRTRMSWTSEINESIVKLYYEVTEIEKDKTNYRKKLHTKFIQNYPHLNHLSEQRISDQLRAIINNKYITDQRLEILKSNVTARSKATQIHSQNDNDCNTLNDNYSADTITETENSISLPQTQTSQHNTQNVQNYDNTIVLPITSDNFIFDNTKIDKVFTDALAIFKNTHPTARPHIPKQKTSRRLAYVVDYLNKHTIPNHINTNQDFLSLQTIIYTAAYTTAVCNGSKINSENISNSNKRLLKPRWQSRLENKIKQLRADIGHLTQFIRGNRNQKIVATVDRIKTTYQIHAQYEHPNTELEHYLDTLKQKLSTLASRLKRYLACTNRKTQNSSFNNNEKSFYRNLSSNALNTKSTPIGLPSASDFHQYWSRIWQNPVHHNDNASWITELNTQNYADMPFTHIPLETFTQVISRTHNWKAPGTDKIHNYWYKKFTCTHPFIHNHLNNFIQLPNTIPDYITEGVTYMIPKDTDLNNPKNYRPITCLQTIYKILTACVSDNIYIHLDRNKILAEQQKGCRKNSQGCKEQLTLDAIVMREALKKRNNIHMMYIDYRKAFDSVPHSWLLHVLRIYKVHPILISFLENIMNHWHTKLNIKQDDKTITTEQIKIQRGIFQGDALSPLWFCLALNPLSHLLDISQSGYKLRQDNEYFLLSHLMYMDDIKLYSNSKAELDKLAGITQNFSKDIHMDFGVDKCKILSINRGKIVSNSYVLDNNNTIESLLENQTYKYLGFHQSRQIIQKTTKINLTHKFKYRLSLILKTQLNSRNCIKAINSFAIPILTYSFGIITWSKSDLIKLQRTINTQMTKYRKHHPKTCTQRLTLPKSEGGRGLIDIQNLHNSQISTLRKYFHDKARTTQLHKYIVNMDRKLTPLNLNDTQKQPNEHITTIKDKITQWSQKVLHGRHLTDLNQNYVDKTESNAWLKHGQLFPETEAFMMAIQDQVIATKNYKKHITKDLPPHQSDICRLCNRQPETIQHITGACSRLAQNDYKHRHDQISNIIHQILAYKYKLIPQKIAYYKYQPQTVLENPQYKLYWDRTIITDRTVHCNRPDITLHNKKDKITYLIDIAIPNTHNIQSTIAEKLSKYQELAIELKTQWKSDRVHIIPIILSTTGVIPKSLKQSLDSLNIPTNTTIHLLQKAVILNTCRITRKFLSSTSVVST

SEQ ID NO: 3271 - protein, 1368 aa, Junonia litoralis
MESRNTNKKYNLRRRLPRIASVIEGNPNTPSANLHSNTTNNISRPESPISSNYSLFETSSSSHSYDIRPQSRSSTVSSMSVDVVLEATANNPAPITVPIRARQRWSEEMNRFIWRTYLIATSLEKRQRGYLDTLHKEFVLKFPNVNASRQRLGDQRRAIVNNKLLPQNVLEEIKSEVINLLRETENEPQSHPSITDITQMSSPLQNNTHNQSSRTRMSWTTEVNESIVKLYYEVTEIEKDKTNYRKKLHIKFIQYYPHLNHLNEQRISDQLRAIINNKYITDQRLQELKNAVIAQSRDTQTHLHNNNDCYTLIDNISEDTIRIEPENSTNTMNTQTSQSNTQNEQNYDTYTIPNLTFDHAKIDKVFTDSLAIFENTHPTARPHIPKQKTSRRLAYIVDYLNKHIIPNHINTNQDFLYLQTIIYTAAYTTAVCNGSKINLENISTTNKRSYKPRWQTRLENKIKNLRADIGQLTQFIKGNRSRKILATVDKIKTTYRIHAQYEHPNTEMEHYLDTLKQKLGTTASRLKRYLACTKRKSQNSLFNNNEKSFYRNLSSNAPNTNSITTDMPSASDFHQYWSRIWQDPVHHNYNASWINELDTQNYTDMPFSHIPLEIFTQVINRTHNWKAPGTDKIHNYWYKKFTSTHPFIYNHLNCFIQSPNVIPEYITEGVTYMIPKETDLKNPKNYRPITCLQTIYKILTACVSEIVYTHLDINKILAEQQKGCRKNSQGCKEQLTLDGIVMRQALKKRTNIHMMYIDYRKAFDSVPHSWLLHILHIYKIHPTLISFLENIMQHWHTNLNIKQDNKTITTEPIKIQRGIFQGDALSPLWFCLALNPLSRLLDISQSGYKINQDKEYFLLSHLMYMDDIKLYANSKAELDKLAGITQEFSKDIHMDFGVDKCKILSINRGKIVSNSYTLDNNNTIESLLENQTYKYLGFHQSRQIVQKTTKIDLISKFKYRLSLILKTQLNSRNCIKAINSFAIPILTYSFGIITWSKSDLIKLQRIINTQMTKYRKHHPKTCTQRLTLPKSEGGRGLIDIQNLHNTQITTLRKYFHDKARTSLLHKFIVGMDRKVTPLNLNDTQKQPNEHITTFKDKITQWSQKVLHGRHLTDLNQNYVDKTESNAWLKHGQLFPETEAFMMAIQDQVITTKNYKKHITKDLPPHQSDICRLCNRAPETIQHITGACSRLAQNDYKHRHDQISNIIHQTLAYKHKLIPQKIAYYKYQPQTILENSEYKLYWDRTIITDRTVHCNRPDITLHNKKDKITYLIDIAIPNTHNIQSTIAEKLSKYQELAIEVKTQWKSDRVHIIPIILSTTGVIPKSLKQSLDSLNIPINTTIHQLQKAVILNTCRITRKFLSSTSVVSIR

SEQ ID NO: 3272 - protein, 860 aa, Junonia genoveva
MEHYLDTLKQKLSTSASRLKRYLACTNRKTQNSLFNNNEKSFYRKLSSNSYTANSNPTEMPSASEFHQYWSRIWQNPVYHNDNASWISELETQNYTDMPFNHISLDTLTQVISRTHNWKAPGTDKIQNYWYKKFTSTHPLILNHLNNFIQSPNTLPNYITEGVTYMIPKNTDSKNPKNYRPITCLQTIYKILTACISDNIYTHLDINNIMAEQQKGCRKKSQGCKEQLTLDAVVMKQALKKRNNIHMMYIDYRKAFDSVPHSWLLHILRIYRVHPTLVSFLEHIMNHWQTNLNIKQDNATITTERIKIQRGIFQGDSLSPLWFCLALNPLSNLLNISKSGYKLRQNNECFSLSHLMYMDDIKLYANSKTELDKLAEITQKFSNDICMDFGVDKCKILSIVRGKIVNNSYTLDNNNIIESLLENQTYKYLGFHQTRQIIQKTTKIDLMRKFKYRLSLILKTQLNSRNCIKAINSFAIPILTYSFGIITWSKSDLIKLQRIINTHMTKYRKHHPKSCTQRLTLPKAEGGRDLIDIQNLHNTQISTFRKYFHDKARTSQLHKFTVSMDNKLTPLNLNDPQKQPNEHITTDKEKIMQWSRKVLHGRHLTDLNQNYVEKKESNAWLKQGQLFPETEAFIMAIQDQVIATKNYKKYITKDLPPHQSDICRLCNRAPETIQHITGACSRLAQNDYKHRHDQISNIIHQILAYKYKLIPQKTAYYKYQPQTVLENAQYKLYWDRTIITDRTVHCNRPDITLHNKIEKTTYLIDIAIPNTHNIQSTIAEKLSKYQDLAIELKTQWRSDRVHIIPIILSTTGVIPKSLKQSLDSLNIPINTTIHQLQKAVILNTCRITRKFLSSTSVVST

SEQ ID NO: 3273 - protein, 1169 aa, Junonia genoveva
MLSPLQNNTHNQSSRTRMSWTTEVNESIVKLYYEVTEIEKDKTNYRKKLHIKFIQYYPHLNHLNEQRISDQLRAIINNKYITDQRLQELKNAVIAQSRDTQTHLHNNNDCYTLIDNISEDTIRIEPENSTNTMNTQTSQSNTQNEQNYDTYTIPNLTFDHAKIDKVFTDSLAIFENTHPTARPHIPKQKTSRRLAYIVDYLNKHIIPNHINTNQDFLYLQTIIYTAAYTTAVCNGSKINLENISTTNKRSYKPRWQTRLENKIKNLRADIGQLTQFIKGNRSRKILATVDKIKTTYRIHAQYEHPNTEMEHYLDTLKQKLGTTASRLKRYLACTKRKSQNSLFNNNEKSFYRNLSSNAPNTNSITTDMPSASDFHQYWSRIWQDPVHHNYNASWINELDTQNYTDMPFSHIPLEIFTQVINRTHNWKAPGTDKIHNYWYKKFTSTHPFIYNHLNCFIQSPNVIPEYITEGVTYMIPKETDLKNPKNYRPITCLQTIYKILTACVSEIVYTHLDINKILAEQQKGCRKNSQGCKEQLTLDGIVMRQALKKRTNIHMMYIDYRKAFDSVPHSWLLHILHIYKIHPTLISFLENIMQHWHTNLNIKQDNKTITTEPIKIQRGIFQGDALSPLWFCLALNPLSRLLDISQSGYKINQDKEYFLLSHLMYMDDIKLYANSKAELDKLAGITQEFSKDIHMDFGVDKCKILSINRGKIVSNSYTLDNNNTIESLLENQTYKYLGFHQSRQIVQKTTKIDLISKFKYRLSLILKTQLNSRNCIKAINSFAIPILTYSFGIITWSKSDLIKLQRIINTQMTKYRKHHPKTCTQRLTLPKSEGGRGLIDIQNLHNTQITTLRKYFHDKARTSLLHKFIVGMDRKVTPLNLNDTQKQPNEHITTFKDKITQWSQKVLHGRHLTDLNQNYVDKTESNAWLKHGQLFPETEAFMMAIQDQVITTKNYKKHITKDLPPHQSDICRLCNRAPETIQHITGACSRLAQNDYKHRHDQISNIIHQTLAYKHKLIPQKIAYYKYQPQTILENSEYKLYWDRTIITDRTVHCNRPDITLHNKKDKITYLIDIAIPNTHNIQSTIAEKLSKYQELAIEVKTQWKSDRVHIIPIILSTTGVIPKSLKQSLDSLNIPINTTIHQLQKAVILNTCRITRKFLSSTSVVSIR

SEQ ID NO: 3274 - protein, 1373 aa, Junonia stemosa
MELSNTKNKYNLRRRLPRIASSIEGYQNTLTANVHNTTDVISRPSSPLSPTHSLFESTTSSSHTYDIRPQSRSSTISSMSVDVVQEATANNPAPITVPKRARQRWSEEMNRFIWRTYLIATSLETRPRGYLDTLHKEFALKFPNVNTSRQRLGDQRRAIVNNKLLPLNVLEEIKSEVINSLQENENQRETQTHANTTDITQNTIPIQINTHNQASRTRMSWTSEINESIVKLYYEVTEIEKDKTNYRKKLHTKFIQNYPHLNHLSEQRISDQLRAIINNKYITEQRLEILKSNVTARSKATQIHSQNDNDCNTLNDNFSADTITETENSISLPHTQTSQHNTQNVQNYDNTIVLPITSDNFTFDNTKIDKVFTDALAIFKNTHPTARPHIPKQKTSRRLAYVVDYLNKHTIPNHINTNQDFLSLQTIIYTAAYTTAVCNGSKINSENISNSNKRLLKPRWQSRLENKIKQLRADIGHLTQFIRGNRNKKIVATVDRIKTTYEIHAQYENPNTELEHYLDTLKQKLSTLASRLKRYLACTNRKTQNSSFNNNEKSFYRNLSSNALNTKTTPIDLPSASDFHQYWSRIWQNPVHHNDNASWITELNTQDYADMPFTHISLETFTQVISRTHNWKAPGTDKIHNYWYKKFTCTHPFIHNHLNNFIQLPNTIPDYITEGVTYMIPKDTDLNNPKNYRPITCLQTIYKILTACVSDNIYTHLDRNKILAEQQKGCRKNSQGCKEQLTLDAIVMREALKKRNNIHMMYIDYRKAFDSVPHSWLLHVLRIYKVHPILISFLENIMNHWQTKLNIKQDDKTITTEQIKIQRGIFQGDALSPLWFCLALNPLSHLLDISQSGYKLRQDNEYFLLSHLMYMDDIKLYSNSKTELDKLAGITQNFSKDIHMDFGVDKCKILSINRGKIVSNSYVLDNNNTIESLLENQTYKYLGFHQSRQITQKTTKIDLTHKFKYRLSLILKTQLNSRNCIKAINSFAIPILTYSFGIITWSKSDLIKLQRTINTQMTKYRKHHPKTCTQRLTLPKSEGGRGLIDIQNLHNSQISTLRKYFHDKARTTQLHKYIVNMDRKLTPLNLNDTQKQPNEHITTIKDKITQWSQKVLHGRHLTDLNQNYVDKMESNAWLKHGQLFPETEAFMMAIQDQVIATKNYKKHITKDLPPHQSDICRLCNRQPETIQHITGACSRLAQNDYKHRHDQISNIIHQILAYKYKLIPQKIAYYKYQPQTVLENPQYKLYWDRTIITDRTVHCNRPDITLHNKTDKITYLIDIAIPNTHNIQSTIAEKLSKYQELAIELKTQWKSDRVHIIPIILSTTGVIPKSLKQSLDSLNIPTNTTIHLLQKAVILNTCRITRKFLSSTSVVST

SEQ ID NO: 3275 - protein, 1373 aa, Junonia neildi
MELSNTKNKYNLRRRLPRIASSIEGYQNTLTANVHNTTDVISRPSSPLSPTHSLFESTTSSSHTYDIRPQSRSSTISSMSVDVVQEATANNPAPITVPKRARQRWSEEMNRFIWRTYLIATSLETRPRGYLDTLHKEFALKFPNVNTSRQRLGDQRRAIVNNKLLPLNVLEEIKSEVINSLQENENQRETQTHANTTDITQNTIPIQINTHNQASRTRMSWTSEMNESIVKLYYEVTEIEKDKTNYRKKLHTKFIQNYPHLNHLSEQRISDQLRAIINNKYITDQRLEILKSNVTARSKATQIHSQNDNDCNTLNDNFSADTITETENSISLPHTQTSQHNTQNVQNYDNTIVLPITSDNFTFDNTKIDKVFTDALAIFKNTHPTARPHIPKQKTSRRLAYVVDYLNKHTIPNHINTNQDFLSLQTIIYTAAYTTAVCNGSKINSENISNSNKRLLKPRWQSRLENKIKQLRADIGHLTQFIRGNRNKKIVATVDRIKTAYEIHAQYENPNTELEHYLDTLKQKLSTLASRLKRYLACTNRKTQNSSFNNNEKSFYRNLSSNALNTKTTPIDLPSASDFHQYWSRIWQNPVHHNDNASWITELNTQDYADMPFTHISLETFTQVISRTHNWKAPGTDKIHNYWYKKFTCTHPFIHNHLNNFIQLPNTIPDYITEGVTYMIPKDTDLNNPKNYRPITCLQTIYKILTACVSDNIYTHLDRNKILAEQQKGCRKNSQGCKEQLTLDAIVMREALKKRNNIHMMYIDYRKAFDSVPHSWLLHVLRIYKVHPILISFLENIMNHWQTKLNIKQDDKTITTEQIKIQRGIFQGDALSPLWFCLALNPLSHLLDISQSGYKLRQDNEYFLLSHLMYMDDIKLYSNSKTELDKLAGITQNFSKDIHMDFGVDKCKILSINRGKIVSNSYVLDNNNTIESLLENQTYKYLGFHQSRQITQKTTKIDLTHKFKYRLSLILKTQLNSRNCIKAINSFAIPILTYSFGIITWSKSDLIKLQRTINTQMTKYRKHHPKTCTQRLTLPKSEGGRGLIDIQNLHNSQISTLRKYFHDKARTTQLHKYIVNMDRKLTPLNLNDTQKQPNEHITTIKDKITQWSQKVLHGRHLTDLNQNYVDKMESNAWLKHGQLFPETEAFMMAIQDQVIATKNYKKHITKDLPPHQSDICRLCNRQPETIQHITGACSRLAQNDYKHRHDQISNIIHQILAYKYKLIPQKIAYYKYQPQTVLENPQYKLYWDRTIITDRTVHCNRPDITLHNKTDKITYLIDIAIPNTHNIQSTIAEKLSKYQELAIELKTQWKSDRVHIIPIILSTTGVIPKSLKQSLDSLNIPTNTTIHLLQKAVILNTCRITRKFLSSTSVVST

SEQ ID NO: 3276 - protein, 1246 aa, Junonia evarete
MELSNTKNKYNLRRRLPRIASSIEGYQNTLTANVHDNTTDVISRPSSPLSPTHSLFESTTSSSHTYDIRPQSRSSTISSMSVDVVQEATADNPAPITVPKRARQRWSEEMNRFIWRTYLIATSLETRPRGYLDTLHKEFVLKFPNVNTSRQRLGDQRRAIVNNKLLPLNVLEEIKSEVINSLQENENQREAQTHANITDITQNTIPMQINTHNQASRKRMSWTSEINESIVKLYYEVTEIEKDKTNYRKKLHTKFIQNYPHLNHLSEQRISDQLRAIINNKYITDQRLEILKSNVTARSKATQIHSQNDNDCNTLNDNYSADTITETENSISLPQTQTSQHNTQNVQNYDNTIVLPITSDNFTFDNTKIDKVFTDALAIFKNTHPTARPHIPKQKTSRRLAYVVDYLKHTIPNHINTNQDFLSLQTIIYTAAYTTAVCNGSEINSENISNSNKRLLKPRWQSRLENKIKQLRADIGHLTQFIRGNRNKKIVATVDRIKTTYEIHAQYENPNTELEHYLDTLKQKLSTLASRLKRYLACTNRKTQNSSFNNNEKSFYRNLSSNALNTKTTPIDLPSASDFHQYWSRIWQNPVHHNDNASWITELNTQDYADMPFTHISLETFTQVISRTHNWKAPGTDKIHNYWYKKFTCTHPFIHNHLNNFIQLPNTIPDYITEGVTYMIPKDTDLNNPKNYRPITCLQTIYKILTACVSDNIYTHLDRNKILAEQQKGCRKNSQGCKEQLTLDAIVMREALKKRNNIHMMYIDYRKAFDSVPHSWLLHVLRIYKVHPILISFLENIMNHWQTKLNIKQDDKTITTEQIKIQRGIFQGDALSPLWFCLALNPLSHLLDISQSGYKLRQDNEYFLLSHLMYMDDIKLYSNSKTELDKLAGITQNFSKDIHMDFGVDKCKILSINRGKIVSNSYVLDNNNTIESLLENQTYKYLGFHQSRQIIQKTTKINLTHKFKYRLSLILKTQLNSRNCIKAINSFAIPILTYSFGIITWSKSDLIKLQRTINTQMTKYRKHHPKTCTQRLTLPKSEGGRGLIDIQNLHNSQISTLRKYFHDKARTTQLHKYIVNMDRKLTPLNLNDTQKQPNEHITTIKDKITQWSQKVLHGRHLTDLNQNYVDKTESNAWLKHGQLFPETEAFMMAIQDQVIATKNYKKHITKDLPPHQSDICRLCNRQPETIQHITGACSRLAQNDYKHRHDQISNIIHQILAYKYKLIPQKIAYYKYQRLYRDRLESHLSI

SEQ ID NO: 3277 - protein, 1351 aa, Junonia litoralis
MELRNTNKKYNLRRRLPRIASPIEGNQNTLSAHIYRNTTENMLRPSSPLSSTHSILESSSSSLSYDIRPQSRSSTSSSMSADVVLEATANNPAPITGPTRARQRWSEEMNRFIWRTYLIATSLETRQRGYLDTLHKEFVTKFPNVNASRQRLGDQRRAIVNNKLLPQNVLDEIKSEVINLLHEIENETQSHPNSTDITLMITPVHNNTHDQSFRTRMSWPTEVNESIVKLYYEVTEVEKDKTNYRKKLHTKFIQNYPHLNHLSEQRIADQLRAIINNKYITEQRLQELKNDVVAQTQLTLIDNNSIDTTIEIENVQHTQTPESNTENDQTCESSTIPNLTFDHAKIDKIFADSLAIYKNTDPTVRPHIPKQKTSRRLAYIVDYLNKHTIPSHININQDFLSLQTIIYTAAYTTAVCNGSKINSENILNTQKRILKPRWQIRLESKIKHLRADIGRLTQFIRGNRNSQILATVDRIKVTYKIHAQHENPNTEMEHYLDTLKQKLSTSASRLKRYLACTNRKTQNSLFNNNEKSFYRKLSSNSYTANSNPTEMPSASEFHQYWSRIWQNPVYHNDNASWISELETQNYTDMPFNHISLDTLTQVISRTHNWKAPGTDKIQNYWYKKFTSTHPLILNHLNNFIQSPNTLPNYITEGVTYMIPKNTDSKNPKNYRPITCLQTIYKILTACISDTIYTHLDINNIMAEQQKGCRKKSQGCKEQLTLDAVVMKQALKKRNNIHMMYIDYRKAFDSVPHSWLLHILRIYRVHPTLVSFLEHIMNHWQTNLNIKQDNATITTERIKIQRGIFQGDSLSPLWFCLALNPLSNLLNISKSGYKLRQNNECFSLSHLMYMDDIKLYANSKTELDKLAEITQKFSNDICMDFGVDKCKIISIVRGKIVNNSYTLDNNNIIESLLENQTYKYLGFHQTRQIIQKTTKIDLMRKFKYRLSLILKTQLNSRNCIKAINSFAIPILTYSFGIITWSKSDLIKLQRIINTHMTKYRKHHPKSCTQRLTLPKAEGGRGLIDIQNLHNTQISTLRKYFHDKARTSQLHKFTVSMDNKLTPLNLNDPQKQPNEHITTDKEKIMQWSRKVLHGRHLTDLNQNYVEKKESNAWLKQGQLFPETEAFMMAIQDQVIATKNYKKYITKDLPPHQSDICRLCNRASETIQHITGACSRLAQNDYKHRHDQISNIIHQILAYKYKLIPQKTAYYKYQPQTVLENAQYKLYWDRTIITDRTVHCNRPDITLHNKIEKTTYLIDIAIPNTHNIQSTIAEKLSKYQDLAIELKTQWRSDRVHIIPIILSTTGVIPKSLKQSLDSLNIPINTTIHQLQKAVILNTCRITRKFLSSTSVVST

SEQ ID NO: 3278 - protein, 1373 aa, Junonia grisea; identical to SEQ ID NO: 3267

SEQ ID NO: 3279 - protein, 1351 aa, Junonia coenia
MELRNTNKKYNLRRRLPRIASPIEGNQNTLSAHIYSNTTENMLRPSSPLSSTHSILESRSSSLSYDIRPQSRSSTSSSMSADVVLEATANNPAPITGPTRARQRWSEEMNRFIWRTYLIATSLETRQRGYLDTLHKEFVTKFPNVNASRQRLGDQRRAIVNNKLLPQNVLDEIKSEVINLLHEIENETQSHPNSTDITLMITPMQNNTHDQSFRTRMSWPTEVNESIVKLYYEVTELEKDKTNYRKKLHTKFIQNYPHLNHLSEQRIADQLRAIINNKYITEQRLQELKNDVVAQSQLTLIDNNSIDTTIEVENVQNTLTPESNTQNDQNCESSTIPNLTFDHAKIDKIFADSLAIYKNTDPTVRPHIPKQKTSRRLAYIVDYLNKYTIPSHININQDFLSLQTIIYTAAYTTAVCNGSKINSENILNTQKRILKPRWQIRLESKIKHLRADIGRLTQFIRGNRNSQILATVDRIKVTYKIHAQHENPNTEMEHYLDTLKQKLSTSASRLKRYLACTNRKTQNSLFNNNEKSFYRKLSSNSYTANSNPTEMPSSSEFHQYWSRIWQNPVYHNDNASWISELETQNYTDMPFNHISLDTLTQVISRTHNWKAPGTDKIQNYWYKKFTSTHPLILNHLNNFIQSPNTLPNYITEGVTYMIPKNTDSKNPKNYRPITCLQTIYKILTACISDNIYTHLDINNIMAEQQKGCRKKSQGCKEQLTLDAVVMKQALKKRNNIHMMYIDYRKAFDSVPHSWLLHILRIYRVHPTLVSFLEHIMNHWQTNLNIKQDNATITTERIKIQRGIFQGDSLSPLWFCLALNPLSNLLNISKSGYKLRQNNECFSLSHLMYMDDIKLYANSKTELDKLAEITQKFSIDICMDFGVDKCKILSIVRGKIVNNSYTLDNNNIIESLLENQTYKYLGFHQTRQIIQKTTKIDLIRKFKYRLSLILKTQLNSRNCIKAINSFAIPILTYSFGIITWSKSDLIKLQRIINTHMTKYRKHHPKSCTQRLTLPKAEGGRGLIDIQNLHNTQISTLRKYFHDKARTSQLHKFTVSMDNKLTPLNLNDPQKQPNEHITTDKEKIMQWSRKVLHGRHLTDLNQNYVEKKESNAWLKQGQLFPETEAFIMAIQDQVIATKNYKKYITKDLPPHQSDICRLCNRAPETIQHITGACSRLAQNDYKHRHDQISNIIHQILAYKYKLIPQKTAYYKYQPQTVLENAQYKLYWDRTIITDRTVHCNRPDITLHNKIEKTTYLIDIAIPNTHNIQSTIAEKLSKYQDLAIELKTQWRSDRVHIIPIILSTTGVIPKSLKQSLDSLNIPINTTIHQLQKAVILNTCRITRKFLSSTSVVST

SEQ ID NO: 3280 - protein, 1155 aa, Junonia litoralis
MSWTSEMNESIVKLYYEVTEIEKDKTNYRKKLHTKFIQNYPHLNHLSEQRISDQLRAIINNKYITDQRLEILKSNVTARSKATQIHSQNDNDCNTLNDNFSADTITETENSISLPHTQTSQHNTQNVQNYDNTIVLPITSDNFTFDNTKIDKVFTDALAIFKNTHPTARPHIPKQKTSRRLAYVVDYLNKHTIPNHINTNQDFLSLQTIIYTAAYTTAVCNGSKINSENISNSNKRLLKPRWQSRLENKIKQLRADIGHLTQFIRGNRNKKIVATVDRIKTAYEIHAQYENPNTELEHYLDTLKQKLSTLASRLKRYLACTNRKTQNSSFNNNEKSFYRNLSSNALNTKTTPIDLPSASDFHQYWSRIWQNPVHHNDNASWITELNTQDYADMPFTHISLETFTQVISRTHNWKAPGTDKIHNYWYKKFTCTHPFIHNHLNNFIQLPNTIPDYITEGVTYMIPKDTDLNNPKNYRPITCLQTIYKILTACVSDNIYTHLDRNKILAEQQKGCRKNSQGCKEQLTLDAIVMREALKKRNNIHMMYIDYRKAFDSVPHSWLLHVLRIYKVHPILISFLENIMNHWQTKLNIKQDDKTITTEQIKIQRGIFQGDALSPLWFCLALNPLSHLLDISQSGYKLRQDNEYFLLSHLMYMDDIKLYSNSKTELDKLAGITQNFSKDIHMDFGVDKCKILSINRGKIVSNSYVLDNNNTIESLLENQTYKYLGFHQSRQITQKTTKIDLTHKFKYRLSLILKTQLNSRNCIKAINSFAIPILTYSFGIITWSKSDLIKLQRTINTQMTKYRKHHPKTCTQRLTLPKSEGGRGLIDIQNLHNSQISTLRKYFHDKARTTQLHKYIVNMDRKLTPLNLNDTQKQPNEHITTIKDKITQWSQKVLHGRHLTDLNQNYVDKMESNAWLKHGQLFPETEAFMMAIQDQVIATKNYKKHITKDLPPHQSDICRLCNRQPETIQHITGACSRLAQNDYKHRHDQISNIIHQILAYKYKLIPQKIAYYKYQPQTVLENPQYKLYWDRTIITDRTVHCNRPDITLHNKTDKITYLIDIAIPNTHNIQSTIAEKLSKYQELAIELKTQWKSDRVHIIPIILSTTGVIPKSLKQSLDSLNIPTNTTIHLLQKAVILNTCRITRKFLSSTSVVST

SEQ ID NO: 3281 - protein, 1374 aa, Junonia evarete
MELSNTKNKYNLRRRLPRIASSIEGYQNTLTANVHDNTTDVISRPSSPLSPTHSLFESTTSSSHTYDIRPQSRSSTISSMSVDVVQEATADNPAPITVPKRARQRWSEEMNRFIWRTYLIATSLETRPRGYLDTLHKEFVLKFPNVNTSRQRLGDQRRAIVNNKLLPLNVLEEIKSEVINSLQENENQRETQTHANITDITQNTIPMQINTHNQASRTRMSWTSEINESIVKLYYEVTEIEKDKTNYRKKLHTKFIQNYPHLNHLSEQRISDQLRAIINNKYITDQRLEILKSNVTARSKATQIHSQNDNDCNTLNDNYSADTITETENSISLPQTQTSQHNTQNVQNYDNTIVLPITSDNFTFDNTKIDKVFTDALAIFKNTHPTARPHIPKQKTSRRLAYVVDYLNKHTIPNHINTNQDFLSLQTIIYTAAYTTAVCNGSKINSENISNSNKRLLKPRWQSRLENKIKQLRADIGHLTQFIRGNRNQKIVATVDRIKTTYQIHAQYEHPNTELEHYLDTLKQKLSTLASRLKRYLACTNRKTQNSSFNNNEKSFYRNLSSNALNTKSTPIDLPSASDFHQYWSRIWQNPVHHNDNASWITELNTQDYADMPFTHIPLETFTQVISRTHNWKAPGTDKIHNYWYKKFTCTHPFIHNHLNNFIQLPNTIPDYITEGVTYMIPKDTDLNNPKNYRPITCLQTIYKILTACVSDNIYTHLDRNKILAEQQKGCRKNSQGCKEQLTLDAIVMREALKKRNNIHMMYIDYRKAFDSVPHSWLLHVLRIYKVHPILISFLENIMNHWQTKLNIKQDDKTITTEQIKIQRGIFQGDALSPLWFCLALNPLSHLLDISQSGYKLRQDNEYFLLSHLMYMDDIKLYSNSKAELDKLAGITQNFSKDIHMDFGVDKCKILSINRGKIVSNSYVLDNNNTIESLLENQTYKYLGFHQSRQIIQKTTKINLTHKFKYRLSLILKTQLNSRNCIKAINSFAIPILTYSFGIITWSKSDLIKLQRTINTQMTKYRKHHPKTCTQRLTLPKSEGGRGLIDIQNLHNSQISTLRKYFHDKARTTQLHKYIVNMDRKLTPLNLNDTQKQPNEHITTIKDKITQWSQKVLHGRHLTDLNQNYVDKTESNAWLKHGQLFPETEAFMMAIQDQVIATKNYKKHITKDLPPHQSDICRLCNRQPETIQHITGACSRLAQNDYKHRHDQISNIIHQILAYKYKLIPQKIAYYKYQPQTVLENPQYKLYWDRTIITDRTVHCNRPDITLHNKKDKITYLIDIAIPNTHNIQSTIAEKLSKYQELAIELKTQWKSDRVHIIPIIVSTTGVIPKSLKQSLDSLNIPTNTTIHLLQKAVILNTCRITRKFLSSTSVVST

SEQ ID NO: 3282 - protein, 1158 aa, Macropis europaea
MDKDMPRTRAERVPAPPGTGRGTLKDDTGNPMVHEISIPFSRNLCSLCIGSGKGNYLALTIKDEERHFKDTHPDTEVAYKCSICFKIFKTYRSATCHMPRCPGARPPDETPHPFECELCKQKYATQRGLSQHERLAHPEKRNSVRAAQSSSHPKIPRSGPVFSAEEIEKMLALEVQLQGERCIAKLMSEHFPGKDIKQLRDKRCEPSYKRWLEERLRSSSASDASHSERSVAEQGPPPDKSSSASESEEDIFEDAPLAETVELDTSIDWRTKLVERALALRVQNQERPESKAIADRLWDMLGSKVDGQTVSSDEVEEAYKLASDFFSSKGEKQPRKKRGSRKVRTRMLSGRAKMKASRYARAQEMFRDAPARLAKHVRQGTDYMTEEDQAPPLDDVKKLYSGLWGQPGQIRLAQSQEKPAQKDANEVLTPITVSEIQKRIRRTRQKVAAGPDGMTKNDVIRRGYADVLLPLFNIILLATKQPGCWRMNRTNLLLKEGKDGSSASNYRPITIAPLLSRLYWGIVDQKLRCHISLSHRQKGFVPEMGCYQNVHLLNEIIRMSKNDGGLVAVQIDVTKAFDTVPHEAIQEALFAKGMPTEVVQVVMDSYKGVTTDIKVGDSSYRTDIRRGVKQGDPMSPLIFNLVMESVLLQLQDMPGFKLSDGQNISVLAFADDMILLAQDRENAKALAETLEAHLSNLGMAIATNKCASFEIKTTKDSWYVVDPDITINRERVTYLGPNKSITYLGMSITPWDGVSSKDAEKGIEQSLSCIKKLPLKPPQKVTLLSSFVLPHYLYNINTGEMSITKIRDLDRKIRVAVKEILHLPQSISNGLVYASKRDGGLGFPKLETISISAGLKAGIKLRSSTDPAIKVVLSTGSGLEKRLSKLARQARLVWPQVDIKDVDRYKERAKRDEVDRWASLQTQGKGVQAFKDDKSGNEWLYKPYLLKASRFITALKMRANVAEDKVSMNRARRDNRVMCRHCKVQPETLGHIIGQCTYTKALRIKRHDEIVKIIQSEANIGIETAATREPMLHCPEVGNLKPDLIIHGQGRVFVVDATVCHEDGDLLAKGRKAKLEKYTPLLPTLEKSLGVNEYQVLPIVVGARGAMPKETLKALQLLGIKSKATYRTISLTALRGTLELYGVFMDYNTRIRLQEGGQ

SEQ ID NO: 3283 - protein, 1122 aa, Macropis europaea
MPFSKNLCSLCIGTGKGNYLALTIKDEERHFSDTHPDIEVAYKCSVCFKIFKTYRSVTCHMPKCPRERPLDEKSHPFECESCEQKYATQRGLSQHERLAHPDKRNSVRAAQSSSHPKIPRSGPIFSAEEIEKVLALEIQLQGECSIAKLMSEHFPGKDIKQLRDKRCEPSYKRWLEERLRCSSANDTSHSERSVAEQGPPLDKSSTASDSEEDIFEDAPLAETVELDTSIDWRTKLVERALALRVQNQERPESKAIADRLWDMLGSKVDGQTVSSDEVEEAYKLASDFFSSKGEKQQSKNRGSRKVRTRMLSGRAKKKASRNARAQEMFLDASARLAKHVRQGTDFMTEEDQAPPLDDVKKLYSGLWGQPGQIHITESQEKPTPKDANEVLTPITVSEIQKRSRRTRQKVAAGPDGMTKNDITKRGYADVLLPLFNIILLATKQPGCWRMNRTNLLLKEGKDGSSASNYRPISIAPLLSRQYWGVVDQKLRCHISLSHRQKGFVPEMGCYQNIHLLNEIIRMAKNDGGLVAVQIDISKAFDTVPHEAIQEALFAKGMPTEVVQMVMDSYKGVTTDIKVGDSSYRTEIRRGVKQGDPMSPLIFNLVMESVLLRLQDMPGYKLSDGQNISVLAFADDMILLAQDRENAKTLTSTLEAHLSSLGMAIATNKCASFEIKTTKDSWYVVDPEIKINRERVTYVGPSKAITYLGISITPWDGVCSKNAEKGIEQSLTNIKKLPLKPPQKVNLLSSFVLPHYLYNINTGEMPITTIRDLDRKVRVAVKEILHLPQSISNGLVYASKRDGGLGFPKLEIISISAGLKAGIKLRTSPDPAIKMVLSTGSGLEKRLSKLARQARLVWPQVDIKDVDRYKERAKRDEVDRWAGLPTQGKAVQAFKDDKSGNEWLYKPYLLKSSRFITALKMRANVAEDKVSLNRTRRDNRVMCRHCKVRPETLGHIIGQCTYTKALRIKRHDEIVKIIQSEAKIGIETAATREPMLHCPEVGNLKPDLIIHGQGRVFVGDATVCHEDGDLLARGRKAKLEKYTPLLPILEKDLGANEYQVLPIVVGARGAMPKETLKALQLLGIKSKSTIRTISLTALRGTLELYGAFMDYNARIRLQEGGQY

SEQ ID NO: 3284 - protein, 1158 aa, Macropis europaea
MDKNMPRTRAERVPAPPGTGRGTLKDDTGNPMVHEISIPFSRNLCSLCIGSGKGNYLALTIKDEERHFKDTHPDTEVAYKCSICFKIFKTYRSATCHMPRCPGARPLDETPHPFECELCKQKYATQRGLSQHERLAHPEKRNSVRAAQSSSHPKIPRSGPVFSAEEIEKMLALEVQLQGERCIAKLMSEHFPGKDIKQLRDKRCEPSYKRWLEERLRSSSASDASHSERSVAEQGPPPNKSSSASESEEDIFEDAPLAETVELDTSIDWRTKLVERALALRVQNQERPESKAIADRLWDMLGSKVDGQTVSSDEVEEAYKLASDFFSSKGEKQPRKKRGSRKVRTRMLSGRAKMKASRYARAQEMFRDAPARLAKHVRQGTDYMTEEDQAPPLDDVKKLYSGLWGQPGQIRLAQSQEKPAQKDANEVLTPITVSEIQKRIRRTRQKVAAGPDGMTKNDVIRRGYADVLLPLFNIILLATKQPGCWRMNRTNLLLKEGKDGSSASNYRPITIAPLLSRLYWGVVDQKLRCHISLSHRQKGFVPEMGCYQNVHLLNEIIRMSKNDGGLVAVQIDISKAFDTVPHEAIQEALFAKGMPTEVVQVVMDSYKGVTTDIKVGDSSYRTDIRRGVKQGDPMSPLIFNLVMESVLLQLQDMPGFKLSDGQNISVLAFADDMILLAQDRENAKALAETLEAHLSNLGMAIATNKCASFEIKTTKDSWYVVDPDITINRERVTYLGPNKSITYLGMSITPWDGVSSKDAEKGIEQSLSCIKKLPLKPPQKVTLLSSFVLPHYLYNINTGEMSITKIRDLDRKIRVAVKEILHLPQSISNGLVYASKRDGGLGFPKLETISISAGLKAGIKLRSSTDPAIKVVLSTGSGLEKRLSKLARQARLVWPQVDIKDVDRYKERAKRDEVDRWASLQTQGKGVQAFKDDKSGNEWLYKPYLLKASRFITALKMRANVAEDKVSMNRARRDNRVMCRHCKVQPETLGHIIGQCTYTKALRIKRHDEIVKIIQSEANIGIETAATREPMLHCPEVGNLKPDLIIHGQGRVFVVDATVCHEDGDLLAKGRKAKLEKYTPLLPTLEKSLGVNEYQVLPIVVGARGAMPKETLKALQLLGIKSKATYRTISLTALRGTLELYGVFMDYNTRIRLQEGGQ

SEQ ID NO: 3285 - protein, 1158 aa, Macropis europaea
MDKNMPRTRAERVPAPPGTGRGTLKDDTGNPMVHEISIPFSRNLCSLCIGSGKGNYLALTIKDEERHFKDTHPDTEVAYKCSICFKIFKTYRSATCHMPRCPGARPLDETPHPFECELCKQKYATQRGLSQHERLAHPEKRNSVRAAQSSSHPKIPRSGPVFSAEEIEKMLALEVQLQGERCIAKLMSEHFPGKDIKQLRDKRCEPSYKRWLEERLRSSSASDASHSERSVAEQGPPPDKSSSASESEEDIFEDAPLAETVELDTSIDWRTKLVERALALRVQNQERPESKAIADRLWDMLGSKVDGQTVSSDEVEEAYKLASDFFSSKGEKQPRKKRGSRKVRTRMLSGRAKMKASRYARAQEMFRDAPARLAKHVRQGTDYMTEEDQAPPLDDVKKLYSGLWGQPGQIRLAQSQEKPAQKDANEVLTPITVSEIQKRIRRTRQKVAAGPDGMTKNDVIRRGYADVLLPLFNIILLATKQPGCWRMNRTNLLLKEGKDGSSASNYRPITIAPLLSRLYWGIVDQKLRCHISLSHRQKGFVPEMGCYQNVHLLNEIIRMSKNDGGLVAVQIDVTKAFDTVPHEAIQEALFAKGMPTEVVQVVMDSYKGVTTDIKVGDSSYRTDIRRGVKQGDPMSPLIFNLVMESVLLQLQDMPGFKLSDGQNISVLAFADDMILLAQDRENAKALAETLEAHLSNLGMAIATNKCASFEIKTTKDSWYVVDPDITINRERVTYLGPNKSITYLGMSITPWDGVSSKDAEKGIEQSLSCIKKLPLKPPQKVTLLSSFVLPHYLYNINTGEMSITKIRDLDRKIRVAVKEILHLPQSISNGLVYASKRDGGLGFPKLETISISAGLKAGIKLRSSTDPAIKVVLSTGSGLEKRLSKLARQARLVWPQVDIKDVDRYKERAKRDEVDRWASLQTQGKGVQAFKDDKSGNEWLYKPYLLKASRFITALKMRANVAEDKVSMNRARRDNRVMCRHCKVQPETLGHIIGQCTYTKALRIKRHDEIVKIIQSEANIGIETAATREPMLHCPEVGNLKPDLIIHGQGRVFVVDATVCHEDGDLLAKGRKAKLEKYTPLLPTLEKSLGVNEYQVLPIVVGARGAMPKETLKALQLLGIKSKATYRTISLTALRGTLELYGVFMDYNTRIRLQEGGQ

SEQ ID NO: 3286 - protein, 1158 aa, Macropis europaea
MDKNMPRTRAERVPAPPGTGRGTLKDDTGNPMVHEISIPFSRNLCSLCIGSGKGNYLALTIKDEERHFKDTHPDTEVAYKCSICFKIFKTYRSATCHMPRCPGARPLDETPHPFECELCKQKYATQRGLSQHERLAHPEKRNSVRAAQSSSHPKIPRSGPVFSAEEIEKMLALEVQLQGERCIAKLMSEHFPGKDIKQLRDKRCEPSYKRWLEERLRSSSASDASHSERSVAEQGPPPDKSSSASESEEDIFEDAPLAETVELDTSIDWRTKLVERALALRVQNQERPESKAIADRLWDMLGSKVDGQTVSSDEVEEAYKLASDFFSSKGEKQPRKKRGSRKVRTRMLSGRAKMKASRYARAQEMFRDAPARLAKHVRQGTDYMTEEDQAPPLDDVKKLYSGLWGQPGQIRLAQSQEKPAQKDANEVLTPITVSEIQKRIRRTRQKVAAGPDGMTKNDVIRRGYADVLLPLFNIILLATKQPGCWRMNRTNLLLKEGKDGSSASNYRPITIAPLLSRLYWGVVDQKLRCHISLSHRQKGFVPEMGCYQNVHLLNEIIRMSKNDGGLVAVQIDVSKAFDTVPHEAIQEALFAKGMPTEVVQVVMDSYKGVTTDIKVGDSSYRTDIRRGVKQGDPMSPLIFNLVMESVLLQLQDMPGFKLSDGQNISVLAFADDMILLAQDRENAKALAETLEAHLSNLGMAIATNKCASFEIKTTKDSWYVVDPDITINRERVTYLGPNKSITYLGMSITPWDGVSSKDAEKGIEQSLSCIKKLPLKPPQKVTLLSSFVLPHYLYNINTGEMSITKIRDLDRKIRVAVKEILHLPQSISNGLVYASKRDGGLGFPKLETISISAGLKAGIKLRSSTDPAIKVVLSTGSGLEKRLSKLARQARLVWPQVDIKDVDRYKERAKRDEVDRWASLQTQGKGVQAFKDDKSGNEWLYKPYLLKASRFITALKMRANVAEDKVSMNRARRDNRVMCRHCKVQPETLGHIIGQCTYTKALRIKRHDEIVKIIQSEANIGIETAATREPMLHCPEVGNLKPDLIIHGQGRVFVVDATVCHEDGDLLAKGRKAKLEKYTPLLPTLEKSLGVNEYQVLPIVVGARGAMPKETLKALQLLGIKSKATYRTISLTALRGTLELYGVFMDYNTRIRLQEGGQ

SEQ ID NO: 3287 - protein, 1053 aa, Sinonovacula constricta
MKSHRSLANTEQRNHQYSPPRARDNPEVIPNQDKAEPVSATESRKAPNFTKRQKVSWPRTHDKKWDVFDEDLEVILQSTLQGRVERKINTLTTIVYSMGLERFGCEGKDRIQKPEPIPNRRERERKKLREELNSLRKRFKKASAEEKRGLAEIREQLRSRLKTLTTAERLRRKRRERTRKRAAFIANPYRFTKTLLGEERGGSLQSSEEEVVKYLREVHSDPSREHPLGDCDRISDVDPPKFSLNMKEPSLQEVRDAVKKARACSAPGPSGIPYKVYKNCPKLLRRLWLLLRTVWKSGTVPDCWQAAEGCFVPKEKHSENIKQFRTISLLSVEGKIFFSILARRLTTYMTDNTYIDSSVQKGGIPGFSGCVEHTSALTQLLHEARINHKNLTVVWLDLANAYGSIPHQLIQEALKHYHVPEQARSLIRSYYSNIHLRFSCKNYTTSWISLEKGIVTGCSISVILFVMGMNLILKAAEEETRGPQTNAGIRLPANRGFMDDLTITTESHIQARWILKTLDETVTWARMVFKPKKSRCLIVKKGKVTRQFKMSIQGEEIPSLIDNPIKCLGKWFDSSLTDKSSKGRLRQQLEEGLGRIDKSELPGKFKTWIYQHGLLPRLVWPLMVNEIPVSLVEQLEQAVSKHIRRWLGLPPSFSSIGLYGKSTKLQIPLTSLVEEYKVAKTRLYLTLRDSEDEKVSKAGIEVRTGRKWSVTKAVEQAESSLQHQVIVGATNKGREGLGHGQQPRWNKADSQERCSMVQQEIRKSEETHRSARSVQMGQQGSWNRWNLPERKLTWQELWQYEPLQLSFLLRSVYDLLPTPTNLERWKLSEDPSCPLCKQRGTLQHVLTACPTALSQGRYRWRHDQVLRVLADILEKERRQERQIKTKGPGFINFVKPGQKAKGVQKTGLLQEARHWEMKVDLQQKLVFPDVVQTSLRPDIVIWSTIPKMMILVELTVPWEERTDEANERKRSKYQELADLCREKGFSTWVFPVEVGCRGFPAQSVWKALGALGMKGKPRQSSVRALSRAAERASSWLWLRRNEATWKPAQTSSA

SEQ ID NO: 3288 - protein, 1103 aa, Sinonovacula constricta
MTTERTHPLGLPRGGENERPNRTDTLETTRNEERTTPNTVICPCGKVCKNFRGLKIHQARSSCQRTESLRQRKGLPDKTREKTGPVSNHSTSSLSAPVLSLAGRCCSREELQSLEPIIETQTTEGGSSNSEQSLTPTTNEESPIFGQYRTEASPIFPPRARDNPEVIPNQDKAEPVAATESRKAPNFTKRQKVAWPRTNDNKWDVFDEDLEVILQSTLQGRVERKINTLTTIVYSMGLERFGCKGKERIQKPEPIPSRRERERKKLREELNSLRKRFKKASAEEKRGLAEIREQLRSRLKTLTTAERLRRKRRERTRKRAAFIANPYRFTKTLLGEERGGSLQSCEEEVVKYLREVHSDPSREHPLGDCDRISAVDPPQFSLNMKEPSLQEVRDVVKKARACSAPGPSGIPYKVYKNCPKLLRRLWLLLRTVWKSGTVPDCWQAAEGCFVPKEKHSENIKQFRTISLFSVEGKIFFSILARRLTTYMTDNTYIDSSVQKGGIPGFSGCVEHTSALTQLLHEARINHKNLTVVWLDLANAYGSIPHQLIQEALKHYHVPEQARSLIRSYYSNIHLRFSCKNYTTSWISLEKGIVTGCSISVILFVMGMNLILKAAEEETRGPQTNAGIRLPANRGFMDDLTITTESHIQARWILKTLDETVTWARMVFKPKKSRCLVVKKGKATRQFKMFIQGEEIPSLIDNPIKCLGKWFDSSLTDKSSKGRLRQQLEEGLRRIDKSELPGKFKTWIYQHGLLPRLVWPLMVNEIPVSLVEQLEQAVSKHIRRWLGLPPSFSSIGLYGKSTKLQIPLTSLVEEYKVAKTRLYLTLRDSEDEKVSKAGIEVRTGRKWSVTKAVEQAESSLQHQVIVGATNKGREGLGHGQQPRWNKADSQERCSMVQQEIRKSEEAQRSAKSIQMGQQGSWNRWNLPERKLTWQELWQYEPLQLSFLLRSVYDLLPTPANLERWKLSEDPSCPLCKQRGTLQHVLTACPTALSQGRYRWRHDQVLRVLADILEKERRQERQIKTKGPGFINFVKPGQKAKGVQKTGLLQEARHWEMKVDLRQKLVFPDVVQTSLRPDIVIWSTIPKMMILMELTVPWEERTDEQ

SEQ ID NO: 3289 - protein, 956 aa, Sinonovacula constricta
MGLERFGCKGKERIQKPEPIPSRRERERKKLREELNSLRKRFKKASAEEKRGLAEIREQLRSRLKTLTTAERLRRKRRERTRKRAAFIANPYRFTKTLLGEERGGSLQSSEEEVVKYLREVHSDPSREHPLGDCDRISAVDPPQFALNMKEPSLQEVRDVVKKARACSAPGPSGIPYKVYKNCPKLLRRLWLLLRTVWKSGTVPDCWQAAEGCFVPKEKHSENIKQFRTISLLSVEGKIFFSILARRLTTYMTDNTYIDSSVQKGGIPGFSGCVEHTSALTQLLHEARINHKNLTVVWLDLANAYGSIPHQLIQEALKHYHVPEQARSLIRSYYSNIHLRFSCKNYTTSWISLEKGIVTGCSISVILFVMGMNLILKAAEEETRGPQTNAGIRLPANRGFMDDLTITTESHIQARWILKTLDETVTWARMVFKPKKSRCLVVKKGKVTRQFKMFIQGEEIPSLIDNPIKCLGKWFDSSLTDKSSKGRLRQQLEEGLRRIDKSELPGKFKTWIYQHGLLPRLVWPLMVNEIPVSLVEQLEQAVSKHIRRWLGLPPSFSSIGLYGKSTKLQIPLTSLVEEYKVAKTRLYLTLRDSEDEKVSKAGIEVRTGRKWSVTKAVEQAESSLQHQVIVGATNKGREGLGHGQQPRWNKADSQERCSMVQQEIRKSEEAHRSAKSIQMGQQGSWNRWNLPERKLTWQELWQYEPLQLSFLLRSVYDLLPTPANLERWKLSEDPSCPLCKQRGTLQHVLTACPTALSQGRYRWRHDQVLRVLADILEKERRQERQIKTKGPGFINFVKPGQKAKGVQKTGLLQEARHWERKVDLRQKLVFPDVVQTSLRPDIVIWSTIPKMMILMELTVPWEERTDEANERKRSKYQELADLCREKGFSTWVFPVEVGCRGFPAQSVWKALGALGMKGKTRKSSVRALSIAAERASSWLWLRRNEATWKPAQTSSA

SEQ ID NO: 3290 - protein, 956 aa, Sinonovacula constricta
MGLERFGCKGKERIQKPEPIPSRRERERKKLREELNSLRKRFKKASAEEKRGLAEIREQLRSRLKTLTTAERLRRKRRERTRKRAAFIANPYRFTKTLLGEERGGSLQSNEEEVVKYLREVHSDPSREHSLGDCDRISAVDPPQFSLNMKEPSLQEVRDVVKKARACSAPGPSGIPYKVYKNCPKLLRRLWLLLRTVWKSGTVPDCWQAAEGCFVPKEKHSENIKQFRTISLLSVEGKIFFSILARRLTTYMTDNTYIDSSVQKGGIPGFSGCVEHTSALTQLLHEARINHKNLTVVWLDLANAYGSIPHQLIQEALKHYHVPEQARSLIRSYYSNIHLRFSCKNYTTSWISLEKGIVTGCSISVILFVMGMNLILKAAEEETRGPQTNAGIRLPANRGFMDDLTITTESHIQARWILKTLDETVTWAMMVFKPKKSRCLVVKKGKVTRQFKMFIQGEEIPSLIDNPIKCLGKWFDSSLTDKSSKGRLRQQLEEGLRRIDKSELPGKFKTWIYQHGLLPRLVWPLMVNEIPVSLVEQLEQAVSKHIRRWLGLPPSFSSIGLYGKSTKLQIPLTSLVEEYKVAKTRLYLTLRDSEDEKVSKAGIEVRTGRKWSVTKAVEQAESSLQHQVIVGATNKGREGLGHGQQPRWNKADSQERCSMVQQEIRKSEEAHRSAKSIQMGQQGSWNRWNLPERKLTWQELWQYEPLQLSFLLRSVYDLLPTPANLERWKLSEDPSCPLCKQRGTLQHVLTACPTALSQGRYRWRHDQVLRVLADILEKERRQERQIKTKGPGFINFVKPGQKAKGVQKTGLLQEARHWEMKVDLRQKLVFPDVVQTSLRPDIVIWSTIPKMMILMELTVPWEERTDEANERKRSKYQELADLCREKGFSTWVFPVEVGCRGFPAQSVWKALGALGMKGKTRKSSVRALSIAAERASSWLWLRRNEATWKPAQTSSA

SEQ ID NO: 3291 - protein, 1072 aa, Sinonovacula constricta
MQTTEGGSSDSEQSLTPTTNEESPIFGQYRTEESPVFPPRARDNPEVIPNQDKAEPVSATESRKAPNFTKRQKVSWPRTHDKKWDVFDEDLEVILQSTLQGRVERKINTLTTIVYSMGLERFGCEGKDRIQKPEPIPNRRERERKKLREELNSLRKRFKKASAEEKRGLAEIREQLRSRLKTLTTAERLRRKRRERTRKRAAFIANPYRFTKTLLGEERGGSLQSSEEEVVKYLREVHSDPSREHPLGDCDRISDVDPPKFSLNMKEPSLQEVRDAVKKARACSAPGPSGIPYKVYKNCPKLLRRLWLLLRTVWKSGTVPDCWQAAEGCFVPKEKHSENIKQFRTISLLSVEGKIFFSILARRLTTYMTDNTYIDSSVQKGGIPGFSGCVEHTSALTQLLHEARINHKNLTVVWLDLVNAYGSIPHQLIQEALKHYHVPEQARSLIRSYYSNIHLRFSCKNYTTSWISLEKGIVTGCSISVILFVMGMNLILKAAEEETRGPQTNAGIRLPANRGFMDDLTITTESHIQARWILKTLDETVTWARMVFKPKKSRCLIVKKGKVTRQFKMSIQGEEIPSLIDNPIKCLGKWFDSSLTDKSSKGRLRQQLEEGLRRIDKSELPGKFKTWIYQHGLLPRLVWPLMVNEIPVSLVEQLEQAVSKHIRRWLGLPPSFSSIGLYGKSTKLQIPLTSLVEEYKVAKTRLYLTLRDSEDEKVSKAGIEVRTGRKWSVTKAVEQAESSLQHQVIVGATNKGREGLGHGQQPRWNKADSQERCSMVQQEIRKSEETHRSARSVQMGQQGSWNRWNLPERKLTWQELWQYEPLQLSFLLRSVYDLLPTPTNLERWKLSEDPSCPLCKQRGTLQHVLTACPTALSQGRYRWRHDQVLRVLADILEKERRQERQIKTKGPGFINFVKPGQKAKGVQKTGLLQEARHWEMKVDLQQKLVFPIVVQTSLRPDIVIWSTIPKMMILVELTVPWEERTDEANERKRSKYQELADLCREKGFSTWVFPVEVGCRGFPAQSVWKALGALGMKGKPRQSSVRALSRAAERASSWLWLRRNEATWKPAQTSSA

SEQ ID NO: 3292 - protein, 1193 aa, Sinonovacula constricta
MIKLQQLKEHTPWVSREGGENERPNRTDTLETTRNEERTTPDTVICPCGKVCKNFRGLKIHQARSSCQQTESLRQRKGLPDKTGEKTGPVSNHSTSSLSAPVLAGRGCSREELQSLEPVIETQTTEGGNSDSEQSLTPTTNEESPIFGQYRTEESPVFPPRARDNPAVIPNQDKAEPVSATESRKAPNFTKRQKVAWPRTHDKKWDVFDEDLEVILQSTLQGRVERKINTLTTIVYSMGLERFGCEGKDRIQKPEPIPNRRERERKKLREELNSLRKRFKKASAEEKRGLAEIREQLRSRLKTLTTAERLRRKRRERTRKRAAFIANPYRFTKTLLGEERGGSLQSSEEEVVKYLREVHSDPSREHPLGDCDRISDVDPPKFSLNMKEPSLQEVRDVVKKARAWSAPGPSGIPYKVYKNCPKLLRRLWLLLRTVWKSGTVPDCWQAAEGCFVPKEKHSENIKQFRTISLLSVEGKIFFSILARRLTTYMTDNTYIDSSVQKGGIPGFSGCVEHTSALTQLLHEARINHKNLTVVWLDLANAYGSIPHQLIQEALKHYHVPEQARSLIRSYYSNIHLRFSCKNYTTSWISLEKGIVTGCSISVILFVMGMNLILKAAEEETRGPQTNAGIRLPANRGFMDDLTITTESHIQARWILKTLDETVTWARMVFKPKKSRCLIVKKGKVTRQFKMSIQGEEIPSLIDNPIKCLGKWFDSSHTDKNSKGRLRQQLEEGLRRIDKSELPGKFKTWIYQHGLLPRLVWPLMVNEIPVSLVEQLEQAVSKHIRRWLGLPPSFSSIGLYGKSTKLQIPLTSLVEEYKVAKTRLYLTLRDSEDEKVSKAGIEVRTGRKWSVTKAVEQAESSLQHQVIVGATNKGREGLGHGQQPRWNKADSQERCSMVQQEIRKSEETHRLARSVQMGQQGSWNRWNLPERKLTWQELWQYEPLKLSFLLRSVYDLLPTPTNLERWKLSEDPSCPLCKQRGTLQHVLTACPTALSQGRYRWRHDQVLRVLADILEKERRQERQIKTKGPGFINFVKPGQKAKGVQKTGLLQEARHWEMKVDLRQKLVFPDVVQTSLRPDIVIWSTIPKMMILVELTVPWEERTDEANERKRSKYQELADLCREKGFSTWVFPVEVGCRGFPAQSVWKALGALGMKGKPRQSSVRALSRAAERASSWLWLRRNEVTWKPAQTSSA

SEQ ID NO: 3293 - protein, 956 aa, Sinonovacula constricta
MGLERFGCKGKERIQKPEPIPSRRERERKKLREELNSLRKRFKKASAEEKRGLAEIREQLRSRLKTLTTAERLRRKRRERTRKRAAFIANPYRFTKTLLGEERGGSLQSSEEEVVKYLREVHSDPSREHPLGDCDRISAVDPPQFSLNMKEPSLQEVRDVVKKARACSAPGPSGIPYKVYKNCPKLLRRLWLLLRTVWKSGTVPDCWQAAEGCFVPKEKHSENIKQFRTISLLSVEGKIFFSILARRLTTYMTDNTYIDSSVQKGGIPGFSGCVEHTSALTQLLHEARINHKNLTVVWLDLANAYGSIPHQLIQEALKHYHVPEQARSLIRSYYSNIHLRFSCKNYTTSWISLEKGIVTGCSISVILFVMGMNLILKAAEEETRGPQTNAGIRLPANRGFMDDLTITTESHIQARWILKTLDETVTWARMVFKPKKSRCLVVKKGKVTRQFKMFIQGEEIPSLIDNPIKCLGKWFDSSLTDKSSKGRLRQQLEEGLRRIDKSELPGKFKTWIYQHGLLPRLVWPLMVNEIPVSLVEQLEQAVSKHIRRWLGLPPSFSSIGLYGKSTKLQIPLTSLVEEYKVAKTRLYLTLRDSEDEKVSKAGIEVRTGRKWSVTKAVEQAESSLQHQVIVGATNKGREGLGHGQQPRWNKADSQERCSMVQQEIRKSEEAQRSAKSIQMGQQGSWNRWNLPERKLTWQELWQYEPLQLSFLLRSVYDLLPTPANLERWKLSEDPSCPLCKQRGTLQHVLTACPTALSQGRYRWRHDQVLRVLADILEKERRQERQIKTKGPGFINFVKPGQKAKGVQKTGLLQEARHWEMKVDLRQKLVFPDVVQTSLRPDIVIWSTIPKMMILMELTVPWEERTDEANERKRSKYQELADLCREKGFSTWVFPVEVGCRGFPAQSVWKALGALGMKGKTRKSSVRALSIAAERASSWLWLRRNEATWKPAQTSSA

SEQ ID NO: 3294 - protein, 956 aa, Sinonovacula constricta
MGLERFGCEGKERIQKPEPIPSRRERERKKLREELNSLRKRFKKASAEEKRGLAEIREQLRSRLKTLTTTERLRRKRRERTRKRAAFIANPYRFTKTLLGEERGGSLQSSEEEVVKYLREVHSDPSREHPLGDCDRISAVDPPQFSLNMKEPSLQEVRDVVKKARACSAPGPSGIPYKVYKNCPKLLRRLWLLLRTVWKSGTVPDCWQAAEGCFVPEEKHSENIKQFRTISLLSVEGKIFFSILARRLTTYMTDNTYIDSSVQKGDIPGFSGCVEHTSALTQLLHEARINHKNLTVVWLDLANAYGSIPHQLIQEALKHYHVPEQARSLIRSYYSNIHPRFSCKNYTTSWISLGKGIVTGCSISVILFVMGMNLILKAAEEETRGPQTNAGIRLPANRGFMDDLTITTESHIQARWILKTLDETVTWARMVFKPKKSRCLVVKKGKVTRQFKMFIQGEEIPSLIDNPIKCLGKWFDSSLTDKRSKGRLRQQLEEGLRRIDKSELPGKFKTWIYQHGLLPRLVWPLMVNEIPVSLVEQLEQAVSKRIRRWLGLPPSFSSIGLYGKSTKLQIPLTSLVEEYKVAKTRLYLTLRDSEDEKVSKAGIEVRTGRKWSVTKAVEQAESSLQHQVIVGATNKGREGLGHGQQPRWNKADSQERCNMVQQEIRKSEEAHRSARSIQMGQQGSWNRWNLPERKLTWQELWQYEPLQLSFLLRSVYDLLPTPANLERWKLSEDPSCPLCKQRGTLQHVLTACPTALSQGRYRWRHDQVLRVLADILEKERRQERQIKTKGPGFINFVKPGQKAKGVQKTGLLQEARHWEMKVDLRQKLVFPDVVQTSLRPDIVIWSTIPKMMILMELTVPWEERTDEANERKRSKYQELADLCREKGFSTWVFPVEVGCRGFPAQSVWKALGALGMKGKTRKSSVRALSRAAERASSWLWLRRNESTWKPAQTSSA

SEQ ID NO: 3295 - protein, 1093 aa, Cyclina sinensis
MAGSRSTAEVTQSVDNLLSLQDNIHVIVPEEQDNDVPEVEEDSPIFRLTNTREDSPIFGPSLAQSSETVSATEESIEGPFTFPESWRTSPLAGSIGVTHDHVGGRKQPTSSERKQKIAWPKMNDKGWELFDEDLYLVLQSTLIGAVERKLEALTSLTYTLGKERFGLEKKPNLPKPPPVPNRRLCEIKKIRVELRSLRKRYKRSSIVEKEGIVQLREQIRSRLKSLTNAERLRRKRREKTRKRTAFISNPYKFTKELLGEEKCGKLESSQNEVEEYLKETHSDPHRSEALGECGRIEPVDEPVIPLNMMEPTWKEINDVVKKARSCSAPGPSGIPYKVYKKCPRLLRTLWSLVRVIWRKGTVPKCWQTAEGCLVPKEKNSKNVRQFRTISLLSVEGKILFSILAKRMTTYMIENKYINTSVQKGGIPGFSGCVEHTRALTQLLHEARINQKDLTVVWLDFANAYGSIPHQLIHVALQHYHVPEQARNLVTSYFSNIHLRFSCSRFTTDWVPLEKGIVTGCTISVILFVMGMNMIIRAAERESRGPQTNTGIRLPSNRGFMDDMTITTETHIQARWILQALDETVSWARMLFKPGKSRCLVVRKGKVRNMFKLAIQNEEIPSLVNNPVKCLGKWFDSTLKDTQSQERLKQQVEEGLRRIDKSELPGKYKAWIFQHGLLARLIWPLMVNGIPISLVEKLEQSVSKHLRRWLGLPPSFTSLGLYSRSSKLQMPFNSLVEEYKVAKARLLLTLRDSSDEKISGAGIEVRTGRKWSVKQAVEQAESSLMLQDIVGTTNKGREGLGTSYKQRWRDSDKVVRRSMVQTELRRAEDETRSSRSVQLGSQGNWMKWNLPERKLTWQELWRYEPLQLCFLLRSVYDLLPSPTNLKLWKLSEDPSCPLCGNVGSLRHIMSSCNTALSQGRYRWRHDQVLREMADILEKERKKDRPLNQTGPYFINFVKEGEKKSAKSTSTGILHDSKKWEMLVDLGKKLKFPEEVTHTSLRPDIVIWSRSPKLVIMIELTVPWEERVEESHETKKGKYQDLADTCRDRGWKTWVFPVEVGCRGFPSQSVWKMLGAVGIKGGARKTAAHALGKAA

SEQ ID NO: 3296 - protein, 1048 aa, Cyclina sinensis
MAGSRSTAEVTQSVDNLLSLQDNIHVIVPEEQDNDVPEVEEDSPIFRLTNTREDSPIFGPSLAQSSETVSATEESIEGPFTFPESWRTSPLAGSIGVTHDHVGGRKQPTSSERKQKIAWPKMNDKGWELFDEDLYLVLQSTLIGAVERKLEALTSLTYTLGKERFGLEKKPNLPKPPPVPNRRLCEIKKIRVELRSLRKRYKRSSIVEKEGIVQLREQIRSRLKSLTNAERLRRKRREKTRKRTAFISNPYKFTKELLGEEKCGKLESSQNEVEEYLKETHSDPHRSEALGECGRIEPVDEPVIPLNMMEPTWKEINDVVKKARSCSAPGPSGIPYKVYKKCPRLLRTLWSLVRVIWRKGTVPKCWQTAEGCLVPKEKNSKNVRQFRTISLLSVEGKILFSILAKRMTTYMIENKYINTSVQKGGIPGFSGCVEHTRALTQLLHEARINQKDLTVVWLDLANAYGSIPHQLIHVALQHYHVPEQARNLVTSYFSNIHLRFSCSRFTTDWVPLEKGIVTGCTISVILFVMGMNMIIRAAERESRGPQTNTGIRLPSNRGFMDDMTITTETHIQARWILQALDETVSWARMLFKPGKSRCLVVRKGKVRNMFKLAIQNEEIPSLVNNPVKCLGKWFDSTLKDTQSQERLKQQVEEGLRRIDKSELPGKYKAWIFQHGLLARLIWPLMVNGIPISLVEKLEQSVSKHLRRWLGLPPSFTSLGLYSRSSKLQMPFNSLVEEYKVAKARLLLTLRDSSDEKISGAGIEVRTGRKWSVKQAVEQAESSLMLQDIVGTTNKGREGLGTSYKQRWRDSDKVVRRSMVQTELRRAEDETRSSRSVQLGSQGNWMKWNLPERKLTWQELWRYEPLQLCFLLRSVYDLLPSPTNLKLWKLSEDPSCPLCGNVGSLRHIMSSCNTALSQGRYRWRHDQVLREMADILEKERKKDRPLNQTGPYFINFVKEGEKKSAKSTSTGILHDSKKWEMLVDLGKKLKFPEEVTHTSLRPDIVIWSRSPKLVIMIELTVPWEERVEESHETKKGKYQDLADTCRDRG

SEQ ID NO: 3297 - protein, 1093 aa, Cyclina sinensis
MAGSRSTAEVTQSVDNLLSLQDNIHVIVPEEQDNDVPEVEEDSPIFRLTNTREDSPIFGPSLAQSSETVSATEESIEGPFTFPESWRTSPLAGSIGVTHDHVGGRKQPTSSERKQKIAWPKMNDKGWELFDEDLYLVLQSTLIGAVERKLEALTSLTYTLGKERFGLEKKPNLPKPPPVPNRRLCEIKKIRVELRSLRKRYKRSSIVEKEGIVQLREQIRSRLKSLTNAERLRRKRREKTRKRTAFISNPYKFTKELLGEEKCGKLESSQNEVEEYLKETHSDPHRSEALGECGRIEPVDEPVIPLNMMEPTWKEINDVVKKARSCSAPGPSGIPYKVYKKCPRLLRTLWSLVRVIWRKGTVPKCWQTAEGCLVPKEKNSKNVRQFRTISLLSVEGKILFSILAKRMTTYMIENKYINTSVQKGGIPGFSGCVEHTRALTQLLHEARINQKDLTVVWLDFANAYGSIPHQLIHVALQHYHVPEQARNLVTSYFSNIHLRFSCSRFTTDWVPLEKGIVTGCTISVILFVMGMNMIIRAAERESRGPQTNTGIRLPSNRGFMDDMTITTETHIQARWILQALDETVSWARMLFKPGKSRCLVVRKGKVRNMFKLAIQNEEIPSLVNNPVKCLGKWFDSTLKDTQSQERLKQQVEEGLRRIDKSELPGKYKAWIFQHGLLARLIWPLMVNGIPISLVEKLEQSVSKHLRRWLGLPPSFTSLGLYSRSSKLQMPFNSLVEEYKVAKARLLLTLRDSSDEKISGAGIEVRTGRKWSVKQAVEQAESSLMLQDIVGTTNKGREGLGTSYKQRWRDSDKVVRRSMVQTELRRAEDETRSSRSVQLGSQGNWMKWNLPERKLTWQELWRYEPLQLCFLLRSVYDLLPSPTNLKLWKLSEDPSCPLCGNVGSLRHIMSSCNTALSQGRYRWRHDQVLREMADILEKERKKDRPLNQTGPYFINFVKEGEKKSAKSTSTGILHDSKKWEMLVDLGKKLKFPEEVTHTSLRPDIVIWSRSPKLVIMIELTVPWEERVEESHETKKGKYQDLADTCRDRGWKTWVFPVEVGCRGFPSQSVWKMLGAVGIKGGARKTAAHALDKAA

SEQ ID NO: 3298 - protein, 1112 aa, Cyclina sinensis
MAGSRSTAEVTQSVDNLLSLQDNIHVIVPEEQDNDVPEVEEDSPIFRLTNTREDSPIFGPSLAQSSETVSATEESIEGPFTFPESWRTSPLAGSIGVTHDHVGGRKQPTSSERKQKIAWPKMNDEGWELFDEDLYLVLQSTLIGAVERKLEALTSLTYTLGKERFGLVKKPNLPKPPPVPNRRLCEIKKIRVELRSLRKRYKRSSIVEKEGIVQLREQIRSRLKSLTNAEKLRRKRKEKTRKRTAFISNPYKFTKELLGEEKCGKLESSQNEVEEYLKETHSDPHRSEALGECGRIEPVDEPVIPLNMKEPTWKEINDVVKKARSCSAPGPSGIPYKVYKKCPRLLRTLWSLVRVIWRKGTVPKCWQTAEGCLVPKEKNSKNVRQFRTISLLSVEGKIFFSILAKRMTTYMIENKYINTSVQKGGIPGFSGCIKHTSALTQLLHEARINQKDLTVVWLDLANAYGSIPHQLIHVALQHYHVPEQARNLVTSYFSNIHLRFSCSRFTTDWVPLEKGIVTGCTISVILFVMGMNMIIRAAERESRGPQTNTGIRLPSNRRSMDDMTITTETHIQARWILQALDETVSWARMLFKPGKSRCLVVRKGKVTDKFKLAIQNEEIPSLVNNPVKCLGKWFDSTLKDTQSQERLKQQVEEGLRRIDKSELPGKYKAWIFQHGLLARLIWPLMVNEIPISLVEKLEQSVSKHLRRWLGLPPSFTSLGLYSRSSKLQMPFNSLVEEYNVAKARLLLTLRDSSDEKISGAGIEVRTGRKWSVKQAVEQAESSLKLQDIVGTTNKGREGLGTSYKQRWRDSDKVVRRSMVQTELRRAEDETRSSRSVQLGSQGNWMKWNLPERKLTWQELWRYEPLQLSFLLRSVYDLLPSPTNLKLWKLSEDPSCPLCGNVGSLRHIMSSCNTALSQGRYRWRHDQVLREMADILEKERKKDRPLNQTGPYFINFVKEGEKKSAKSTSTGILHDSKKWEMLVDLGKKLKFPEEVTHTSLRPDIVIWSRSPKLVIMVELTVPWEERVEESHETKKGKYQDLADTCRDRGWKTWVFPVEVGCRGFPSQSVWKMLGAVGIKGGARKTAAHALGKAAERASSWLWLRRNEPTWQPS

SEQ ID NO: 3299 - protein, 1263 aa, Dreissena rostriformis
MTGGAWLMTSTFSSLNCIITSFTSGLPVTFRNRLNDNRERPVTLDRQLTSRNRLVFGVQRVGSSLYCLCEETTITIATTDRQKQYPQGLPRGGEDEGPNRTDSAETTRRELWTLTRDQTVVCQCGKVCKNYRGMKIHQGKSGCRLEGKPKHRAGVPGETREIASLVANHSTGGLSAPVFAVTDDNSEAEVTQSLDELFGEQGTIPSMTPTEQGDGSAEESPVHPSPEELVFPDSWCTPPAAGRKKDKTVPTKERTQPTSEERRSKIAWPAMNNSGWSSFDEDLDQVLQTALTGSVDRKLKALPLITYALGKERFGLEQKANLSRPPQVPNRRLCEIKKLRAELRSLRKRYKQSSEVEKKGIVKLREEVRSRLRILTNAERLRRKRRDRAKKRKAFVSDPYRFTKNLLSEEKSGKLESSQEDVETFLREVHSDPLREEPLGECSRILPVNDPDCPLNMKEPTWKEINEVVKKARSCSAPGPSGIPYKVYKKCPKLLRRLWSLLRTVWRKGTVPSCWQSAEGCLAPKEKNSKTINQFRTISLLSVEGKIFFSILAKRLTTYMLENEYVDISVQKGGIPGFSGCVEHTSALTQLLHEARIDHKNLTVVWLDLANAYGSIPHQLIETALRHYHIPDSARNLIMNYFNGINLRFSSNTFTTNWLQLEKGIVTGCTISVILFVMGMNMIIKAAERESRGPKTNTGIRLPSNRGFMDDMTVTTETHIQARWILAALDETATWARMRFKPGKSRSLVVRKGKVTSQFKLCIQGEEIPSLEDKPIKCLGKWFDSSLRDTHCQDMLKQQVAEGLQRIDKSELPGKFKAWVFQHGLLPRVMWPLMVNDVPISTVEKLEQKISKHLRKWLGLPPSFTNIGLYGRSTKLQMPISSLVEEFKVAKARLMLTLRDSEDGKVSNAGIQVRTGRKWSVSKAVDSAESSLKHKDVVGSINVGREGLGTRQTQRWEKAGKRERRDLVQREIRNVEEQARSARSVQLGPQGNWTKWSTPERKLTWQELWTYEPLQLSFLLRAVYDMLPTPANLQRWKLTEDPTCSLCGSIGTLRHILSSCPTALAQGRYRWRHDQVLRMLADALERERKKDRPRKKLGPQFISFVKEGTTKPTATTSSRSCILQDANDWEMRADLRKKLVFPEEVAHTTLRPDIVLWSKAAKRVILVELTVPWEERIEEAYELKKAKYQDLADVCRDRGWKTWIFPVEVGCRGFPSQSVWKMFGALGAEGRVRKTTIHALGKAAERASSWLWLRRSEPNWQPS

SEQ ID NO: 3300 - protein, 807 aa, Dreissena rostriformis
MKEPTWKEINEVVKKARSCSAPGPSGIPYKVYKKCPKLLRRLWSLLRTVWRKGTVPSCWQSAEGCLAPKEKNSKTINQFRTISLLSVEGKIFFSILAKRLTTYMLENEYVDISVQKGGIPGFSGCVEHTSALTQLLHEARIDHKNLTVVWLDLANAYGSIPHQLIETALRHYHIPDSARNLIMNYFNGINLRFSSNTFTTNWLQLEKGIVTGCTISVILFVMGMNMIIKAAERESRGPKTNTGIRLPSNRGFMDDMTVTTETHIQARWILAALDETATWARMRFKPGKSRSLVVRKGKVTSQFKLCIQGEEIPSLEDKPIKCLGKWFDSSLRDTHCQDMLKQQVAEGLQRIDKSELPGKFKAWVFQHGLLPRVMWPLMVNDVPISTVEKLEQKISKHLRKWLGLPPSFTNIGLYGRSTKLQMPISSLVEEFKVAKARLMLTLRDSEDGKVSNAGIQVRTGRKWSVSKAVDSAESSLKHKDVVGSINVGREGLGTRQTQRWEKAGKRERRDLVQREIRNVEEQARSARSVQLGPQGDWTKWSTPERKLTWQELWTYEPLQLSFLLRAVYDMLPTPANLQRWKLTEDPTCSLCGSIGTLRHILSSCPTALAQGRYRWRHDQVLRMLADALERERKKDRPRKKLGPQFISFVKEGTTKPTATTSSRSCILQDANDWEMRADLRKKLVFPEEVAHTTLRPDIVLWSKAAKRVILVELTVPWEERIEEAYELKKAKYQDLADVCRDRGWKTWIFPVEVGCRGFPSQSVWKMFGALGAEGRVRKTTIHALGKAAERASSWLWLRRSEQNWQPS

SEQ ID NO: 3301 - protein, 952 aa, Sinonovacula constricta
MGLERFGCEGKERIQKPEPIPNRRERERKKLREELNSLRKRFKKASAEEKRGLAEIREQLRSRLKTLTTAERLRRKRRERTRKRAAFIANPYRFTKTLLGEERGGSLQSSEEEVVKYLRKVHSDPSREHPLGDCDRISAVDPPQFSLNMKEPSLQEVRDVVKKARACSAPGPSGIPYKVYKNCPKLLRRLWLLLRTVWKSGTVPDCWQAAEGCFVPKEKHSENIKQFRTISLLSVEGKIFFSILARRLTTYMTDNTYIDSSVQKGGIPGFSGCVEHTSALTQLLHEARINHKNLTVVWLDLANAYGSIPHQLIQEALKHYHVPEQARSLIRSYYSNIHLRFSCKNYTTSWISLEKGIVTGCSISVILFVMGMNLILKAAEEETRGPQTNAGIRLPANRGFMDDLTITTESHIQARWILKTLDETVTWARMVFKPKKSRCLVVKKGKVTRQFKMFIQGEEIPSLIDNPIKCLGKWFDSSLTDKSSKGRLRQQLEEGLRRIDKSELPGKFKTWIYQHGLLPRLVWPLMVNEIPVSLVEQLEQAVSKHIRRWLGLPPSFSSIGLYGKSTKLTSLVEEYKVAKTRLYLTLRDSEDEKVSKAGIEVRTGRKWSVTKAVEQAESSLQHQVIVGATNKGREGLGHGQQPRWNKADSQERCSMIQQEIRKSEEAHRSAKSIQMGQQGSWNRWNLPERKLTWQELWQYEPLQLSFLLRSVYDLLPTPANLERWKLSEDPSCPLCKQRGTLQHVLTACPTALSQGRYRWRHDQVLRVLADILEKDRRQERQIKTKGPGFINFVKPGQKAKGVQKTGLLQEARHWEMKVDLRQKLVFPDVVQTSLRPDIVIWSTIPKMMILMELTVPWEERTDEANERKRSKYQELADLCREKGFSTWVFPVEVGCRGFPAKSVWKALGALGMKGKTRKSSVRALSIAAERASSWLWLRRNEATWKPAQTSSA

SEQ ID NO: 3302 - protein, 989 aa, Tachypleus gigas
MMSSPNIICPRIRNAERIQNLTGVRTPSERPRQVVWTEDEVRTLRAMEVVHSGQKNINVLCAEHLPGKTPKQISDKRRDLNKKKPPVPTASHTIKSRGDPVDVVQHEALDWEGINIPDRSSKFCSYICQLRDQKGLDEATWQEVEVVTKMWVDEIAHSQTSWRNERTSTQALKVINPARRPYKRRLQRVERFKRVQKMFDFERKRLAEEILDGRDAVRCPLSKDQVKDHYDQVYGVANNNVNFDGCPFPPRADNTNILEPITSTEVSQTLRGMKRGAPGPDKITLPFLLYRLKYGIDASLASLFNIWLFTGRIPECMKVNKSVLLPKGSSNLHEVKNWRPITISSIVLRLYSRIMARRLEQAVQINPRQRGFVPQAGCRDNIFLLRSIMRKAKRHGTLAMAFLDLCKAFDTVGHQHLLASLARFHVHPHFVRLVEDMYQDGVTSFRVGIENTKPIRLRRGVKQGDPMSPILFNIALDPLIRKIEEVGRGISLNKKLDPVSTLAYADDMAVLAKDHASLQEMLNTVNEYCLGNGLSLNISKSAGMLIRGSSKTFTVNNCSPWTVNGEGLPMIGPEQSYRYLGANICPWTGVYSEPVLPLLEKWIDNISRVPLKPFQRVEILNRFAVPRLLYQLELGASSGKMLNEMDNRVKKAVKTWCHLPPCTTDGLLYSRYRDSGLALVKLESLVPTLKIKTGLRHINSADKTIRYLAEADNLLGEIQAIALKAGLPIPKPEQTSGTYHSNWRDMERKRWEGLALQGHGVSLFKSSRSANHWLPKPVGMKDHHWVKCLAMRANVYPTREALSRGNLSTNKDVAKCRGCSAPRETICHLSGQCPKLKSMRTRRHNKICDHLVKECVSKGWKVLAEPTIQASNGERRRPDLIFHREDKAVVVDVTVRYELMYSSLEEAYNSKVARYEELAPQIKDLTGATSIVFHGLPIGARGAWYPKNTEVLADLDIRSKYFEEFLCRRAMLYTLDVLWKANNERHLAW

SEQ ID NO: 3303 - protein, 1469 aa, Limulus polyphemus
MDSYNTELRYGLASVGCQGGGQTQATWHQLGMVAFERFSGDVGLHASGIEESITYSNTRSHSQSVPGATGELPILDDRCRTTEVDGLFSNVSLRETSCDTTTTVVDNPNFDIDSNEYHLDLSQTMPTDNSIMSAEGQLYSTIAEGENTNPYSPDLAMTFPDNLETSISTTPTEDNETINAGNITLQVNQLYSTTTNNLKCDMIMPIATDSQYVDYQSSCVTEGFIDVRALLTATDSTPVECQSSCMTESRNNGRATPAATDSTSVECQSSCVTESGRDGRNIPAATDSPPVDCQSSCMTDNVSVVLASPVATDSSSIECQSLCVIESETNEPATPVATDSSSVECQSSCMTESVTNEKARPVAAGSYSAECQSSSMAEGRVERVGTTISVFLPFKKVACDVCSHEFLGYSKFAVHQANAHNSVTRACCSYCGKRDGNYHSIACHVPKCPARRTVTFAANLSNFSCDLCSDSFKTKSGLSQHKRHRHPCSRNAERIQSLGVRTPSARSCRVWTEEETRNLREVEVVYSGQKNINVLCAGHLPGKTAKQVSDKRRDLHRIRPTKVHGLPTTQSRGDPVEQVGTYEELAWEEMHSLPDPNSKFGSYLDQLRDQKGLEEPVWQEIEIVTEQWVVNLAHTQASWNHERTTKQVTENKTPARKPFKRRFFRAERYKRFQRMYDLQRKRLAEEILDGRDAVSCSLKKGEVTDHYDMVYGVANDRVSLDDCPRPPRADNTNLLKPFTPTEVMDSLQGMKNGAAGPDLITLSFLKKRLKNGIHVSLTNVFNLWQFSGRIPECMKSNRSVLIPKGKSDLRDVKNWRPITIASIVLRLYTRILARRLEQAVQINPRQRGFIPQAGCRDNIFLLQSAMRRAKRKGTLALGLLDLSKAFDFIGHKHLLASLERFAIHPQFIRIVEDMYSGCSTSFRVGSQSTRPIVLMRGVKQGDPMSPLLFNIALDPLLCKLDEEGQGFMLGEEQAPVSTLAYADDMALLAKDHAGLQSMLNIVDKFCSGNGLGLNIAKSAGMLIRGSNKTFTINNCPSWTVNGETLPMIGPEQSYRYLGATVCPWSGVVSEAVKPNLEKWIGQISESPLKPHQRVDILCTYALPRLFYQLELGSLNTSLLKELDNLVKKAVKRWCHLPACTADGLLYSRHRDGGLAIVKFESLVPCLKIKTYLRLVHSTDPVTATLAETDGLLAASRCISQKAGLPIPTPDQRSGTYHSNWRDMERTRWERLALHGQGVELFKGSRSANHWLPKPVGMKPHHWVKCLAMRANVYPTKEALSRGNLSNNKDSAKCRGCTAMRETLCHLSGQCPKLKSLRIRRHNKICEHLIAEASHKGWKVLQEPTLVTDNGERRRPDLIFHRDDKAVVVDVTVRYESSNNSLQEAYTSKVNRYACLAPQIEELTGATSVVFHGFPMGARGAWFPENTDVLADLDIRSKYFEEFLCRRTILYTLDLLWKSNNETYLERLAR

SEQ ID NO: 3304 - protein, 1214 aa, Tachypleus tridentatus
MERNINDKSYGLAFVGCQGDGQTHATWHRPGMVASERFPGVEGEESLRSGIEVLNETYSNNQTHIEGVLIATSQTARAGRCRTTEVDGLSYESSENEEIESLNSRTTEVDGLSYSPTVIKGQRTNLPNSDKELTVERVGRTVFVNLPYKNKLLACDQCPLEFTSFPRFADHQANIHNSVAQARCMFCGKDDTHHHAIACHIPKCPYRRSVAFANQSSSFGCEVCGLKFKTKSGVSQHKRHKPPRIRNAERIQMSGVRTPSERPRQVVWSEEEVRTLREMVVVYSGQKNINVLCAEHLPGKTPKQISDKRRDLNKQKPPVCTASHTIKSLGDPAVVVQYEELDWEGINIPDRSSKFCSYICQLRDQKGLVEVVTKTWVDEIAHSQTTWRNERTSTQALKVINPARRPYKRRFHRVERFKRFQRMFDFERKRLAEENLHGRDAVRCPLSKDQVKDHYDQVYCIANNNVNFDGCPFPPRADNTNILEPITSTEVSQALQGMKRGAPGPDKITIPFLLYRLKYGIDASLASLYNIWLFTGRIPECMKVNKSVLLPKGSSNLHEVKNWRPITISSIVLRLYSRITARHLEQAVQINPRQRGFIPQAGCRDNIFLLRSIMRKAKRHGTLAMAFLDLCKAFDTVGHQHLLASLARFHVHPHFVRLVGDMYQDGVTSFRVGIENTKPMRLLRGVKQGDPMSPILFNIALDPLIRKIEEVGRGISLNRKLDPVSILAYADDMAVLAKDHASLQEMLNTVNDYCLGNGLSLNISKSAGMLSRGSSKTFTVNNCSPWTVNGEGLPMIGPEQSYRYLGANVCPWTGVYSEPVLPLLEKWIDNISRVPLKPHQRVEILNRFAVPRLLYQLELGASSGKLLREMDNLIKNAVKSWCHLPPCTTDGLLYSRYRDSGLALVKLESLIPTLKIKTGLRHVHSTDKTIRYLAKTDNVLDNIQGIALKAGLPIPKPEQTSGTYHSNWRDMKRKRWEGLALQGHGVSLFKGSRSANHWLPKPVDMKDHHWVKCLALRANVYPTREALSRGNLSTNKEVAKCRGCSAPRETICHLSGQCPKLKSMRTRRHNKICDHLVKECVSKGWKVLVKPTIETDNGERRRPDLIFHREEKAVVVDVTVRYELMYSSLEEAYNSKVARYEELAPQIKDLTGATSIVFHGLPIGARGAWYPRNTEVLADLDIRSKYFEEFLCRRTMLYTLDVLWKANNEKHLAW

SEQ ID NO: 3305 - protein, 1099 aa, Carcinoscorpius rotundicauda
MTNIPIYDKELMVERVGRTVFVNLPSNNKILACDMCPLEFTGFPKFAVHLANEHNSMAQARCMFCGKDDSHHHAIACHVPKCPYRRFVAFAMQTSSVACEVCGLRFKTKSGVSQHKRHKHPRIRNAERIQMTGVKTPSERPRQVVWSEEEVRTLREMVVVYSGQKNINVLCAEHLPGKTPKQISDKRRDLNKISKPVHFASPTIQSRGDPVDVVQHEELAWEGINIPERSSKFCSYISQLRDQKGLDEATWQEVEIVTKTWVDELAHSQTTWRNERTSTQALKVLNPARRPYKRRFDRVERFKRYQKMFDFERKRLAEEILDGRDAVRCPLSKTQVYDHYDQVYGVANNNVCFDGCPLPPRADNTNLLEPITSSEVSLALRGMKRGAPGPDNITLPFLLYRLKYGIDASLASLFNLWLFTGRIPECMKVNKSVLLPKGSSNLHEVKNWRSITISSIVLRLYSRIMARRLEQAVQINPRQRGFIPQAGCRDNIFLLRSIMRKAKRHGTLAMAFLDLCKAFDTVGHKHLLASLARFHVHPHFIRLVEDMYQGGTTSFRIGIEHTKPIRLCRGVKQGDPMSPILFNIALDSLIRKIEEAGRGISLNMRLDPVSTLAYADDMAVLAKDHASLQEMLNIVNEYCTGNGLSLNISKSAGMLIKGSSKTFTVNNCPPWTVNGEGLPLIGPEDSYRYLGANVCPWTGVYSEPVLPILEKWIDNISRVPLKPHQRVEVLNRFAVPRLLYQLELGASSGKLLKELDNMIKKAVKTWCHLPPCTNDGLLYSRYRDGGLALVKLEMLVPTIKIKTGLRHINSSDETIKHLSQTDNLLENIQGIASKAGLPIPKPEQTSGTYHSNWRDMERKRWEGLALQGHGVSLFKGSRSANHWLPKPVGMKDHHWVKCLALRANVYPTREALCRGNLSTSKEAAKCRGCSAPRETICHLSGQCPKLKSMRIRRHNKICDHLVAECVSKGWKVLKEPTIKASNGERRVPDLIFHREDKAVVVDVTVRYELMYSSLQEAYDFKVARYEELAPQIKELTGATSVVFHGLPMGARGAWYPGNTEVLADLDINSKYFEEFLCRRTVLYTLDMLWKANGESHLAR

SEQ ID NO: 3306 - protein, 1068 aa, Montipora cactus
MCRLLEPANRIMEIISTHPGDYSQRDIDTRIKETPSSKELEEINQAVKLLMERYEVTPTQSPFGFLWLANCVLYSVVCAFLLMKGWKKQGPIKAERSQDRKEKLKRIYDQEAGKIRKQLSIAKAEIERLKENRKITKKGRKNRCQLQKECKTISVAGLVSYMEKKKSELRKLKRGFDRKKKQEVSRVINQQFNTVPGRVFANLSEMLKRDPENERPRYKDPGKRARDDSRMFENIEEASGFWRELWEERGTGNKNVAWLQEVKIAIYEQVPPPTASEWALEVAEAVKVLSKKRNWSAPGPDKITNFWWKHACTLHKGVVESFKEVFKSDEDYPEWFSEGKTSLIPKEGEFLSENQRPITCLNNMYKWFTSCLLAPVDQHLEHYGLMEGQQRGAKSGCFGTMDNLLIDRAVMLDCQRGKRNLSMAWINVRKAYDSVDHDWLCAMTDVHRLPIWLGKVIRKLCASWNTKVVATTRQGRETSRKIRFMRGLPQGDALCPRLFTLCLNPVAWRLRATEGYRLSKPVGVKVTDLLYIDDLKVFAASESKLNRVLKETRGAMQDIGLHWNQKKCSVVHVKRGAQVLDESGMRMDETTTITALGEGKHYKFLGVLENVRQDERLALACAAKEYLRRISIIWSSPLSDCNRVQATNQYALPVLRYLMWTQHWSLSELRGVDRAARKIIVENGGKHPASLTSLLYLPREKGGRGLQSVEHEYKITKIKSLLKLYQNSDQTVGAVREFEEHAMASGHQSLVKEAAKYAEELNITLQLDILNPVCVTTEGKVVTAARAGNLLKKSQEMQLLEIAKEKRWQGKLFRIRWDDDSLSITSCFAWLKGWATCPTYTIAGMYELYEQLLPTKLYTKEKTQTSTDGEVLCRLCGKVAESVAHVLAGCSSLAQTKYLYRHNAALKILFFELLREHELIEEVPPWYSPAMPKPAYQNTTSEAFWDIPIYAEHNEVRANRIDARLVSHERKEVYTIEMSCPWIESRAKKDEEKTLKYGPMMWELKQRYNGYRVEQYNIIIDVLGGYSKHLEKSVRKLIGARARGVLERMQKSVISNTLNIARTFKINT

SEQ ID NO: 3307 - protein, 1068 aa, Montipora efflorescens
MCRLLEPANRIMEIISTHPGDYSQRDIDTRTKETPSPKELEEINQAVKLLMERYEVTPTQNPFGFLWLANCVLYSVVCAFLLMKGWKKQGPIKAERSQDRKEKLKRIYDQEAGKIRKQLSIAKAEIERLKENRKITKKGRKNRCQLQKECKTISVAGLVSYMEKKKSELRKLKRGFDRKKKQEVSRVINQQFNTVPGRVFANLSEMLKRDLENERPRYKDPGKRARDDSRMFENIEEASGFWRELWEERGTGNKNVAWLQEVKIAIYEQVPPPTASEWALEVAEAVKVLSKKRNWSAPGPDKITNFWWKHAGTLHKGVVESFKEVSKSDEDYPEWFSEGKTSLIPKEGEFLSENQRPITCLNNMYKWFTSCLLAPVDQHLEHYGLMEGQQRGAKSGCFGTMDNLLIDRAVMLDCQRGKRNLSMAWIDVRKAYDSVDHDWLCAMTDVHRLPIWLGKVIRKLCASWNTKVVATTRQGRETSRKIRFMKGLPQGDALCLRLFTLCLNPVAWRLRAAEGYRLSKPVGVKVTDLLYIDDLKVFAASKSKLKRVLKETRGAMQDIGLHWNQKKCSVVHVKRGAQVLDKSGMRMDETTTITDLGEGKHYKFLGVLENVRQDERLALACAAKEYLRRISIIWSSPLSDCNRVQATNQYALPVLRYLMWTQHWSLSELRGVDRAARKIIVENGGKHPASLTSLLYLPREKGGRGLQSVEHEYKITKIKSLLKLYQNSDQTVGAVREFEEHAMASGHQSLVKEAAKYAEELNITLQLDILNPVCVTTEGKVVTAARAGNLLKKSQEMQLLEIAKEKRWQGKLFRIRWDDDSLSITTYFAWLKGWATCPTYTIAGMYELYEQLLPTKLYTKEKTQTSTDGEVLCRLCGKVAESVAHVLAGCSSLAQTKYLYRHNATLKILFFELLREHELIEEVPPWYSPAMPKPAYQNTTSEAFWDIPIYAEHNEVRANRIDARLVSHERKEVYTIEKSCPWIESRAKKDEEKTLKYGPMMWELKQRYNGYRVEQYNIIIDVLGGYSKHLEKSVRKLIGERARGVLERMQKSVISNTLNIARTFKINT

SEQ ID NO: 3308 - protein, 1075 aa, Acropora hyacinthus
MLIHGKTSKPNPQPVPGIERKSWLKLLGIIFQENPCCWDLHVNKLIAKASSHLYILRVCKFYGYSQDDNNNNNNKGWKKQRSKTPAGGANKQQEWKRVYEKRVVEVRKKISIAQAELERIKENRKITKKGKRNRAVLEKECKGLSATKLVSFMEKQKAILRKLKRGFSRSQKNEEARILNQQFQTDTSKVYANMRELLNKDKEDERPRYTTSDQNTQADKEMFNNVEEASEYWRNLWESEGTGDRCASWLEEIRSAIQRRVPPPTEEDWDLDPAVAAKVLAKKKNWSAPGPDRLANFWWKRAESLHVGVATAFQEISSIDGEYPLWFSEGKTSLIPKPGEFTSDNQRPITCLHTMYKWYTSCLLVPTDKHLDDYDLMEGAQRGARAGCSGTIDNLLIDRMVTLDCHRKKRNLSMGWVDVKKAYDSIDHGWLEEMMIIHRFPTWLCRTTKYLSRSWSTRIVVTTRNGREASEIIKFRKGLPQGDALCPRLFTVCLNPIAWKISASEGYRLSKPIGTTITDLLYIDDLKIFAASESKLSSVMNSVRAAMEDVGLIWNPKKCAVAHFKRGVRVPESTGLLMSDGNVKIPTLEDGQQYKFLGVLETLRQEEKIVLRCAAREYLRRLSVIWSSPLSDYHRVIASNQFALPAMSYFMWTQHWPITELRQVDRDARKIVTEGGGKHPCGTTSLLYLPRDKGGRGLRSVETEYKETKVKAAVKLYQNRDPAMKMVREFEEQAESKGYQSMTKEAAKYAEEYGLQLQLKHPDPVCVTEEGEVVPGDKLKTRLRKLRESRMEGVVEEQKWQGKLITARKEDGDLNTEQCFWWLNEWRMCPTHTIAGMFEIYEQLLPTRLYAIHKTQASPNSDPTCRLCGTAPESMAHILSACPALAQTKYLARHDAVLKVLFFDIMEDLGLIEASPPWYSPTKPQQVYEGAYAQAYWDVPVFGEYQDLRANRIDARIVNHQEKKVITMEMSYPWVSNRQKKTSEKTMKYAPLRWELKQKYPGYEISQYNIIVDVLGGWSTDVEVAVKELVGRRHKDVLKKMQKACLSATLNIARTFKVATHFFFYLTRASVCLLL

SEQ ID NO: 3309 - protein, 1144 aa, Acropora hyacinthus
MARSEMSSEERSVRCNRSRIKWTKEMNNTLLDCKSKAQALVKSENPPRLENGRKKGYMRATKKLWDEAGFENLALTSQNLRDQAAKLEKSIGDVGYLIAASVGLRTSDEADGSDGSTSEINVCNVQATNFVINQHENADLHTVADETSLEGPGSELSQDTRDLIDSSNLILARVNTLPGEFGEREFDTRIKERPTKRDLDNINQTITEIMKQASPRENPFSYLWIANCVLYSVVVAFLLNKGWKRQRSGTPAGGSSKQQEWKRVYEKRVVEVRKKISIAQAELERIKENRKITKKGKRNRAVLEKECKGLSATKLVSFMEKQKDILRKLKRGFSRSQKNEEARILNQQFQTDTSKVYANMRELLNKDKEDERPRYTTSDQNTQADKEMFNNVEEASEYWRNLWESEGTGDRCASWLEEIRSAIQRRVPPPTEEDWDLDPAVAAKVLAKKKNWSAPGPDRLANFWWKRAESLHVGVATAFQAISSIDGEYPLWFSEGKTSLIPKPGEFTSDNQRPITCLNTMYKWYTSCLLVPTDKHLDDYDLMEGAQRGARAGCSGTIDNLLIDRMVTLDCHRKKRNLSMGWVDVKKAYDSIDHGWLEEMMIIHRFPTWLCRTTKYLSRSWSTRIVVTTRNGREASEIIKFRKGLPQGDALCPRLFTVCLNPIAWKISASEGYRLSKPIGTTITDLLYIDDLKIFAASESKLSSVMNSVRAAMEDVGLIWNPKKCAVAHFKRGVRVPESTGLLMSDGNVKIPTLEDGQQYKFLGVLETLRQEEKIVLRCAAREYLRRLSVIWSSPLSDYHRVIASNQFALPAMSYFMWTQHWPITELRQVDRDARKIVTEGGGKHPCGTTSLLYLPRDKGGRGLRSVETEYKETKVKAAVKLYQNRDPAMKMVREFEEQAESKGYQSMTKEAAKYAEEYGLQLQLKHPDPVCVTEEGEVVPGDKLKTRLRKLRESRMEGVVEEQKWQGKLITARKEDGDLNTEQCFWWLNEWRMCPTHTIAGMFEIYEQLLPTRLYAIHKTQASPNSDPTCRLCGTAPESMAHILSACPALAQTKYLARHDAVLKVLFFDIMEDLGLIEASPPWYSPTKPQPVYEGAYAQAYWDVPVFGEYQDLRANRIDARIVNHQEKKIITMEIITMEMTPG

SEQ ID NO: 3310 - protein, 1227 aa, Acropora intermedia
MASSEMSSEERPVRCNRSRIKWTKEMNNTLLDCKSKAQALVMSENPPRLENGRKKGYMRVMKELWDEAGFENLALHSQNLRDQAARLEKSIGDVGYLIAASVGLRTSDEADGSEGSTSEVNVSNVQATNFVINQHENADLHTVADETSLEGQGSKLSQVTRDLIDSSNLILARVNTLPGEFGEREFDTRIKERPSKRDLDNINQTITEIMKQASPGENPFSYLWFANCVLYSVVVAFLLNKGWKKQRSGTPAGGASKQQERKRVYEKRVVKVRKKISIAQAELERIKENRKITKKGKRNRAVLEKECKGLSATKLVSFMEKQKAILRKLKRGFARSQKNEEARILNLQFQADTSKVYANMRELLNKDKEDERPRYTTSDQNTQEDKEMFNNIEEASEYWRNLWESERTGDRCASWLEEIRSAIQRRVPPPTEEDWDLDPAVAAKVLAKKKNWSAPGPDRLANFWWKRAESLHVGVATAFQAISSIDGEYPLWFSKGKTSLIPKPGEFTSDNQRPITCLNTMYKWYTSCLLVPTDKHLDDYDLMEGAQRGARAGCSGTMDNLLIDRMVTLDCHRKKRNLSMGWVDVKKAYDSIDHGWLEEMMIIHRFPTWLCRTTKYLTRSWSTRIVVTTRNGREASEIIRFRKGLLQGDALCPRLFTVCLNPIAWKISASEGYRLSKPIGTTITDLLYIDDLKIFAASEAKLSSVMNSVRAAMEDVGLIWNPKKCAVAHFKRGVRVPESTGLLMCDGNVKIPTLEDGQQYKFLGVLETLRQEEKIVLRCAAREYLRRFSVIWSSPLSDYHRVIASNQFALPAMSYFMWTQHWPITELRQVDRDARKIVTEGGGKHLCGTTSLLYLPRDKGGRGLCSVETEYKETKVKAAVKLYQNRDPAMKMVREFEEQAESKGYQSMTKEAGKYAEEYGLQLQLKHPDPVCVTEEGEVVPGDKLKSRLRKNRESRMEGVVEEQKWHGKLITARKEDGDLNTEQCFWWLNDWRMCPTHIIAGMFEIYEQLLPTRLYAIHKTQASPNIDPTSRLCGAAPESMAHILSACPALAQTKYLARHDAVLKVLFFDIMEDLGLIEASPPWYSPTKPQPVYEGAYAQAYWDVPVFGEYQDLRANRIDARIVNHQEKKVITMEMSCPWVSNRQKKTSEKTMKYAPLRWELKQKYPGYEISQYNIIVDVLGGWSTDVEVAVKELVGRRHKDVLKKMQRACLSATLNIARTFKVATH

SEQ ID NO: 3311 - protein, 1018 aa, Acropora muricata
MKQASPRENPFSYLWIANCVLYSVVVAFLLNKGWKKQRSGTPAGGASKQQEWKRVCEKRVVEVRKKISIAQAELERIKENRKITKKGKRDRAVLEKECKGLSATKLVSFMEKQKAILRKLKRGFSRSQKNEEARILNQQFQTDTSKVYANMRELLNKDKEDERPRYTTSDQNTQAVKEMFNNVEEASEYWRNLWESEGTGDRCASWLEEIRSAIQRRVPPPTEEDWDLDRAVAAKVLAKKKNWSAPGPDRLANFWWKRAESLHVGVATAFQAISSIDGEYPLWFSEGKTSLIPKPGEFTSDNQRPITCLNTMYKWYTSCLLVPTDKHLDDYDLMEGAQRGARLGCSGTIDNLLIDRMVTLDCHRKKRNLSMGWVDVKKAYDSIDHGWLEEMMIIHRFPTWLCRTTTYLSRSWSTRIVVTTRNGREASEIIKFRKGLPQGDALCPRLFTVCLNPIAWKISASEGYRLSKPIGTTITDLLYIDDLKIFAASESKLSSVMNLVRAAVEDVGLMWNPKKCAVAHFKRGVCVPESTSLLLSDGNVKIPTLEDGQHYKFLGVLETLRQEEKIVLRCAAREYLRRLSVIWSSPLSDYHRVIASNQFALPAMSYFMWTQHWPITELRQVDRDARKIVTEGGGKHPCGTTSLLYLPRDKGGRGLRSVETEYKETKIKAAVKLYQNRDPAMKMVREFEEQAESKGYQSMTKEAAKYAEEYGLQLQLKHPDPVCVTEEGEVVPGDKLKTRLRKLRESRMEGVVEEQKWQGKLITARKEDGDLNTEQCFWWLNEWRMCPTHTITGMFEIYEQLLPTRLYAIHKTQASPNSDPTCRLCGTAPESMAHILSACPALAQTKYLARHDAVLKVLFFDVMEDLGLIEASPAWYSPTKPQPVYEGAYAQAYWDVPVFGEYQDLRANRINARIVNHQEKKVITMEMSCPWVSNRQKKTSEKTMKYAPLRWELKQKYPGYEISQYNIIVDVLGGWSTDVEVAVKELVGRRHKDVLKKMQKACLSATLNIARTFKVATH

SEQ ID NO: 3312 - protein, 1018 aa, Acropora florida
MKQASPGENPFSYLWIANCVLYSVVVAFLLNKGWKKQRSGTPAGGASKQQEWKRVYEKRVVEVRKKISIAQAELERIKENRKITKKGKRNRAVLEKECKGLSATKLVSFMEKQKAILRKLKRGFSRSQKNEEARILNQQFQADTSKVYANMRELLNKDKEDERPRYTTSDQNTQEDKEMFNNVEEASEYWRNLWESEGTGDRCASWLEEIRSAIQRRVPPPTEEDWDLDPAVAAKVLAKKKNWSAPGPDRLANFWWKRAESLHVGVATAFQAISSIDGEYPLWFSEGKTSLIPKPGEFTSDNQRPITCLNTMYKWYTSCLLVPTDKHLDDYDLMEGAQRGARAGCSGTIDNLLIDRMVTLDCHRKKRNLSMGWVDVKKAYDSIDHGWLEEMMIIHRFPTWLCRTTKYLSRSWSTRIVVTTRNGREASEIIKFRKGLPQGDALCPRLFTVCLNPIAWKISASEGYRLSKPIGTTITDLLYIDDLKIFAASESKLSSVMNSVRAAMEDVGLIWNPKKCAVAHFKRGVRVPESTGLLMSDGNVKIPTLEDGQQYKFLGVLETLRQEEKIVLRCAAREYLRRLSVIWSSPLSDYHRVIASNQFALPAMSYFMWTQHWPITELRQVDRDARKIVTEGGGKHPCGTTSLLYLPRDKGGRGLRSVETEYKETKVKAAVKLYQNRDPAMKMVREFEEQAESKGYQSMTKEAAKYAEEYGLQLQLKHPDPVCVTEEGEVVPGDKLKTRLRKLRESRMEGVVEEQKWQGKLITARKEDGDLNTEQCFWWLNEWRMCPTHTIAGMFEIYEQLLPTRLYAIHKTQASPNSDPTCRLCGTAPESMAHILSACPALAQTKYLARHDAVLKVLFFDIMEDLGLIEASPPWYSPTKPQPVYEGAYAQAYWDVPVFGEYQDLRVNRIDARIVNHQEKKVITMEMSCPRVSNRQKKTSEKTMKYAPLRWELKQKYPGYEISQYNIIVDVLGGWSTDVEVAVKELVGRRHKDVLKKMQKACISATLNIARTFKVATH

SEQ ID NO: 3313 - protein, 1227 aa, Acropora yongei
MASSEMSSEERPVRCNRSRIKWTKEMNNTLLDCKSKAQALVKSENPPRLENGRKKGYMRVMKELWDEAGFENLSLSSQNLRDQAAKLEKSIGDVGYLIAASVGLRTSDEADGSEGSTSEVDVCNVQATNFVINQHENADLHTVADETSLEGQGSKLSQDTRDLIDSSNLILARVNTSPGEFGEREFDTRIKERPTKCDLDNINQTITEIMRQASPGENPFSYLWIANCVLYSVVVAFLLNKGWKKQRSGTPAGGASKQQEWKRVYEKRVVEVRKKISIAQAELKRIKENRKITKKGKRNRAVLEKECKGLSATKLVSFMEKQKAILRKLKRGFSRSQKNEEARILNQQFQADTSKVYANMRELLNKDKEDERPRYTTSDQNTQEDKEMFNNVEEATEYWRNLWESEGTGDRCASWLEEIRSAIQRRVPPPTEEDWDLDPAVAAKVLAKKKNWSAPGPDRLANFWWKRAESLHVGVATAFQAISSIDGEYPLWFSEGKTSLIPKSGEFTSDNQRPITCLNTMYKWYTSCLLVPTDKHLDDYDLMEGAQRGARAGCSGTIDNLLIDRMVTLDCHRKKRNLSMGWVDVKKAYDSNDHGWLEEMMIIHRFPTWLCRTTKYLSRSWSTRIVVTTRNGREASEIIKFRKGLPQGDALCPRLFTVCLNPIAWKISASEGYRLSKPIGTTITDLLYIDDLKIFAASESKLSSVMNSVREAMEDVGLRWNPKKCAVAHFKRGVRVPESTGLPMSDGNVKIPTLEDGQQYKFLGVLETLRQEEKTVLRCAAREYLRRLSVVWSSPLSDYHRVIASNQFALPAMSYFMWTQHWPITELRQVDRDARKIITEGGGKHPCGATSLLYLPRGKGGRGLRSVETEYKETKVKAAVKLYQNRDPAMKMVREFEEQAESKGYQSMTKEAGKYAEEYGLQLQLNYPDPVCVTEKGEVLPGDKLKTRLRKLRELRMEGVVEEQKWQGKLLTGRKEDGDLNTDQCFWWLSEWRRCPTHTIAGMFEIYEQLLPTRLYAIHKTQASPTIDPTCRLCGTAPESMAHVLSACPALAQTKYLARHDAVLKVLFFDIIEHLGLIEASPPWYSPTKPQPVYEGAHAQACWDVPVYGEYQDLRANRVDARIVNHQVKKVIAMEMSCPWVSNRQKKTSEKTMKYAPLRWELKQKYPGYEISQYNIIVDVLGGWSTDVEVAVKELVGRRHRDVLKKMQRACLSLTLNIARTFKVATH

SEQ ID NO: 3314 - protein, 1227 aa, Acropora tenuis
MASSEMSSEERPVRCNRSRIKWTKEMNNTLLDCKSKAQALVKSENPPRLENGRKKGYMRVMKELWDEAGFENLALTSQNLRDQAAKLEKSIGDVGYLIAASVGLRTSDEADGSEGSTSEVDVCNVQATNFVINQHENADLHTVADETSLEGQGSKLSQDTRDLIDSSNLILARVNTSPGEFGEREFDTRIKERPTKCDLDNINQTITEIMRQASPGENPFSYLWIANCVLYSVVVAFLLNKGWKKQRSGTPAGGASKQQEWKRVYEKRVVEVRKKISIAQAELERIKENRKITKKGKRNRAVLEKECKGLSATKLVSFMEKQKAILRKLKRGFSRSQKNEEARILNQQFQADTSKVYANMRELLNKDKEDERPRYTTSDQNTQEDKEMFNNVEEASEYWRNLWESEGTGDRCASWLEEIRSAIQRRVPPPTEEDWDLDPAVAAKVLAKKKNWSAPGPDRLANFWWKRAESLHVGVATAFQAISSIDGEYPLWFSEGKTSLIPKPGEFTSDNQRPITCLNTMYKWYTSCLLVPTDKHLDDYDLMEGAQRGARAGCSGTIDNLLIDRMVTLDCHRKKRNLSMGWVDVKKAYDSIDHGWLEEMMIIHRFPTWLCRTTKYLSRSWSTRIVVTTRNGREASEIIKFRKGLPQGDALCPRLFTVCLNPIAWKISASEGYRLSKPIGTTITDLLYIDDLKIFAASESKLSSVMNSVRAAMEDVGLIWNPKKCAVAHFKRGVRVPESTGLPMSDGNVKIPTLEDGQQYKFLGVLETLRQEEKIVLRCAAREYLRRLSVIWSSPLSDYHRVIASNQFALPAMSYFMWTQHWPITELRQVDRDARKIITEGGGKHPCGTTSLLYLPRDKGGRGLRSVETEYKETKVKAAVKLYQNRDPAMKMVREFEEQAESKGYQSMTKEAGKYAEEYGLQLQLNYPDPVCVTEKGEVLPGDKLKTRLRKLRELRMEGVVEEQKWQGKLLTARKEDGDLNTDQCFWWLSEWRRCPTHTIAGMFEIYEQLLPTRLYAIHKTQASPTIDPTCRLCGTAPESMAHVLSACPALAQTKYLARHDAVLKVLFFDIIEHLGLIEASPPWYSPTKPQPVYEGAHAQAYWDVPVYGEYQDLRANRVDARIVNHQEKKVIAMEMSCPWVSNRQKKTSEKTMKYAPLRWELKQKYPGYEISQYNIIVDVLGGWSTDVEVAVKELVGRRHRDVLKKMQRACLSLTLNIARTFKVATH

SEQ ID NO: 3315 - protein, 1230 aa, Montipora capitata
MASSDMSAEERTVRCNRSRIKWTEKMNNILLDCKSKAQALVKSENPPRQENGRKKGYMRVMKELWDEAGFENLALTSQNLRDQAARLEKSIGDVGHVIAASVGLRAGSEEADGSEGSTSEVNVCNVQATNFVINQHENADLHTVADETSLKGPGSELSQDTHDLIDSSNLILARVNTSPGEFGEREFDTRIKERPTKHDLDNINQTIAELMKQNQASPGENPFSYLWIANCVLYSVVVAFLLNKGWKKQRSGTPAGGASKQQKWKRVFEERVVEVRKKISIAQAELERIKENRKITKKGKRNRAVLEKECKGLSAAKLVSFMEKQKAILRKLKRGFSRSQKNEEARVLNQQFQADTSKVYANMREFLNKDKEDERPRYTTSDQNTQEEKEMFNNVEEASEYWRNLWESEGTGDRCASWLEEIRSAIQSRVPPPTEKDWDLDPAVAAKVLAKKKNWSAPGPDRLANFWWKRAESLHVGLATAFQAISSIDGEYPRWFSEGKTSLIPKPGEFTSDNQRPITCLNTMYKWYTSCLLVPTDKHLDDYDLMEGAQRGARAGCSGTMDNLLIDRMVTLDCHRKKRNLSMGWVDVKKAYDSIDHGWLEEMMIIHRFPTWLCRTIRNLSRSWSTRIVVTTRNGREASEIIKFRKGLPQGDALCPRLFTVCLNPIAWKISASEGSRLSKPIGTTVTDLLYIDDLKIFAASESKLSSVMNSVRAAMEDVGLIWNPKKCAVAHFKRGVRVAESTGLLMSDGNVNIPTLEDGQHYKFLGVLESLRQEERIVLRCAAREYLRRLSVIWSSPLSDYHRVIASNQFALPAMSYFMWTQHWPITELRQVDRDARKIITEGGGKHPCGTTSLLYLPRDKGGRGLRSVETEYKETKVKAAVKLYRNRDPAMKMVREFEEQAESKGYQSMTKEAGKYAEEYGLQLQLNHPDPVCVTEEGEVVPGDKLKTRLRKLRESRMEGVVEEQKWQGKLITARKEDGDLNTEQCFWWLSEWRMCPTHTIAGMFEIYEQLLPTRLYAIHKTQASPTSDPTCRLCGTAPESMAHVLSACPALAQTKYLARHDAVLKVLFFDIIEDLGLIEASPPWYSPTKPQPVYEGVHAQAYWDVPVYGEYQDLRANRIDARIVNHQEKKVIAMEMSCPWVSNRQRKTSEKTMKYAPLRWELKQKYPGYEISQYNIIVDVLGGWSTDVEVAVKELVGRRHRDVLKKMQRACLSATLNIARTFKVAIH

SEQ ID NO: 3316 - protein, 1227 aa, Acropora echinata
MASSEMSSEERPVRCNRSRIKWTKEMNNTLLDCKSKAQALVKSENPPRLENGRKKGYMRVMKELWDEAGFENLALTSQNLRDQAAKLEKSIGDVGYLIATSVGLRTSDEADGSEGSTSEVNVCNVQATNFIINQHENADLHTVADETSLEGPGNELSQDTRDLIDSSNLILARVNTLPGEFDEREFDTRIKERPTKRDLDNINQTITEIMKQASPRENPFSYLWIANCVLYSVVVAFLLNKGWKKQRSGTPAGGASKQQEWKRVYEKRVVEVRKKISIAQAELERIKENRKITKKGKRNRAVLEKECKGLSATKLVSFMEKQKAILRKLKRGFSRSQKNEEARILNQQFQTDTSKVYANMRELLNKDKEDERPRYTTSDQNTQADKEMFNNVEEASEYWRNLWESEGTGDRCASWLEEIRSAIQRRVPPPTEEDWDLDPAVAAKVLAKKKNWSAPGPDRLANFWWKRAESLHVGVATAFQAISSIDGEYPLWFSEGKTSLIPKPGEFTSDNQRPITCLNTMYKWYTSCLLVPTDKHLDDYDLMEGAQRGARAGCSGTIDNLLIDRMVTLDCHRKKRNLSMGWVDVKKAYDSIDHGWLEEMMIIHRFPTWLCRTTKYLSRSWSTRIVVTTRNGREASEIIKFRKGLPQGDALCPRLFTVCLNPIAWKISASEGYRLSKPIGTTITDLLYIDDLKIFAASESKLSSVMNSVRAAMEDVGLIWNPKKCAVAHFKRGVRVPESTGLLMSDGNVKIPTLEDGQQYKFLGVLETLRQEEKIVLRCAAREYLRRLSVIWSSPLSDYHRVIASNQFALPAMSYFMWTQHWPITELRQVDRDARKIVTEGGGKHPCGTTSLLYLPRDKGGRGLRSVETEYKETKVKAAVKLYQNRDPAMKMVREFEEQAESKGYQSMTKEAAKYAEEYGLQLQLKHPDPVCVTEEGEVVPGDKLKTRLRKLRESRMEGVVEEQKWQGKLITARKEDGDLNTEQCFWWLNEWRMCPTHTIAGMFEIYEQLLPTRLYAIHKTQASPNSDPTCRLCGTAPESMAHILSACPALAQTKYLARHDAVLKVLFFDIMEDLGLIEASPPWYSPTKPQPVYEGAYAQAYWDVPVFGEYQDLRANRIDARIVNHQEKKVITMEMSCPWVSNRQKKTSEKTMKYAPLRWELKQKYPGYEISQYNIIVDVLGGWSTDVEVAVKELVGRRHKDVLKKMQKACLSATLNIARTFKVATH

SEQ ID NO: 3317 - protein, 868 aa, Astreopora myriophthalma
MRELLNKDKEDERPRYTASDQNTQEEKEMFNNVEEASDYWRNLWESEGTGDRCASWLEEIRSAIQSRVPPPTEESWDLDPAVAAKVLAKKKNWSAPGPDRLTNFWWKRAKSLHVGVAIAFQAISSIDEEYPLWFSEGKTSLIPKPGEFTSDNQRPITCLNTLYKWYTSCLLVPTDKHLDDYDLMEGAQRGARAGCSGTMDNLLIDRMVTLDCHRNKRNLSMGWVDGKKAYDSIDHGWLEEMMIIHRFPTWLCRTTKNLSRSWSTRIVVTTRNGREVSEIIKFRKGLPQGDALCPRLFTVCLNPIAWKISASEGYRLSKPIGTTVTDLLYIDDLKIFAASESKLSSVMNPVREAMEDVGLIWNPKKCAVAHFKRGVRVAESTGLLMSDGNVKIPTLEDGQQYKFLGVLESLRQEERIVLRCAAREYLRRLSVIWSSPLSDYHRVIASNQFALPAMSYFMWTQHWPVTELRQVDRDARKIVTEGGGKHPSGTTSLLYLPRDKGGRGLRSVETEYKETKVKAAVKLYQNRDPAMKMVREFEEQAESKGYQSMTKEAGKYAEEYGLQLQLNYPDPVCVTEEGEVVPGDKLKTRLRKLRESRREGEVEEQKWQGKLITARKEDGDLNTEQCFWWLSEWRTCPTHTIAGMFEIYEQLLPTRLYAINKTQVSPTSDPTCRLCGTAPESMAHVLSACPALAQTKYLARHDAVLKVLFFDIIEDLGLIEASPPWYSPTKPQPLYEGAHAQAYWDVPVYGEYQDLRANRIDARIVNHQEKKVIAMEMSCPWVSNRQKKTSEKTMKYAPLRWELKQKYPGYEISQYNIIVDVLGGWSTDVEVAVKELVGRRHRDVLKKMQRACLSITLNIARTFKVAIH

SEQ ID NO: 3318 - protein, 909 aa, Acropora millepora
MEKQKAILRKLKRGFSRSQKNEEARILNQQFQTDTSKVYANMRELLNKDKEDERPRYTTSDQNTQAVKEMFNNVEEASEYWRNLWESEGTGYRIAAWLEEIRSAIQRRVPPPTEEDWDLNPAVAAKVLAKKKNWSAPGPDRLANFWWKRAESLHVGVATAFQAISSIDGEYPLWFSEGKTSLIPKPGEFTSDNQRPITCLNTMYKWYTSCLLVPTDKHLDDYDLMEGAQRGARAGCSGTIDNLLIDRMVTLDCHRKKRNLSMGWVDVKKAYDSIDHGWLEEMMIIHRFPTWLCRTTKYLSRSWSTRIVVTTRNGREASEIIKFRKGRPQGDALCPRLFTVCLNPIAWKISASEGYRLSKPIGTTITDLLYIDDLKIFAASESKLSSVMNSVRAAMEDVGLIWNPKKCAVAHFKRGVRVPESTGLLMSDGNVKIPTLEDGQQYKFLGVLETLRQEEKIVLRCAAREYLRRLSVIWSSPLSDYHRVIASNQFALPAMSYFMWTQHWPITELRQVDRDARKIVTEGGGKHPCGTTSLLYLPRDKRGRGLRSVETEYKETKVKAAVKLYQNRDPAMKMVREFEEQAESKGYQSMTKEAAKYAEEYGLQLQLKHPDPVCVTEEGEVVPGDKLKTRLRKLRESRMEGVVEEQKWQGKLITARKEDGDLNTEQCFWWLNEWRMCPTHTIAGMFEIYEQLLPTRLYAIHKTQASPNSDPTCRLCGTAPESMAHILSACPALAQTKYLARHDAVLKVLFFDIMEDLGLIEASPPWYSPTKPQPVYEGAYAQAYWDVPVFGEYQDLRANRIDARIVNHQEKKVITMEMSCPWVSNRQKKTSEKTMKYAPLRWELKQKYPGYEISQYNIIVDVLGGWSTDVEVAVKELVGRRHKDVLKKMQKACLSATLNIARTFKVATH

SEQ ID NO: 3319 - protein, 1227 aa, Acropora muricata
MASSEMSSEERPVRCNRSRIKWTKEMNNTLLDCKSKAQALVKSENPPRLENGRKKGYMRVMKELWDEAGFENLALTSQNLRDQAAKLEKSIGDVGYLIATSVGFRTSDEADGSEGSTSEVNVCNVQATNFIINQHENADLHTVADETSLEGPGSELSQDTRDLIDSSNLILARVNTLPGEFDEREFDTRIKERPTKRDLDNINQTITEIMKQASPRENPFSYLWIANCVLYSVVVAFLLNKGWKKQRSGTPAGGASKQQEWKRVYEKRVVEVRKKISIAQAELERIKENRKITKKGKRNRAVLEKECKGLSATKLVSFMEKQKAILRKLKRGFSRSQKNEEARILNQQFQTDTSKVYANMRELLNKDKEDERPRYTTSDQNTQADKEMFNNVEEASEYWRNLWESEGTGDRCASWLEEIRSAIQRRVPPPTEEDWDLDPAVAAKVLAKKKNWSAPGPDRLANFWWKRAESLHVGVATAFQAISSIDGEYPLWFSEGKTSLIPKPGEFTSDNQRPITCLNTMYKWYTSCLLVPTDKHLDDYDLMEGAQRGARAGCSGTIDNLLIDRMVTLDCHRKKRNLSMGWVDVKKAYDSIDHGWLEEMMIIHRFPTWLCRTTKYLSRSWSTRIVVTTRNGREASEIIKFRKGLPQGDALCPRLFTVCLNPIAWKISASEGYRLSKPIGTTITDLLYIDDLKIFAASESKLSSVMNSVRAAMEDVGLIWNPKKCAVAHFKRGVRVPESTGLLMSDGNVKIPTLEDGQQYKFLGVLETLRQEEKIVLRCAAREYLRRLSVIWSSPLSDYHRVIASNQFALPAMSYFMWTQHWPITELRQVDRDARKIVTEGGGKHPCGTTSLLYLPRDKGGRGLRSVETEYKETKVKAAVKLYQNRDPAMKMVREFEEQAESKGYQSMTKEAAKYAEEYGLQLQLKHPDPVCVTEEGEVVPGDKLKTRLRKLRESRMEGVVEEQKWQGKLITARKEDGDLNTEQCFWWLNEWRMCPTHTIAGMFEIYEQLLPTRLYAIHKTQASPNSDPTCRLCGTAPESMAHILSACPALAQTKYLARHDAVLKVLFFDIMEDLGLIEASPPWYSPTKPQPVYEGAYAQAYWDVPVFGEYQDLRANRIDARIVNHQEKKVITMEMSCPWVSNRQKKTSEKTMKYAPLRWELKQKYPGYEISQYNIIVDVLGGWSTDVEVAVKELVGRRHKDVLKKMQKACLSATLNIARTFKVATH

SEQ ID NO: 3320 - protein, 1227 aa, Acropora hyacinthus
MASSEMSSEERPVRCNRTRIKWTKEMNNTLLDCKSKAQALVKSENPPRLENGRKKGYMRVMKELWDEAGFENLALTSQNLRDQAAKLEKSIGDVGYLIATSVGLRTSDEADGSEGSTSEVNVCNVQATNFTINQHENADLHTVADETSLEGPGSELSQDTRDLIDSSNLILARVNTLPGEFDEREFDTRIKERPTKRDLDNINQTITEIVKQASPRENPFSYLWIANCVLYSVVVAFLLNKGWKKQRSGTPAGGASKQQEWKRVYEKRVVEVRKKISIAQAELERIKENRKITKKGKRNRAVLEKECKGLSATKLVSFMEKQKAILRKLKRGFSRSQKNEEARILNQQFQTDTSKVYANMRELLNKDKEDERPRYTTSDQNTQADKEMFNNVEEASEYWRNLWESEGTGDRCASWLEEIRSAIQRRVPPPTEEDWDLDPAVAAKVLAKKKNWSAPGPDRLANFWWKRAESLHVGVATAFQAISSIDGEYPLWFSEGKTSLIPKPGEFTSDNQRPITCLNTMYKWYTSCLLVPTDKHLDDYDLMEGAQRGARAGCSGTIDNLLIDRMVTLDCHRKKRNLSMGWVDVKKAYDSIDHGWLEEMMIIHRFPTWLCRTTKYLSRSWSTRIVVTTRNGREASEIIKFRKGLPQGDALCPRLFTVCLNPIAWKISASEGYRLSKPIGTTITDLLYIDDLKIFAASESKLSSVMNSVRAAMEDVGLIWNPKKCAVAHFKRGVRVPESTGLLMSDGNVKIPTLEDGQQYKFLGVLETLRQEEKIVLRCAAREYLRRLSVIWSSPLSDYHRVIASNQFALPAMSYFMWTQHWPITELRQVDRDARKIVTEGGGKHPCGTTSLLYLPRDKGGRGLRSVETEYKETKVKAAVKLYQNRDPAMKMVREFEEQAESKGYQSMTKEAAKYAEEYGLQLQLKHPDPVCVTEEGEVVPGDKLKTRLRKLRESRMEGVVEEQKWQGKLITARKEDGDLNTEQCFWWLNEWRMCPTHTIAGMFEIYEQLLPTRLYAIHKTQASPNSDPTCRLCGTAPESMAHILSACPALAQTKYLARHDAVLKVLFFDIMEDLGLIEASPPWYSPTKPQPVYEGAYAQAYWDVPVFGEYQDLRANRIDARIVNHQEKKVITMEMSCPWVSNRQKKTSEKTMKYAPLRWELKQKYPGYEISQYNIIVDVLGGWSTDVEVAVKELVGRRHKDVLKNMQKACLSATLNVARTFKVATH

SEQ ID NO: 3321 - protein, 1162 aa, Acropora muricata
MGRRFENLALTSQNLRDQAAKLEKSIGDVGYLIAASVGLRTSDEADGSEGSTSEVNVCNVQATNFVINQHENADLHTVADETSLEGPGSELSQDTRDLIDSSNLILARVNTLPGEFGEREFDTRIKERPTKRDLDNINQTITEIMKQASPRENPFSYLWIANCVLYSVVVAFLLNKGWKKQRSGTPAGGASKQQEWKRVYEKRVVEVRKKISIAQAELERIKENRKITKKGKRNRAVLEKECKGLSATKLVSFMEKQKAILRKLKRGFSRSQKNEEARILNQQFQTDTSKVYANMRELLNKDKEDERPRYTTSDQNTQADKEMFNNVEEASEYWRNLWESEGTGDRCASWLEEIRSAIQRRVPPPTEEDWDLDPAVAAKVLAKKKNWSAPGPDRLANFWWKRAESLHVGVATAFQAISSIDGEYPLWFSEGKTSLIPKPGEFTSDNQRPITCLNTMYKWYTSCLLVPTDKHLDDYDLMEGAQRGARAGCSGTIDNLLIDRMVTLDCHRKKRNLSMGWVDVKKAYDSIDHGWLEEMMIIHRFPTWLCRTTKYLSRSWSTRIVVTTRNGREASEIIKFRKGLPQGDALCPRLFTVCLNPIAWKISASEGYRLSKPIGTTITDLLYIDDLKIFAASESKLSSVMNSVRAAMEDVGLIWNPKKCAVAHFKRGVRVPESTGLLMSDGNVKIPTLEDGQQYKFLGVLETLRQEEKIVLRCAAREYLRRLSVIWSSPLSDYHRVIASNQFALPAMSYFKWTQHRPITELRQVDRDARKIVTEGGGKHPCGTTSLLYLPRDKGGRGLRSVETEYKETKVKAAVKLYQNRDPAMKMVREFEEQAESKGYQSMTKEAAKYAEEYGLQLQLKHPDPVCVTEEGEVVPGDKLKTRLRKLRESRMEGVVEEQKWQGKLITARKEDGDLNTEQCFWWLNEWRMCPTHTIAGMFEIYEQLLPTRLYAIHKTQASPNSDPTCRLCGTAPESMAHILSACPALAQTKYLARHDAVLKVLFFDVMEDLGLIEASPPWYSPTKPQPVYEGAYAQAYWDVPVFGEYQDLRANRIDARIVNHQEKKVITMEMSCPWVSNRQKKTSEKTMKYAPLRWELKQKYPGYEISQYNIIVDVLGGWSTDVEVAVKELVGRRHKDVLKKMQKACLSATLNIARTFKVATH

SEQ ID NO: 3322 - protein, 1227 aa, Acropora echinata
MASSEMSSEERPVRCNRSKIKWTKEMNNTLLDYKSKAQALVKSENPPRLENGRKKGYMRVMKKLWDEAGFENLALTSQNLRDQAAKLEKSIGDVGYLIAASVGLRTSDEADGSEGSTSEVNVCNVQATNFVINQHENADLHTVADETSLEGPGSELSQDTRDLIDSSNLILARVNTLPGEFDEREFDTRIKERPTKRDLDNINQTITEIMKQASPRENPFSYLWIANCVLYSVVVAFLLNKGWKKQRSGTPAGGASKQQEWKRVYEKRVVEVRKKISIAQAELERIKENRKITKKGKRNRAVLEKECKGLSATKLVSFMEKQKAILRKLKRGFSRSQKNEEARILNQQFQTDTCKVYANMRELLNKDKEDERPRYTTSDQNTQADKEMFNNVEEASEYWRNLWESEGTGDRCASWLEEIRSAIQRRVPPPTEEDWDLDPAVAAKVLAKKKNWSAPGPDRLANFWWKRAESLHVGVATAFQAISSIDGEYPLWFSEGKTSLIPKPGEFTSDNQRPITCLNTMYKWYTSCLLVPTDKHLDDYDLMEGAQRGARAGCSGTIDNLLIDRMVTLDCHRKKRNLSMGWVDVKKAYDSIDHGWLEEMMIIHRFPTWLCRTTKYLSRSWSTRIVVTTRNGREASEIIKFRKGLPQGDALCPRLFTVCLNPIAWKISASEGYRLSKPIGTTITDLLYIDDLKIFAASESKLSSVMNSVRAAMEDVGLIWNPKKCAVAHFKRGVRVPESTGLLMSDGNVKIPTLEDGQQYKFLGVLETLRQEEKIVLRCAAREYLRRLSVIWSSPLSDYHRVIASNQFALPAMSYFMWTQHWPITELRQVDRDARKIVTEGGGKHPCGTTSLLYLPRDKGGRGLRSVETEYKETKVKAAVKLYQNRDPAMKMVREFEEQAESKGYQSMTKEAAKYAEEYGLQLQLKHPDPVCVTEEGEVVPGDKLKTRLRKLRESRMEGVVEEQKWQGKLITARKEDGDLNTEQCFWWLNEWRMCPTHTIAGMFEIYEQLLPTRLYAIHKTQASPNSDPTCRLCGTAPESMAHILSACPALAQTKYLARHDAVLKVLFFDIMEDLGLIEASPPWYSPTKPQPVYEGAYAQAYWDVPVFGEYQDLRANRIDARIVNHQEKKVITMEMSCPWVSNRQKKTSEKTMKYAPLRWELKQKYPGYEISQYNIIVDVLGGWSTDVEVAVKELVGRRHKDVLKKMQKACLSATLNIARTFKVATH

SEQ ID NO: 3323 - protein, 1227 aa, Acropora hyacinthus
MASSEMSSEERPVRCNRSRIKWTKEMNNTLLDCKSKAQALVKSENPPRLENGRKKGYMRVMKELWDEAGFENLALTSQNLRDQAAKLEKSIGDVGYLIATSVGFRTSDEADGSEGSTSEVNVCNVQATNFIINQHENADLHTVADETSLEGPGSELNQDTRDLIDSSNLILARVNTLPGEFDEREFDTRIKERPTKRDLDNINQTVTEIMKQASPRENPFSYLWIANCVLYSVVVAFLLNKGWKKQRSGTPAGGASKQQEWKIVYEKRVVEVRKKISIAQAELERIKENRKITKKGKRNRAVLEKECKGLSATKLVSFMEKQKAILRKLKRGFSRSQKSEEARILNQQFQTDTSKVYANMRELLNKDKEDERPRYTTSDQNTQADKEMFNNVEEASEYWRNLWESEGTGDRCASWLEEIRSAIQRRVPPPTEEDWDLDPAVAAKVLAKKKNWSAPGPDRLANFWWKRAESLHVGVATAFQAISSIDGEYPLWFSEGKTSLIPKPGEFTSDNQRPITCLNTMYKWYTSCLLVPTDKHLDDYDLMEGAQRGARAGCSGTIDNLLIDRMVTLDCHRKKRNLSMGWVDVKKAYDSIDHGWLEEMMIIHRFPTWLCRTTKYLSRSWSTRIVVTTRNGREASEIIKFRKGLPQGDALCPRLFTVCLNPIAWKISASEGYRLSKPIGTTITDLLYIDDLKIFAASESKLSSVMNSVRAAMEDVGLIWNPKKCAVAHFKRGVRVPESTGLLMSDGNVKIPTLEDGQQYKFLGVLETLRQEEKIVLRCAAREYLRRLSVIWSSPLSDYHRVIASNQFALPAMSYFMWTQHWPITELRQVDRDARKIVTEGGGKHPCGTTSLLYLPRDKGGRGLRSVETEYKETKVKAAVKLYQNRDPAMKMVREFEEQAESKGYQSMTKEAAKYAEEYGLQLQLKHPDPVCVTEEGEVVPGDKLKTRLRKLRESRMEGVVEEQKWQGKLITARKEDGDLNTEQCFWWLNEWRMCPTHTIAGMFEIYEQLLPTRLYAIHKTQASPNSDPTCRLCGTAPESMAHILSACPALAQTKYLARHDAVLKVLFFDIMEDLGLIEASPPWYSPTKPQPVYEGAYAEAYWDVPVFGEYQDLRANRIDARIVNHQEKKVITMEMSCPWVSNRQKKTSEKTMKYAPLRWELKQKFPGYEISQYNIIVDVLGGWSTDVEVAVKELVGRRHKDVLRKMQKACLSATLNIARTFKVATH

SEQ ID NO: 3324 - protein, 909 aa, Montipora capitata
MEKQKAILRKLKRGFSSSQKNEEARVLNQQFQADTSKVYANMREFLNKDKEDERPRYTTSDQNTQERKEMFNNVEEASEYWRNLWESEGTGDRCASWLEEIRSAIQSRVPPPTEKDWDLDPAVAAKVPAKKKNWSAPGPDRLANFWWKRAESLHVGLASAFQAISSIDGEYPLWFSEGKTSLIPKPGEFTSDNQRPITCLNTMYKWYTSCLLVPTDKHLDDYDLMEGAQRGARAGCSGTMDNLLIDRMVTLDCHRKKRNLSMGWVDVKKAYDSIDHGWLEEMMIIHRFPTWLCRTIRNLSRSWSTRIVVTTRNGREASEIIKFRKGLPQGDALCPRLFTVCLNPIAWKISASEGYRLSKPIGTTVTDLLYIDDLKIFAASESKLSSVMNSVRAAMEDVGLIWNPKKCAVAHFKRGVRVAESTGLLMSDGNVNIPTLEDGQHYKFLGVLESLRQEERIVLRCAAREYLRRLSVIWSSPLSDYHRVIASNQFALPAMSYFMWTQHWPITELRQVDRDARKIITEGGGKHPCGTTSLLYLPRDKGGRGLRSVETEYKETKVTAAVKLYRNRDPAMKMVREFEEQAESKGYQSMTKEAGKYAEEYGLQLQLNHPDPVCVTEEGEVVPGDKLKTRLRKLRESRMEGVVEEQKWQGKLITARKEDGDLNTEQCFWWLSEWRMCPTHTIAGMFEIYEQLLPTRLYAIHKTQASPTSDPTCRLCGTAPESMAHVLSACPALAQTKYLARHDAVLKVLFFDIIEDLGLIEASPPWYSPTKPQPVYEGAHAQAYWDVPVYGEYQDLRANRIDARIVNHQEKKVIAMEMSCPWVSNRQRKTSEKTMKYAPLRWELKQEYPGYEISQYNIIVDVLGGWSTDVEVAVKELVGRRHRDVLKKMQRACLSATLNIARTFKVAIH

SEQ ID NO: 3325 - protein, 1058 aa, Pachyseris speciosa
MKQNRASPGENPFSYLWLANCVLYSVVVAFLLNKGWKKQRSGTSAGGASKQQKWKRVYEERVTEVRKKLSIAQAELERIKENRKITKKGKRNRAVLEKECKGLSAAKLVSFMEKQKVILRKLKRGFSRSQKNEEAKECKGLSAAKLVSFMEKQKVILRKLKRGFSRSQKNEEARVLNQQFQADTSKVYAKMREMLNKEKEDERPRYTTSDQNTQDEREMFNNVEEASEYWRNLWESEGTGDRCASWLEEVRSAIQSRLPPPTAEDWDLDPAALARVLAKKKNWSAPGPDRLANFWWKRADSLHVGVATAFQTISSIDGEYPQWFSEGKTSLIPKPGEFTSDNQRPITCLNTMYKWYTSCLLVPTDKHLDNYDLMEGAQRGARAGCSGTMDNLLIDRMVTLDCHRKKRNLSMGWVDVKKAYDSIDHVWLEEMMIIHRFPTWLCRTIKNLSRSWSTRIVATTRHGREASEIIKFRKGLPQGDALCPRLFTVCLNPIAWKISASEVYRLSKPIGTTVTDLLYIDDLKIFAASESKLSSVMNSVRAAMEDVGLIWNPKKCAVSHFKRGVRVAESTGLLMSDGNVKIPTLEDGQQYKFLGVLESLRQEERIVLRCAAREYLRRLSVIWSSPLSDYHRVIASNQFALPAMSYFMWTQHWPVTELRQVDRDARKIVTEGGGKHPCGSTSLLYLPHDKGGRGLRSVETEYKETKVKAAVKLYQNRDPAMKVMREFEEQAESKGYQSMTKEAGKYAEEYGLQLQLNHPDPVCVTEEGEVVPGDKLKTCLRKLRESRMEGLVEEQKWQGKLITARKEDGDLNTEQCFWWLSEWRTCTTHTIAGMFEIYEQLLPTRLYAIHKTQANPTSDPTCRLCGTAPESMAHVLSACPALAQTKYLARHDAVLKVLFFDIIEDLGLIEASPPWYSPTKPQPVYEGAHAQAYWDVPVYGEYQDLRANRIDARIVSHQEKKVIAMEMSCPWVSNRQKKTSEKTMKYAPLRWELKQKYPGYEISQYNIIVDVLGGWSTDVEVAVKELVGRRHRDVLKKMQRACLAVTLNIARTFKVATH

SEQ ID NO: 3326 - protein, 1227 aa, Acropora cytherea
MASSEMSSEERPVRCNRSRIKWTKEMNNTLLDCKSKAQALVKSENPPRLENGRKKGYMRVMKELWDEAGFENLALTSQNLRDQAAKLEKSIGDVGYLIATSVGFRTSDEADGSEGSTSEVNVCNVQATNFIINQHENADLHTVADETSLEGPGSELNQDTRDLIDSSNLILARVNTLPGEFDEREFDTRIKERPTKRDLDNINQTITEIMKQASPRENPFSYLWIANCVLYSVVVAFLLNKGWKKQRSGTPAGGASKQQEWKRVYEKRVVEVRKKISIAQAELERIKENRKITKKGKRNRAVLEKECKGLSATKLVSFMEKQKAILRKLKRGFSRSQKNEEARILNQQFQTDTSKVYANMRELLNKDKEDERPRYTTSDQNTQADKEMFNNVEEASEYWRNLWESEGTGDRCASWLEEIRSAIQRRVPPPTEEDWDLDPAVAAKVLAKKKNWSAPGPDRLANFWWKRAESLHVGVATAFQAISSIDGEYPLWFSEGKTSLIPKPGEFTSDNQRPITCLNTMYKWYTSCLLVPTDKHLDDYDLMEGAQRGARAGCSGTIDNLLIDRMVTLDCHRKKRNLSMGWVDVKKAYDSIDHGWLEEMMIIHRFPTWLCRTTKYLSRSWSTRIVVTTRNGREASEIIKFRKGLPQGDALCPRLFTVCLNPIAWKISASEGYRLSKPIGTTITDLLYIDDLKIFAASESKLSSVMNSVRAAMEDVGLIWNPKKCAVAHFKRGVRVPESTGLLMSDGNVKIPTLEDGQQYKFLGVLETLRQEEKIVLRCAAREYLRRLSVIWSSPLSDYHRVIASNQFALPAMSYFMWTQHWPITELRQVDRDARKIVTEGGGKHPCGTTSLLYLPRDKGGRGLRSVETEYKETKVKAAVKLYQNRDPAMKMVREFEEQAESKGYQSMTKEAAKYAEEYGLQLQLKHPDPVCVTEEGEVVPGDKLKTRLRKLRESRMEGVVEEQKWQGKLITARKEDGDLNTEQCFWWLNEWRMCPTHTIAGMFEIYEQLLPTRLYAIHKTQASPNSDPTCRLCGTAPESMAHILSACPALAQTKYLARHDAVLKVLFFDIMEDLGLIEASPPWYSPTKPQPVYEGAYAQAYWDVPVFGEYQDLRANRIDARIVNHQEKKVITMEMSCPWVSNRQKKTSEKTMKYAPLRWELKQKYPGYEISQYNIIVDVLGGWSTDVEVAVKELVGRRHKDVLKKMQKACLSATLNIARTFKVATH

SEQ ID NO: 3327 - protein, 1230 aa, Montipora efflorescens
MASSDMSAEERTVRCNRSRIKWTEKMNNILLDCKSKAQALVKSENPPRQENGRKKGYMRVMKELWDEAGFENLALTSQNLRDQAARLEKSIGDVGHVIAASVGLRAGSEDADGSEGSTSEVNVCNVQATNFVINQHENADLHTVADETSLEGPGSELSQDTHDLIDSSNLILARVNTSPGEFGEREFDTRIKERPTKHDLDNINQTIAELMKQNQASPGENPFSYLWIANCVLYSVVVAFLLNKGWKKQRSGTPAGGASKQQKWKRVFEERVVEVRKKISIAQAELERIKENRKITKKGKRNRAVLEKECKGLSAAKLVSFMEKQKAILRKLKRGFSRSQKNEEARVLNQQFQADTSKVYANMREFLNKDKEDERPRYTTSYQNTQEEKEMFNNVEEASEYWRNLWESEGTGDRCASWLEEIRSAIQSRVPPPTEEDWDLDPAVAAKVLAKKKNWSAPGPDRLANFWWKRAESLHVGLATAFQAISSIDGEYPLWFSEGKTSLISKPGEFTSDNQRPITCLNTMYKWYTSCLLVPTDKHLDDYDLMEGAQRGARAGCSGTMDNLLIDRMVTLDCHRKKRNLSMGWVDVKKAYDSIDHGWLEEMMIIHRFPTWLCRTIRNLSRSWSTRIVVTTRNGREASEIIKFRKGLPQGDALCPRLFTVCLNPIAWKISASEGYRLSKPIGSTVTDLLYIDDLKIFAASESKLSSVMNSVRAAMEDVGLIWNPKKCAVAHFKRGVRVAESTGLLMSDGNVNIPTLEDGQHYKFLGVLESLRQEERIVLRCAAREYLRRLSVIWSSPLSDYHRVIASNQFALPAMSYFMWTQHWPITELRQVDRDARKIITEGGGKHPCGTTSLLYLPRDKGGRGLRSVETEYKETKVKAAVKLYRNRDPAMKMVREFEEQAESKGYQSMTKEAGKYAEEYGLQLQLNHPDPVCVTEEGEVVPGDKLKTRLRKLRESRMEGVVEEQKWQGKLITARKEDGDLNTEQCFWWLSEWRMCPTHTIAGMFEIYEQLLPTRLYAIHKTQASPTSDPTCRLCGTAPESMAHVLSACPALAQTKYLARHDAVLKVLFFDIIEDLGLIEASPPWYSPTKPQPVYEGAHAQAYWDVPVYGEYQDLRANRIDARIVNHQEKKVIAMEMSCPWVSNRQRKTSEKTMKYAPLRWELKQKYPGYEISQYNIIVDVLGGWSTDVEVAVKELVGRRHRDVLKKMQRACLSATLNIARTFKVAIH

SEQ ID NO: 3328 - protein, 1227 aa, Acropora millepora
MASSEMSSEERPVRCNRSRIKWTKEMNNTLLDCKSKAQAWVKSENPPRLENGRKKGYMRVMKELWDEAGFENLALTSQNLRDQAAKLEKSIGDVGYLIAASVGLRTSDEADGSEGSTSEVNVCNVQATNFVINQHENADLHTVADETSLEGPGSERSQDTRDLIDSSNLILPRVNTLPGEFGEREFDTRIKERPTKRDLDNINQTITEIMKQASPRENPFSYLWIANCVLYSVVVAFLLNKGWKKQRSGTPAGGASKQQEWKRVYEKRVVEVRKKISIAQAELERIKENRKITKKGKRNRAVLEKECKGLSATKLVSFMEKQKAILRKLKRGFSRSQKNEEARILNQQFQTDTSKVYANMREMLNKDKEDERPRYTTSDQNTQTDKEMFNNVEEASEYWRNLGESEGAGDRCASWLEEIRSAIQRRVPPPTEEDWDLDPAVAAKVLAKKKNWSAPGPDRLANFWWKRAESLHVGVATAFQAISSIDGEYPLWFSEGKTSLIPKPGEFTSDNQRPITCLNTMYKWYTSCLLVPTDKHLDDYDLMEGAQRGARAGCSGTIDNLLIDRMVTLDCHRKKRNLSMGWVDVKKAYDSIDHGWLEEMMIIHRFPTWLCRTTKYLSRSWSTRIVVTTRNGREASEIIKFRKGLPQGDALCPRLFTVCLNPIAWKISASEGYRLSKPIGTTITDLLYIDDLKIFAASESKLSSVMNSVRAAMEDVGLIWNPKKCAVAHFKRGVRVPESTGLLMSDGNVKIPTLEDGQQYKFLGVLETLRQEEKIVLRCAAREYLRRLSVIWSSPLSDYHRVIASNQFALPAMSYFMWTQHWPITELRQVDRDARKIVTEGGGKHPCGTTSLLYLPRDKGGRGLRSVETEYKETKVKAAVKLYQNRDPAMKMVREFEEQAESKGYQSMTKEAGKYAEEYGLQLQLKHPDPVCVTEEGEVVPGDKLKTRLRKLRESRMEGVVEEQKWQGKLITARKEDGDLNTEQCFWWLNEWRMCPTHTIAGMFEIYEQLLPTRLYAIHKTQASPNSDPTCRLCGTAPESMAHILSACPALAQTKYLARHDAVLKVLFFDIMEDLGLIEASPPWYSPTKPQPVYEGAYAQAYWDVPVFGEYQDLRANRIDARIVNHQEKKVITMEMSCPWVSNRQKKTSEKTMKYAPLRWELKQKYPGYEISQYNIIVDVLGGWSTDVEVAVKELVGRRHKDVLKKMQKACLSATLNIARTFKVATH

SEQ ID NO: 3329 - protein, 1227 aa, Acropora intermedia
MVSSEMSSEERPVRCNRSRLKWTKEMNNTLLDCKSKAQALVKSENPPRLENGRKKGYMRVMKELWDEAGFENLALTSQNLRDRAAKLEKSIGDVGYLIAASVGLRTSDEADGSEGSTSEVNVCNVQATNFVINQHENADLHTVADETSLEGPGSELSQDTRDLIDSSNLILARVNTLPGEFDEREFDTRIKERPTKRDLDNINQTITEIMKQASPRENPFSYLWIANCVLYSVVVAFLLNKGWKKQRSGTPAGGASKQQEWKRVYEKPVVEVRKKISIAQAELERIKENRKITKKGKRNRAVLEKECKGLSATKLVSFMEKQKAILRKLKRGFSRSQKNEEARILNQQFQTDTSKVYANMRELLNKDKEDERPRYTASDQNTQADKEMFNNVEEASEYWRNLWESEGTGDRCASWLEEIRSAIQRRVPPPTEEDWDLDPAVAAKVLAKKKNWSAPGPDRLANFWWKRAESLHVGVATAFQTISSIDGEYPLWFSEGKTSLIPKPGEFTSDNQRPITCLNTMYKWYTSCLLVPTDKHLDDYDLMEGAQRGARAGCSGTIDNLLIDRMVTLDCHRKKRNLSMGWVDVKKAYDSIDHGWLEEMMIIHRFPTWLCRTTKYLSRSWSTRIVVTTRNGREASEIIKFRKGLPQGDALCPRLFTVCLNPIAWKISASEGYRLSKPIGTTITDLLYIDDLKIFAASESKLSSVMNSVRAAMEDVGLIWNPKKCAVAHFKRGVRVPESTGLLMSDGNVKIPTLEDGQQYKFLGVLETLRQEEKIVLRCAAREYLRRLSVIWSSPLSDYHRVIASNQFALPAMSYFMWTQHWPITELRQVDRDARKIVTEGGGKHPCGTTSLLYLPRDKGGRGLRSVETEYKETKVKAAVKLYQNRDPAMKMVREFEEQAESKGYQSMTKEAAKYAEEYGLQLQLKHPDPVCVTEEGEVVPGDKLKTRLRKLRESRMEGVVEEQKWQGKLITARKEDGDLNTEQCFWWLNEWRMCPTHTIAGMFEIYEQLLPTRLYAIHKTQASPNSDPTCRLCGTAPESMAHILSACPALAQTKYLARHDAVLKVLFFDIMEDLGLIEASPPWYSPTKPQPVYEGAYAQAYWDVPVFGEYQDLRANRIDARIVNHQEKKVITMEMSCPWVSNRQKKTSEKTMKYAPLRWELKQKYPGYEISQYNIIVDVLGGWSTDVEVAVKELVGRRHKDVLKKMQKACLSATLNIARTFKVATH

SEQ ID NO: 3330 - protein, 971 aa, Acropora cytherea
MIIIIVLIIIIIIKIIYNNISIGKAELERIKENRKITKKGKRNRAVLEKECKGLSATKLVSFMEKQKAILRKLKRGFSRSQKNEEARILNQQFQTDTSKVYANMRELLNKDKEDERPRYTTSDQNTQADKEMFNNVEEASEYWRNLWESEGTGDICVSWLEEIRSAIQRRVPPPAEEDWGLDPAVAAKVLAKKKNWSAPGPDRLANFWWKRAESLHVGVATAFQAISSIDGEYPLWFSEGKTSLIPKLGEFTSDNQRPITCLNTMYKWYTSCLLVPTDKHLDDYDLMEDAQRGARAGCSGTIDNLLIDRMVTLDCHRKKRNLSMGWVDVKKAYDSIDHGWLEEMMIIHRFPTWLCRTTKYLSRSWSTRIVVTTRNGREASEIIKFRKGLPQGDALCPRLFTVCLNPIAWKISASEGYRLSKPIGTTITDLLYIDDLNIFAASESKLSSVMNTVRAAMEDVGLIWSPKKCAVAHFKRGVRVPESTGLLMSDGNVKIPTLEDGQQYKFLGVLETLRQEEKIVLRCAAREYLRRLSVIWSSPLSDYHRVIASNQFALPVMSYFMWTQHWPITELRQVDRDARKIVTEGGGKHPCGTTSLLYLPRGKGGRGLRSVETEYKETKVKAAVKLYQNRDLAMKMVREFEEQAESKGYQSMTKEAAKYAEEYGLQLELKHPDPVCVTEEGEVVPGDKLKTRLRKLRKSRMEWVVEEQKWQGKLITARKEDGDLNTEQCFWWLNEWRMCPTHTIAGMFEIYEQLLPTRLYTIHKTQASPNSDPTCRLCGTAPESMAHILSACPALAQTKYLARHDAVLKVLFFDIMEDLGLIEASPPWYSPTKPQPVYEGVYAQAYWDVPVFGEYHDLRANRIDARIVNHQEKKVITMEMSCPWVSNRQKKTSEKTMKYAPLRWELKQKYPGYEISQYNIILDVLGGWSTDVEVAVKEQVGRRHKDVLKKMQKACLSSTLNIARTFKVATH

SEQ ID NO: 3331 - protein, 1018 aa, Acropora cytherea
MKQASPRENPFSYLWIANCVLYSVVVAFLLNKGWKKQRSGTPAGGASKQQEWKRVYEKRVVEVRKKISIAQAELERIKENRKITKKGKRNRAVLEKECKGLSATKLVSFMEKQKAILRKLKRGFSRSQKNEEARILNQQFQTDTSKVYANMRELLNKDKEDERPRYTTSDQNTQADKEMFNNVEEASEYWRNLWESEGTGDRCASWLEEIRSAIQRRVPPPTEEDWDLDPAVAAKVLAKKKNWSAPGPDRLANFWWKRAESLHVGVATAFQAISSIDGEYPLWFSEGKTSLIPKPGEFTSDNQRPITCLNTMYKWYTSCLLVPTDKHLDDYDLMEGAQRGARAGCSGTIDNLLIDRMVTLDCHRKKRNLSMGWVDVKKAYDSIDHGWLEEMMIIHRFPTWLCRTTKYLSRSWSTRIVVTTRNGREASEIIKFRKGLPQGDALCPRLFTVCLNPIAWKISASEGYRLSKPIGTTITDLLYIDDLKIFAASESKLSSVMNSVRAAMEDVGLIWNPKKCAVAHFKRGVRVPESTGLLMSDGNVKIPTLEDGQQYKFLGVLETLRQEEKIVLRCAAREYLRRLSVIWSSPLSDYHRVIASNQFALPAMSYFMWTQHWPITELRQVDRDARKIVTEGGGKHPCGTTSLLYLPRDKGGRGLRSVETEYKETKVKAAVKLYQNRDPAMKMVREFEEQAESKGYQSMTKEAAKYAEEYGLQLQLKHPDPVCVTEEGEVVPGDKLKTRLRKLRESRMEGVVEEQKWQGKLITARKEDGDLNTEQCFWWLNEWRMCPTHTIAGMFEIYEQLLPTRLYAIHKTQASPNSDPTCRLCGTAPESMAHILSACPALAQTKYLARHDAVLKVLFFDIMEDLGLIEASPPWYSPTKPQPVYEGAYAQAYWDVPVFGEYQDLRANRIDARIVNHQEKKVITMEMSCPWVSNRQKKTSEKTMKYAPLRWELKQKYPGYEISQYNIIVDVLGGWSTDVEVAVKELVGRRHKDVLKKMQKACLSATLNIARTFKVATH

SEQ ID NO: 3332 - protein, 1167 aa, Acropora cytherea
MKELWDEAGFENLALTSQNLRDQAAKLEKSIGDVGYLIATSVGLRTSDEADGSEGSTSEVNVCNVQATNFTINQHENADLHTVADETSLEGPGSELSQDTRDLIDSSNLILARVNTLPGESDEREFDTRIKERPTKRDLDNINQTITEIMKQASPRENPFSYLWIANCVLYSVVVAFLLNKGWKKQRSGTPAGGASKQQEWKRVYEKRVVEVRKKISIAQAELERIKENRKITKKGKRNRAVLEKECKGLSATKLVSFMEKQKAILRKLKRGFSRSQKNEEARILNQQFQTDTSKVYANMRELLNKDKEDERPRYTTSDQNTQADKEMFNNVEEASEYWRNLWESEGTGDRCASWLEEIRSAIQRRVPPPTEEDWDLDPAVAAKVLAKKKNWSAPGPDRLANFWWKRAESLHVGVATAFQAISSIDGEYPLWFSEGKTSLIPKPGEFTSDNQRPITCLNTMYKWYTSCLLVPTDKHLDDYDLMEGAQRGARAGCSGTIDNLLIDRMVTLDCHRKKRNLSMGWVDVKKAYDSIDHGWLEEMMIIHRFPTWLCRTTKYLSRSWSTRIVVTTRNGREASEIIKFRKGLPQGDALCPRLFTVCLNPIAWKISASEGYRLSKPIGTTITDLLYIDDLKIFAASESKLSSVMNSVRAAMEDVGLIWNPKKCAVAHFKRGVRVPESTGLLMSDGNVKIPTLEDGQQYKFLGVLETLRQEEKIVLRCAAREYLRRLSVIWSSPLSDYHRVIASNQFALPAMSYFMWTQHWPITELRQVDRDARKIVTEGGGKHPCGTTSLLYLPRDKGGRGLRSVETEYKETKVKAAVKLYQNRDPAMKMVREFEEQAESKGYQSMTKEAAKYAEEYGLQLQLKHPDPVCVTEEGEVVPGDKLKTRLRKLRESRMEGVVEEQKWQGKLITARKEDGDLNTEQCFWWLNEWRMCPTHTIAGMFEIYEQLLPTRLYAIHKTQASPNSDPTCRLCGTAPESMAHILSACPALAQTKYLARHDAVLKVLFFDIMEDLGLIEASPPWYSPTKPQPVYEGAYAQAYWDVPVFGEYQDLRANRIDARIVNHQEKKVITMEMSCPWVSNRQKKTSEKTMKYAPLRWELKQKYPGYEISQYNIIVDVLGGWSTDVEVAVKELVGRRHKDVLKKMQKACLSATLNIARTFKVATH

SEQ ID NO: 3333 - protein, 1227 aa, Acropora intermedia
MASSEMSSEERPVRCNRSRIKWTKEMNNTLLDCKSKAQALVKSENPPRLENGRKKGYMRVMKELWDEAGFENLALTSQNLRDQAAKLEKSIGDVGYLIAASVGLRTSDEADGSEGSTSEVNVCNVQATNFVINQHENADLHTVADETSLEGPGSELSQDTRDLIDSSNLILARVNTLPGEFDEREFDTRIKERPTKRDLDNINQTITEIMKQASPRENPFSYLWIANCVLYSVVVAFLLNKGWKKQRSGTPAGGASKQLEWKRVYEKRVVEVRKKISIAQAELERIKENRKITKKGKRNRAVLEKECKGLSATKLVSFMEKQKAILRKLKRGFSRSQKNEEARILNQQFQTDTSKVYANMRELLNKDKEDERPRYTASDQNTQADKEMFNNVEEASEYWRNLWESEGTGDRCASWLEEIRSAIQRRVPPPTEEDWDLDPAVAAKVLAKKKNWSAPGPDRLANFWWKRAESLHVGVATAFQTISSIDGEYPLWFSEGKTSLIPKPGEFTSDNQRPITCLNTMYKWYTSCLLVPTDKHLDDYDLMEGAQRGARAGCSGTIDNLLIDRMVTLDCHRKKRNLSMGWVDVKKAYDSIDHGWLEEMMIIHRFPTWLCRTTKYLSRSWSTRIVVTTRNGREASEIIKFRKGLPQGDALCPRLFTVCLNPIAWKISASEGYRLSKPIGTTITDLLYIDDLKIFAASESKLSSVMNSVRAAMEDVGLIWNPKKCAVAHFKRGVRVPESTGLLMSDGNVKIPTLEDGQQYKFLGVLETLRQEEKIVLRCAAREYLRRLSVIWSSPLSDYHRVIASNQFALPAMSYFMWTQHWPITELRQVDRDARKIVTEGGGKHPCGTTSLLYLPRDKGGRGLRSVETEYKETKVKAAVKLYQNRDPAMKMVREFEEQAESKGYQSMTKEAAKYAEEYGLQLQLKHPDPVCVTEEGEVVPGDKLKTRLRKLRESRMEGVVEEQKWQGKLITARKEDGDLNTEQCFWWLNEWRMCPTHTIAGMFEIYEQLLPTRLYAIHKTQASPNSDPTCRLCGTAPESMAHILSACPALAQTKYLARHDAVLKVLFFDIMEDLGLIEASPPWYSPTKPQPVYEGAYAQAYWDVPVFGEYQDLRANRIDARIVNHQEKKVITMEMSCPWVSNRQKKTSEKTMKYAPLRWELKQKYPGYEISQYNIIVDVLGGWSTDVEVAVKELVGRRHKDVLKKMQKACLSATLNIARTFKVATH

SEQ ID NO: 3334 - protein, 1110 aa, Acropora florida
MASSEMSSEERPVRCNRSRIKWTKEMNNTLLDCKSKAQALVKSENPPRLENGRKKGYMRVMKELWDEAGFENLALTSQNLRDQAAKLEKSIGDVGYLIAASVGLRTSDEADGSEGSTSEVNVCNVQATNFVINQHENADLHTVADETSLEGPGSELSQDTRDLIDSSNLILARVNTLPGEFDEREFDTRIKERPTKRDLDNINQTITEIMKQASPRENPFSYLWIANCVLYSVVVAFLLNKGWKKQRSGTPAGGASKQQEWKRVYEKRVVEVRKKISIAQAELERIKENRKITKKGKRNRAVLEKECKGLSATKLVSFMEKQKAILRKLKRGFSRSQKNEEARILNQQFQADTSKVYANMRELLNKDKEDERPRYTASDQNTQADKEMFNNVEEASEYWRNLWESEGTGDRCASWLEEIRSAIQRRVPPPTEEDWDLDPAVAAKVLAKKKNWSAPGPDRLANFWWKRAESLHVGVATAFQTISSIDGEYPLWFSEGKTSLIPKPGEFTSDNQRPITCLNTMYKWYTSCLLVPTDKHLDDYDLMEGAQRGARAGCSGTIDNLLIDRMVTLDCHRKKRNLSMGWVDVKKAYDSIDHGWLEEMMIIHRFPTWLCRTTKYLSRSWSTRIVVTTRNGREASEIIKFRKGLPQGDALCPRLFTVCLNPIAWKISASEGYRLSKPIGTTITDLLYIDDLKIFAASESKLSSVMNSVRAAMEDVGLIWNPKKCAVAHFKRGVRVPESTGLLMSDGNVKIPTLEDGQQYKFLGVLETLRQEEKIVLRCAAREYLRRLSVIWSSPLSDYHRVIASNQFALPAMSYFMWTQHWPITELRQVDRDARKIVTEGGGKHPCGTTSLLYLPRDKGGRGLRSVETEYKETKVKAAVKLYQNRDPAMKMVREFEEQAESKGYQSMTKEAAKYAEEYGLQLQLKHPDPVCVTEEGEVVPGDKLKTRLRKLRESRMEGVVEEQKWQGKLITARKEDGDLNTEQCFWWLNEWRMCPTHTIAGMFEIYEQLLPTRLYAIHKTQASPNSDPTCRLCGTAPESMAHILSACPALAQTKYLARHDAVLKVLFFDIMEDLGLEASPPWYSPTKPQPVYEGAYAQAYWDVPVFGEY

SEQ ID NO: 3335 - protein, 894 aa, Acropora florida
MPKKETFFWLIIIIIIIIIMIIIIINMRELLNKDKEDERPRYTASDQNTQADKEMFNNEEEASEYWRNLWESEGTGDRCASWLEETRSAIQRRVPPPTEEDWDLDPAVAAKVLAKKKNWSAPGPDRLANFWWKRAETLHVGVATAFQTISSIDGEYPLWFSEGKTSLIPNIGEFIRDNQRPITCLNTMYKWYTSCLLVPTDKHLDDYDLMEGAQRGARAGCSGTIDNLLIDRMVTLDCHRKKRNLSMGWVDVKKAYDSIDHGWLEEMMIIHRFPTWLCRTTKYLSRSWSTRIVVTTRNGREASEIIKFRKGLPQGDALCPRLFTVCLNPIAWKISASEGYRLSKPIGTTITDLLYIDDLKIFAASESKLSSVMNSVRAAMEDVGLIWNPKKCAVAHFKRGVRVPESTGLLMSDGNVKIPTLEDGQQYKFLGVLETLRQEEKIVLRCAAREYLRRLSVIWSSPLSDYHRVIASNQFALPAMSYFMWTQHWPITELRQVDRDARKIVTEGGGKHPCGTTSLLYLPRDKGGRGLRSVETEYKETKVKAAVKLYQNRDPAMKMVREFEEQAESKGYQSMTKEAAKYAEEYGLQLQLKHPDPVCVTEEGEVVPGDKLKTRLRKLRESRMEGVVEEQKWQGKLITARKEDGDLNTEQCFWWLNEWRMCPTHTIAGMFEIYEQLLPTRLYAIHKTQASPNSDPTCRLCGTAPESMAHILSACPALAQTKYLARHDAVLKVLFFDIMEDLGLIEASPPWYSPTKPQPVYEGAYAQAYWDVPVFGEYQDLRANRIDARIVNHQEKKVITMEMSCPWVSNRQKKTSEKTMKYAPLRWELKQKYPGYEISQYNIIVDVLGGWSTDVEVAVKELVGRRHKDVLKKMQKACLSATLNIARTFKVATH

SEQ ID NO: 3336 - protein, 1018 aa, Acropora acuminata
MKQASPRENPFSYLWIANCVLYSVVVAFLLNKGWKKQRSGTPAGGASKQQEWKRVYEKRVVEVRKKISIAQAELERIKENRKITKKGKRNRAVLEKECKGLSAIKLVSFMEKQKAILRKLKRGFSRSQKNEEARILNQQFQTDTSKVYANMRELLNKDKEDERPRYTTSDQNTQADKEMFNNVEEASEYWRNLWESEGTGDRRASWLEEIRSAIQRRVCPPTEEDWDLDPAVAAKVLAKKKNWSAPGPDRLANFWWKRAESLHVGVATAFQANSSIDGEYPLWFSEGKTSLIPKPGEFTSDNQRPITCLNTIYKWYTSCLLVPTDKHLDDYDLMEGAQRGARAGCSGTIDNLLIDRMVTLDCHRKKRNLSMGWVDVKKAYDSIDHGWLEEMMIIHRFPTWLCRTTKYLSRSWSTRIVVTTRNGREASEIIKFRKGLPQGDALCPRLFTVCLNPIAWKISASEGYRLSKPIGTTITDLPYIDDLKIFAASESKLSSVMNSVRAAMEDVGLIWNPKKCAVAHLRRGVRVPESTGLLMSDGNVKIPTLEDGQQYKFLDVLETLRQEEKIVLRCAAREYLRRLSVIWSSPLSDYHRVIASNQFALPAMSYFMWTQHWPLTELRQVDRDARKIVTEGGGKHPCGTASLLYLPRDKGGRGLRSVETEYKETKVKAAVKLYQNRDPAMKMVREFEEQAESKGYQSMTKEAAKYAEEYGLQLQLKHPDPVCVTEEGEVVPGDKLKTRLRKLRESRMEGVVEEQKWQGKLITARKEDGDLNTEQCFCWLNEWRMCPTHTIAGMFEIYEQLLPTRLYAIHKTQASPNSDPTCRLCGTAPESMAHILSACPALAQTKYLARHDAVLKVLFFDIMEDLGLIEASPLWYSPTKPQPVYEGAYAQAYWDVSVFGEYQDLRANRIDARIVNHQEKKVITMEMSCPWVSNRQKKTSEKTMKYAPLRWELKQKYPGYEISQYNITVDVLGGWSTDVEVAVKELVGRLHKDVLKKMQKACLSATLNIARTFKVATH

SEQ ID NO: 3337 - protein, 1167 aa, Acropora intermedia
MKELWDEAGFENLALTSQNLRDQAAKLEKSIGDVGYLIAASVGLRTSDEADGSEGSTSEVNVCNVQATNFVINQHENANLHTVADETSLEGPGSELSQDTRDLIDSSNLILARVNTLPGEFDEREFDTRIKERPTKRDLDNINQTITEIMKQASPRENPFSYLWIANCVLYSVVVAFLLNKGWKKQRSGTPAGGASKQQEWKRVYEKRVVEVRKKISIAQAELERIKENRKITKKGKRNRAVLEKECKGLSATKLVSFMEKQKAILRKLKRGFSRSQKNEEARILNQQFQTDTSKVYANMRELLNKDKEDERPRYTASDQNTQADKEMFNNVEEASEYWRNLWESEGTGDRCASWLEEIRSAIQRRVPPPTEEDWDLDPAVAAKVLAKKKNWSAPGPDRLANFWWKRAESLHVGVATAFQTISSIDGEYPLWFSEGKTSLIPKPGEFTSDNQRPITCLNTMYKWYTSCLLVPTDKHLDDYDLMEGAQRGARAGCSGTIDNLLIDRMVTLDCHRKKRNLSMGWVDVKKAYDSIDHGWLEEMMIIHRFPTWMCRTTKYLSRSWSTRIVVTTRNGREASEIIKFRKGLPQGDALCPRLFTVCLNPIAWKISASEGYRLSKPIGTTITDLLYIDDLKIFAASESKLSSVMNSVRAAMEDVGLIWNPKKCAVAHFKRGVRVPESTGLLMSDGNVKIPTLEDGQQYKFLGVLETLRQEEKIVLRCAAREYLRRLSVIWSSPLSDYHRVIASNQFALPAMSYFMWTQHWPITELRQVDRDARKIVTEGGGKHPCGTTSLLYLPRDKGGRGLRSVETEYKETKVKAAVKLYQNRDPAMKMVREFEEQAESKGYQSMTKEAAKYAEEYGLQLQLKHPDPVCVTEEGEVVPGDKLKTRLRKLRESRMEGVVEEQKWQGKLITARKEDGDLNTEQCFWWLNEWRMCPTHTIAGMFEIYEQLLPTRLYAIHKTQASPNSDPTCRLCGTAPESMAHILSACPALAQTKYLARHDAVLKVLFFDIMEDLGLIEASPPWYSPTKPQPVYEGAYAQAYWDVPVFGEYQDLRANRIDARIVNHQEKKVITMEMSCPWVSNRQKKTSEKTMKYAPLRWELKQKYPGYEISQYNIIVDVLGGWSTDVEVAVKELVGRRHKDVLKKMQKACLSATLNIARTFKVATH

SEQ ID NO: 3338 - protein, 1069 aa, Acropora intermedia
MICDLIDSSNLIHARVNTLPGEFDEREFDTRIKERPTKRDLDNINQTITEIMKQASPRENPFSYLWIANCVLYSVVVAFLLNKGWKKQRSGTPAGGASKQQEWKRVYEKRVVEVRKKISIAQAELERIKENRKITKKGKRNRAVLEKECKGLSATKLVSFMEKQKAILRKLKRGFSRSQKNEEARILNQQFQTDTSKVYANMRELLNKDKEDERPRYTTSDQNTQADKEMFNNVEEASEYWRNLWESEGTGDRCASWLEEIRSAIQRRVPPPTEEDWDLDPAVAAKVLAKKKNWSAPGPDRLANFWWKRAESLHVGVATAFQTISSIDGEYPLWFSEGKTSLIPKPGEFTSDNQRPITCLNTMYKWYTSCLLVPTDKHLDDYDLMEGAQRGARAGCSGTIDNLLIDRMVTLDCHRKKRNLSMGWVDVKKAYDSIDHGWLEEMMIIHRFPTWLCRTTKYLSRSWSTRIVVTTRNGREASEIIKFRKGLPQGDALCPRLFTVCLNPIAWKISASEGYRLSKPIGTTITDLLYIDDLKIFAASESKLSSVMNSVRAAMEDVGLIWNPKKCAVAHFKRGVRVPESTGLLMSDGNVKIPTLEDGQQYKFLGVLETLRQEEKIVLRCAAREYLRRLSVIWSSPLSDYHRVIASNQFALPAMSYFMWTQHWPITELRQVDRDARKIVTEGGGKHPCGTTSLLYLPRDKGGRGLRSVETEYKETKVKAAVKLYQNRDPAMKMVREFEEQAESKGYQSMTKEAAKYAEEYGLQLQLKHPDPVCVTEEGEVVPGDKLKTRLRKLRESRMEGVVEEQKWQGKLITARKEDGDLNTEQCFWWLNEWRMCPTHTIAGMFEIYEQLLPTRLYAIHKTQASPNSDPTCRLCGTAPESMAHILSACPALAQTKYLARHDAVLKVLFFDIMEDLGLIEASPPWYSPTKPQPVYEGAYAQAYWDVPVFGEYQDLRANRIDARIVNHQEKKVITMEMSCPWVSNRQKKTSEKTMKYAPLRWELKQKYPGYEISQYNIIVDVLGGWSTDVEVAVKELVGRRHKDVLKKMQKACLSATLNIARTFKVATH

SEQ ID NO: 3339 - protein, 1269 aa, Acropora florida
MPMSFIISKNNNSNNNNNNNNNNNNNNNNNRSRIKWTKEMNNTLLDCKSKAQALVKSKNRSRIKWTKEMNNTLLDCKSKAQALVKSENPPRLENGRKKGYMRVMKELWDEAGFENLALTSQNLRDQAARLEKSIGDVGYLIAASVGLRTSDEADGSEGSTSEVNVCNVQATNFVINQHENADLHTVADETSLEGPGSELSQDTRDLIDSSNLILARVNTLPGEFDEREFDTRIKERPTKRDLDNINQTITEIMKQASPRENPFSYLWIANCVLYSVVVAFLLNKGWKKQRSGTPAGGASKQQEWKRVYEKRVVEVRKKISIAQAELERIKENRKITKKGKRNRAVLEKECKGLSATKLVSFMEKQKAILRKLKRGFSRSQKNEEARILNQQFQADTSKVYANMRELLNKDKEDERPRYTASDQNTQADKEMFNNVEEASEYWRNLWESEGTGDRCASWLEEIRSAIQRRVPPPTEEDWDLDPAVAAKVLAKKKNWSAPGPDRLANFWWKRAESLHVGVATAFQTISSIDGEYPLWFSEGKTSLIPKPGEFTSDNQRPITCLNTMYKWYTSCLLVPTDKHLDDYDLMEGAQRGARAGCSGTIDNLLIDRMVTLDCHRKKRNLSMGWVDVKKAYDSIDHGWLEEMMIIHRFPTWLCRTTKYLSRSWSTRIVVTTRNGREASEIIKFRKGLPQGDALCPRLFTVCLNPIAWKISASEGYRLSKPIGTTITDLLYIDDLKIFAASESKLSSVMNSVRAAMEDVGLIWNPKKCAVAHFKRGVRVPESTGLLMSDGNVKIPTLEDGQQYKFLGVLETLRQEEKIVLRCAAREYLRRLSVIWSSPLSDYHRVIASNQFALPAMSYFMWTQHWPITELRQVDRDARKIVTEGGGKHPCGTTSLLYLPRDKGARGLRSVETEYKETKVKAAAKLYQNRDPVMKMVREFEEQAESKGYQSMTKEAGKYAEEYGLQLQLKHPDPVCVTEEGEVVPGDKLKTRLRKLRESRMEGAVEEQKWQGKLITARKEDGDLNTEQCFWWLNDWRMCPTHTIAGMFEIYEQLLPTRLYAIHKTQASPNSDPTCRLCGTAPESMAHILSACPALAQTKYLAWHDAVLKVLFFDIMEDLGLIEASPPWYSLTKPQPVYEGVYAQAYWDVPVFGEYQDLRANRIDARIVNHKEKKVIMMEMSCPWVSNRQKKTSEKTMKYAPLRNRKQKYPGYEISQYNIIVDVLGGWSTDVEVAVKELVGKRHKDVLKKMQRACLSATLNIARTFKVATH

SEQ ID NO: 3340 - protein, 1173 aa, Montipora capitata
MRVMKELWDEAGFENLALTSQNLRDQAARLEKSIGDVGHVIAASVGLRAGSEDADGSEGSTSEVNVCNVQATNFVINQHENADLHTVADETSLKGPGSELSQDTHDLIDSSNIILARVNTSPGEFGEREFDTRIKERPTKHDLDNINQTIAELMKQNQASPGENPFSYLWIANCVLYSVVVAFLLNKGWKKQRSGTPAGGASKQQKWKRAFEERVVEVRKKISIAQAELERIKENRKITKKGKRNRAVLEKECKGLSAAKLVSFMEKQKAILRKLKRGFSRSQKNEEARVLNQQFQADTSKVYANMREFLNKDKEDERPRYTTSDQNTQEEKEMFNNVEEASEYWRNLWESEGTGDRCASWLEEIRSAIQSRVPPPTEKDWDLDPAVAAKVLAKKKNWSAPGPDRLANFWWKRAESLHVGLATAFQAISSIDGEYPLWFSEGKTSLIPKPGEFTSDNQRPITCLNTMYKWYTSCLLVPTDKHLDDYDLMEGAQRGARAGCSGTMDNLLIDRMVTLDCHRKKRNLSMGWVDVKKAYDSIDHGWLEEMMIIHRFPTWLCRTIRNLSRSWSTRIVVTTRNGREASEIIKFRKGLPQGDALCPRLFTVCLNPIAWKISASEGYRLSKPIGTTVTDLLYIDDLKIFAASESKLSSVMNSVRATMEDVGLIWNPKKCAVAHFKRGVRVAESTGLLMSDGNVNIPTLEDGQHYKFLGVLESLRQEERIVLRCAAREYLRRLSVIWSSPLSDYHRVIASNQFALPAMSYFMWTQHWPITELRQVDRDARKIITEGGGKHPCGTTSLLYLPRDKGGRGLRSVETEYKETKVKAAVKLYRNRDPAMKMVREFEEQAESKGYQSMTKEAGKYAEEYGLQLQLNHPDPVCVTEEGEVVPGDKLKTRLRKLRESRMEGVVEEQKWQGKLITARKEDGDLNTEQCFWWLSEWRMCPTHTIAGMFEIYEQLLPTRLYAIHKTQASPTSDPTCRLCGTAPESMAHVLSACPALAQTKYLARHDAVLKVLFFDIIEDLGLIEASPPWYSPTKPQPVYEGVHAQAYWDVPVYGEYQDLRANRIDARIVNHQEKKVIAMEMSCPWVSNRQRKTSEKTMKYAPLRWELKQKYPGYEISQYNIIVDVLGGWSTDVEVAVKELVGRRHRDVLKKMQRACLSATLNIARTFKVAIH

SEQ ID NO: 3341 - protein, 1227 aa, Acropora florida
MASSEMSSEERPVRCNRSRIKWTKEMNNTLLDCKSKAQALVKSENPPRLENGRKKGYMRVMKELWDEAGFENLALTSQNLRDQAAKLEKSIGDVGYLIAASVGLRTSDEADGSEGSTSEVNVCNVQATNFVINQHENADLHTVADETSLEGPGSELSQDTRDLIDSSNLILARVNTLPGEFDEREFDTRIKERPTKRDLDNINQTITEIMKQASPRENPFSYLWIANCVLYSVVVAFLLNKGWKKQRSGTPAGGASKQQEWKRVYEKRVVEVRKKISIAQAELERIKENRKITKKGKRNRAVLEKECKGLSATKLVSFMEKQKAILRKLKRGFSRSQKNEEARILNQQFQADTSKVYANMRELLNKDKEDERPRYTASDQNTQADKEMFNNVEEASEYWRNLWESEGTGDRCASWLEEIRSAIQRRVPPPTEEDWDLDPAVAAKVLAKKKNWSAPGPDRLANFWWKRAESLHVGVATAFQTISSIDGEYPLWFSEGKTSLIPKPGEFTSDNQRPITCLNTMYKWYTSCLLVPTDKHLDDYDLMEGAQRGARAGCSGTIDNLLIDRMVTLDCHRKKRNLSMGWVDVKKAYDSIDHGWLEEMMIIHRFPTWLCRTTKYLSRSWSTRIVVTTRNGREASEIIKFRKGLPQGDALCPRLFTVCLNPIAWKISASEGYRLSKPIGTTITDLLYIDDLKIFAASESKLSSVMNSVRAAMEDVGLIWNPKKCAVAHFKRGVRVPESTGLLMSDGNVKIPTLEDGQQYKFLGVLETLRQEEKIVLRCAAREYLRRLSVIWSSPLSDYHRVIASNQFALPAMSYFMWTQHWPITELRQVDRDARKIVTEGGGKHPCGTTSLLYLPRDKGGRGLRSVETEYKETKVKAAVKLYQNRDPAMKMVREFEEQAESKGYQSMTKEAAKYAEEYGLQLQLKHPDPVCVTEEGEVVPGDKLKTRLRKLRESRMEGVVEEQKWQGKLITARKEDGDLNTEQCFWWLNEWRMCPTHTIAGMFEIYEQLLPTRLYAIHKTQASPNSDPTCRLCGTAPESMAHILSACPALAQTKYLARHDAVLKVLFFDIMEDLGLIEASPPWYSPTKPQPVYEGAYAQAYWDVPVFGEYQDLRANRIDARIVNHQEKKVITMEMSCPWVSNRQKKTSEKTMKYAPLRWELKQKYPGYEISQYNIIVDVLGGWSTDVEVAVKELVGRRHKDVLKKMQKACLSATLNIARTFKVATH

SEQ ID NO: 3342 - protein, 1227 aa, Acropora hyacinthus
MASSEMSSEERPVRCNRSRIKWTKEMNNTLLDCKSKAQALVKSENPPRLENGRKKGYMRVMKELWDEAGFENLALTSQNLRDQAAKLEKSIGDVGYLIAASVGLRTSDEADGSEGSTSEVNVCNVQATNFVINQHENADLHTVADETSLEGPVSELSQDTRDLIDSSNLILARVNTLPGEFGEREFDTRLKERLTKRDLDNINQTITEIMKQASPRENPFSYLWIANCVLYSVVVAFLLNKGWKKQRSGTPAGGASKQQEWKRVYEKRVVEVRKKISIAQAELERIKENRKITKKGKRNRAVLEKECKGLSATKLVSFMEKQKAILRKLKRGFSRSQKNEEAKILNQQFQTDTSKVYANMRELLNKDKEDERPRYTTSDQNTQADKEMFNNVEEASEYWRNLWESEGTGDRCASWLEEIRSAIQRRVPPPTEEDWDLDPAVAAKVLSKKKNWSAPGPDRLANFWWKRAESLHVGVATAFQAISSIDGEYPLWFSEGKTSLIPKPGEFTSDNQRPITCLNTMYKWYTSCLLVPTDKHLDDYDLMEGAQRGARTGCSGTIDNLLIDRMVTLDCHRKKRNLSMGWVDVKKAYDSIDHGWLEEMMIIHRFPTWLCRTTKYLSRSWSTRIVVTTRNGREASEIIKFRKGLPQGDALCPRLFTVCLNPIAWKISASEGYRLSKPIGTTITDLLYIDDLKIFAASESKLSSVMNSVRAAMEDVGLMWNPKKCAVAHFKRGVRVPESTGLLMSDGNVKIPTLEDGQQYKFLGVLETLRQEEKIVLRCAAREYLRRLSVIWSSPLSDYHRVIASNQFALPAMSYFMWTQHWPITELRQVDRDARKIVTEGGGKHPCGTTSLLYLPRDKGGRGLRSVETEYKETKVKAAVKLYQNRDPAMKMVREFEEQAESKGYQSMTKEAAKYAEEYGLQLQLKHPDPVCVTEEGEVVLADKLKTRLRKLRESRMEGVVKEQKWQGKLIAARKEDGDLNTEQCFWWLNEWRMCPTHTIAGMFEIYEQLLPTRLYAIHKTQASPNSDPTCRLCGTAPESMAHILSACPALAQTKYLARHDAVLKVLFFDVMEDMGLIEASPPWYSPTKPQPVYEGAYAQAYWDVPVFGEYQDLRANRIDARIVNHQEKKVITMEMSCPWVSNRQKKTTEKTMKYAPLRWELKQKYPGYEISQYNIIVDVLGGWSTDVEVAVKELVGRRHKDVLKKMQKACLSATLNIARTFKVATH

SEQ ID NO: 3343 - protein, 1227 aa, Acropora intermedia
MASSEMSSEERPVRCNRSRIKWTKEMNNTLLDCKSKAQALVKSENPPRLENGRKKGYMRVMKELWDEAGFENLALTSQNLRDQAAKLEKSIGDVGYLIAASVGLRTSDEADGSEGSTSEVNVCNVQATNFVINQHENADLHTVADETSLEGPGSELSQDTRDLIDSSNLILARVNTLPGEFDEREFDTRIKERPTKRDLDNINQTITEIMKQASPRENPFSYLWIANCVLYSVVVAFLLNKGWKKQRSGTPAGGASKQQEWKRVYEKRVVEVRKKISIAQAELERIKENRKITKKGKRNRAVLEKECKGLSATKLVSFMEKQKAILRKLKRGFSRSQKNEEARILNQQFQTDTSKVYANMRELLNKDKEDERPRYTASDQNTQADKEMFNNVEEASEYWRNLWESEGTGDRCASWLEEIRSAIQRRVPPPTEEDWDLDPAVAAKVLAKKKNWSAPGPDRLANFWWKRAESLHVGVATAFQTISSIDGEYPLWFSEGKTSLIPKPGEFTSDNQRPITCLNTMYKWYTSCLLVPTDKHLDDYDLMEGAQRGARAGCSGTIDNLLIDRMVTLDCHRKKRNLSMGWVDVKKAYDSIDHGWLEEMMIIHRFPTWLCRTTKYLSRSWSTRIVVTTRNGREASEIIKFRKGLPQGDALCPRLFTVCLNPIAWKISASEGYRLSKPIGTTITDLLYIDDLKIFAASESKLSSVMNSVRAAMEDVGLIWNPKKCAVAHFKRGLRLPESTGLLMSDGNVKIPTLEDGQQYKFLGVLETLRQEEKIVLRCAAREYLRRLSVIWSSPLSDYHRVIASNQFALPAMSYFMWTQHWPITELRQVDRDARKIVTEGGGKHPCGTTSLLYLPRDKGGRGLRSVETEYKETKVKAAVKLYQNRDPAMKMVREFEEQAESKGYQSMTKEAAKYAEEYGLQLQLKHPDPVCVTEEGEVVPGDKLKTRLRKLRESRMEGVVEEQKWQGKLITARKEDGDLNTEQCFWWLNEWRMCPTHTIAGMFEIYEQLLPTRLYAIHKTQASPNSDPTCRLCGTAPESMAHILSACPALAQTKYLARHDAVLKVLFFDIMEDLGLIEASPPWYSPTKPQPVYEGAYAQAYWDVPVFGEYQDLRANRIDARIVNHQEKKVITMEMSCPWVSNRQKKTSEKTMKYAPLRWELKQKYPGYEISQYNIIVDVLGGWSTDVEVAVKELVGRRHKDVLKKMQKACLSATLNIARTFKVATH

SEQ ID NO: 3344 - protein, 1219 aa, Acropora echinata
MASNETTGQQLRGNSGRIKWTEGMNNFLLDCKNKAKMLAESENPPRLENGRKKGYMRLMKELWDDSGYGELELTSQNLRDQAARLEKTMGDVRVAIFESVGQRAREEEPTIRDFNARNLESTNYEVNHEDADLHTVTVEAIPTRPAGVLNQQTCDLIDSSNVIFARVNTQPGEFGERDIDTRIKERPTKGDLNNINLAIIKLMEQHQVSPRENPFSYLWIVNCVLYSVVMAFLLNKGWKKQRSGTSGGARKQHKWKREYEKRVLEVRKKISIAEAELMRLKENRKITKKGKRNRAFLEQECKGLSAVKLVSYMEKQKSILRKLKRGFSRSKKQEEARVLNQQFQTDASRVYANMREIVNKDKENDRPRYIADDQANHGEREMFNNIEEASEFWRTLWETEGTGDRNATWLEEIRSAIHSRVPEPADEDWDLDEMDAAKVLTKKKNWSAPGPDRLANFWWKRANSLHKGVATAFQVISRSDEEYPQWFSEGKTSLIPKPGIFSSDNQRPITCLNTIYKWYTSCLLVPTDKHLNHYELMEGAQRGARAGCSGTVDNLLIDRIVTLDCHRRKRNLSMGWVDVKKAYDSIDHGWLEEMMLMHRFPTWLCRAIQNLSRSWSTRIVTTTRKGREVSDIIRFRKGLPQGDALCPRLFTVCLNPIAWKIRATEGYRLSKPIDTKVTDLLYIDDLKIFAASESRLNCVMKSVRPAMEDVGLQWNPKKCAVVHFKRGTHVADSAGLKVDGNAKIPSLEDGQQYKFLGVLESLKQEEKLALQSAAKEYLRRLSVIWTSPLSDYHRVVASNQFAMPAMSYYMWTQHWPITDLKQIDREARKIVVENGGKHPCGSTSLLYLSRDKGGRGMRSIETEYKETKIKAAANLYQNRDPAMKIVRDFEERAESMEHQALTKEAAAYAKEYGLELQLEYPDPVCVTEEGEVIPGKKVKNILKRHRESRAREEVKEQRWQGKLVTERERDEELSAERCFWWLSDWRTCPTHTIAGMFELYEQLLPTRLYTIHKTRVSDSGNSTCRLCGTAPEGMAHILSACPALAQTKYLARHDAVLKVLFFEIIFDLGLIDSVPPWYSPIKPQSVYETAEVQAYWDVPVYGEYQELRANRVDARIVNNRDKQVIALEMSCPWVSNRGKKTSEKTMKYAPLRWELKQRYPGYEINQCNIILDVLGGWSKDLDDTLQKLVGSKAKGVLKKMQKACLSGTLNIARTFKVII

SEQ ID NO: 3345 - protein, 907 aa, Acropora awi
MEKQKSILRKLKRGFSRSKKQEEARVLNQQFQTDASRVYANMREIVNKDKENDRPRYIADDQANHGEREMFNNIEEASEFWRTLWETEGTGDRNAAWLEEIRSAIHSRVPEPADEDWDLDEMDAAKVLTKKKNWSAPGPDRLANFWWKRANSLHKGVATAFQVISRSDEEYPQWFSEGKTSLIPKPGIFSSDNQRPITCLNTIYKWYTWCLLVPTDKHLNHYELMEGAQRGARAGCSGTVDNLLIDRIVTLDCHRRKRNLSMGWVDVKKAYDSIDHGWLEEMMLMHRFPTWLCRAIQNLSRSWSTRIVTTTRKGREVSDIIRFRKGLPQGDALCPRLFTVCLNPIAWKIRATEGYRLSKPIDTKVTDLLYIDDLKIFAASESRLNCVMKSVRPAMEDVGLQWNPKKCAVVHFKRGTHVADSAGLKVDGNAKIPSLEDGQQYKFLGVLESLKQEEKLALQSAAKEYLRRLSVIWTSPLSDYHRVVASNQFAMPAMSYYMWTQHWPITDLKQIDREARKIVVENGGKHPCGSTSLLYLPRDKGGRGMRSIETEYKETKIKAAANLYQNRDPAMKIVRDFEERAESMEHQALTKEAAAYAKEYGLELQLEYPDPVCVTEEGEVIPGKKVKNILKRHRESRALEEVKEQRWQGKLVTERERDEELSAERCFWWLSDWRTCPTHTIAGMFELYEQLLPTRLYTIHKTRVSDSGDSTCRLCGTAPEGMAHILSACPALAQTKYLARHDAVLKVLFFEIIFDLGLIDSVPPWYSPIKPQSVYETAEVQAYWDVPVYGEYQELRANRVDARIVNNRDKQVIALEMSCPWVSNRGKKTSEKTMKYAPLRWELKQRYPGYEINQCNIILDVLGGWSKDLDDTLQKLVGSKAKGVLKKMQKACLSGTLNIARTFKVII

SEQ ID NO: 3346 - protein, 907 aa, Acropora muricata
MEKQKSILRKLKRGFSRSKKQEEARVLNQQFQTDASRVYANMREIVNKDKENDRPRYIADDQANHGEREMFNNIEEASEFWRTLWETEGTGDRNATWLEEIRSAIHSRVPEPADEDWDLDEMDAAKVLTKKKNWSAPGPDRLANFWWKRANSLHKGVATAFQVISRSDEEYPQWFSEGKTSLIPKPGIFSSDNQRPITCLNTIYKWYTSCLLVPTDKHLNHYELMEGAQRGARAGCSGTVDNLLIDRIVTLDCHRRKRNLSMGWVDVKKAYDSIDHGWLEEMMLMHRFPTWLCRAIQNLSRSWSTRIVTTTRKGREVSDIIRFRKGLPQGDALCPRLFTVCLNPIAWKIRATEGYRLSKPIDTKVTDLLYIDDLKIFAASESRLNCVMKSVRPAMEDVGLQWNPKKCAVVHFKRGTHVADSAGLKVDGNAKIPSLEDGQQYKFLGVLESLKQEEKLALQSAAKEYLRRLSVIWTSPLSDYHRVVASNQFAMPAMSYYMWTQHWPITDLKQIDREARKIVVENGGKHPCGSTSLLYLSRDKGGRGMRSIETEYKETKIKAAANLYQNRDPAMKIVRDFEERAESMEHQALTKEAAAYAKEYGLELQLEYPDPVCVTEEGEVIPGKKVKNILKRHRESRAREEVKEQRWQGKLVTERERDEELSAERCFWWLSDWRTCPTHTIAGMFELYEQLLPTRLYTIHKTRVSDSGNSTCRLCGTAPEGMAHILSACPALAQTKYLARHDAVLKVLFFEIIFDLGLIDSVPPWYSPIKPQSVYETAEVQAYWDVPVYGEYQELRANRVDARIVNNRDKQVIALEMSCPWVSNRGKKTSEKTMKYAPLRWELKQRYPGYEINQCNIILDVLGGWSKDLDDTLQKLVGSKAKGVLKKMQKACLSGTLNIARTFKVII

SEQ ID NO: 3347 - protein, 1219 aa, Montipora efflorescens
MASSETTGQQLRGNSGRIKWTEGMNNFLLDCKNKAKMLAESENPPRLENGRKKGYMRLMKELWDDSGYGELELTSQNLRDQAARLEKTMGDVRVAIFESVGQRAREEEPTIRDFNARNLESTNFEVNHEDADLHTVTVGAIPTRPAGVLNQQTCDLLDSSNVIFARVNTQPGEFGERDIDTRIKERPTKGDLNNINLAIIKLMEQHQVSPRENPFSYLWIVNCVLYSVVMAFLLNKGWKKQRSGTSGGARKQHKWKREYEKRVLEVRKKISIAEAELMRLKENRKITKKGKRNRAFLEQECKGLSAVKLVSYMEKQKSILRKLKRGFSRSKKQEEARVLNQQFQTDASRVYANMREIVNKDKENDRPRYIADDQANHGEREMFNNIEEASEFWRTLWETEGTGDRNAAWLEEIRSAIHSRVPEPADEDWDLDEMDAAKVLTKKKNWSAPGPDRLANFWWKRANSLHKGVATAFQVISRSDEEYPQWFSEGKTSLIPKPGIFSSDNQRPITCLNTIYKWYTSCLLVPTDKHLNHYELMEGAQRGARAGCSGTVDNLLIDRIVTLDCHRRKRNLSMGWVDVKKAYDSIDHGWLEEMMLMHRFPTWLCRAIQNLSRSWSTRIVTTTRKGREVSDIIRFRKGLPQGDALCPRLFTVCLNPIAWKIRATEGYRLSKPIDTKVTDLLYIDDLKIFAASESRLSCVMKSVRPAMEDVGLQWNPKKCAVVHFKRGTHVADSAGLKVDGNAKIPSLEDGQQYKFLGVLESLKQEEKLALQSAAKEYLRRLSVIWTSPLSDYHRVVASNQFAMPAMSYYMWTQHWPITDLKQIDREARKIVVENGGKHPCGSTSLLYLSRDKGGRGMRSIETEYKETKIKAAANLYQNRDPAMKIVRDFEERAESMGHQALTKEAAAYAKEYGLELQLEYPDPVCVTEEGEVIPGKKVKNILKRHRESRVREEVKEQRWQGKLVTERERDEELSAERCFWWLSDWRTCPTHTIAGMFELYEQLLPTRLYTIHKTRVSDSGDSTCRLCGTAPEGMAHILSACPALAQTKYLARHDAVLKVLFFEIIFDLGLIDSVPPWYSPIKPQSVYETAEVQAYWDVPVYGEYQELRANRVDARIVNNRDKQVIALEMSCPWVSNRGKKTSEKTMKYAPLRWELKQRYPGYEINQCNIILDVLGGWSKDLDDTLQKLVGSKAKGVLKKMQKACLSGTLNIARTFKVII

SEQ ID NO: 3348 - protein, 1219 aa, Acropora echinata
MASSETTGQQLRGNSGRIKWTEGMNNFLLDCKNKAKMLAESENPPRLENGRKKGYMRLMKELWDDSGYGELELTSQNLRDQAARLEKTMGDVRVAIFESVGQRAREEEPTIRDFNARNLESTNYEVNHEDADLHTVTVEAIPTRPAGVLNQQTCDLIDSSNVIFARVNTQPGEFGERDIDTRIKERPTKGDLNNINLAIIKLMEQHQVSPRENPFSYLWIVNCVLYSVVMAFLLNKGWKKQRSGTSGGARKQHKWKREYEKRVLEVRKKISIAEAELMRLKENRKITKKGKRNRAFLEQECKGLSAVKLVSYMEKQKSILRKLKRGFSGSKKQEEARVLNQQFQTDASRVYANMREIVNKDKENDRPRYIADDQANHGEREMFNNIEEASEFWRTLWETEGTGDRNATWLEEIRSAIHSRVPEPADEDWDLDEMDAAKVLTKKKNWSAPGPDRLANFWWKRANSLHKGVATAFQVISRSDEEYPQWFSEGKTSLIPKPGIFSSDNQRPITCLNTIYKWYTSCLLVPTDKHLNHYELMEGAQRGARAGCSGTVDNLLIDRIVTLDCHRRKRNLSMGWVDVKKAYDSIDHGWLEEMMLMHRFPTWLCRAIQNLSRSWSTRIVTTTRKGREVSDIIRFRKGLPQGDALCPRLFTVCLNPIAWKIRATEGYRLSKPIDTKVTDLLYIDDLKIFAASESRLNCVMKSVRPAMEDVGLQWNPKKCAVAHFKRGTHVADSAGLKVDGNAKIPSLEDGQQYKFLGVLESLKQEEKLALQSAAKEYLRRLSVIWTSPLSDYHRVVASNQFAMPAMSYYMWTQHWPITDLKQIDREARKIVVENGGKHPCGSTSLLYLSRDKGGRGMRSIETEYKETKIKAAANLYQNRDPAMKIVRDFEERAESMEHQALTKEAAAYAKEYGLELQLEYPDPVCVTEEGEVIPGKKVKNILKRHRESRAREEVKEQRWQGKLVTERERDEELSAERCFWWLSDWRTCPAHTIAGMFELYEQLLPTRLYTIHKTRVSDSGNSTCRLCGTAPEGMAHILSACPALAQTKYLARHDAVLKVLFFEIIFDLGLIDSVPPWYSPIKPQSVYETAEVQAYWDVPVYGEYQELRANRVDARIVNNRDKQVIALEMSCPWVSNRGKKTSEKTMKYAPLRWELKQRYPGYEINQCNIILDVLGGWSKDLDDTLQKLVGSKAKGVLKKMQKACLSGTLNIARTFKVII

SEQ ID NO: 3349 - protein, 1219 aa, Acropora florida
MASSETTGQQLRGNSGRIKWTEGMNNFLLDCKNKAKMLAESENPPRLENGRKKGYMRLMKELWDDSGYGELELTSQNLRDQAARLEKTMGDVRVAIFESVGQRAREEEPTIRDFNARNLESTNFEVNHEDADLHTVTVGAIPTRPAGVLNQQTCDLIDSSNVIFARVNTQPGEFGERDIDTRIKERPTKGDLNNINLAIIKLMEQHQVSPRENPFSYLWIVNCVLYSVVMAFLLNKGWKKQRSGTSGGARKQHKWKREYEKRVLEVRKKISIAEAELIRLKENRKITKKGKRNRAFLEQECKGLSAVKLVSYMEKQKSILRKLKRGFSRSKKQEEARVLNQQFQTDASRVYANMREIVNKDKENDRPRYIADDQANHGEREMFNNIEEASEFWRTLWETEGTGDRNAAWLEEIRSAIHSRVPEPADEDWDLDEMDAAKVLTKKKNWSAPGPDRLANFWWKRANSLHKGVATAFQVISRSDEEYPQWFSEGKTSLIPKPGIFSSDNQRPITCLNTIYKWYTSCLLVPTDKHLNHYELMEGAQRGARAGCSGTVDNLLIDRIVTLDCHRRKRNLSMGWVDVKKAYDSIDHGWLEEMMLMHRFPTWLCRAIQNLSRSWSTRIVTTTRKGREVSDIIRFRKGLPQGDALCPRLFTVCLNPIAWKIRATEGYRLSKPIDTKVTDLLYIDDLKIFAASESRLNCVMKSVRPAMEDVGLQWNPKKCAVVHFKRGTHVADSAGLKVDGNAKIPSLEDGQQYKFLGVLESLKQEEKLALQSAAKEYLRRLSVIWTSPLSDYHRVVASNQFAMPAMSYYMWTQHWPITDLKQIDREARKIVVENGGKHPCGSTSLLYLSRDKGGRGMRSIETEYKETKIKAAANLYQNRDPAMKIVRDFEERAESMEHQALTKEAAAYAKEYGLELQLEYPDPVCVTEEGEVIPGKKVKNILKRHRESRAREEVKEQRWQGKLVTERERDEELSAERCFWWLSDWRTCPTHTIAGMFELYEQLLPTRLYTIHKTRVSDSGDSTCRLCGTAPEGMAHILSACPALAQTKYLARHDAVLKVLFFEIIFDLGLIDSVPPWYSPIKPQSVYETAEVQAYWDVPVYGEYQELRANRVDARIVNNRDKQVIALEMSCPWVSNRGKKTSEKTMKYAPLRWELKQRYPGYEINQCNIILDVLGGWSKDLDDTLQKLVGSKAKGVLKKMQKACLSGTLNIARTFKVII

SEQ ID NO: 3350 - protein, 1219 aa, Acropora echinata
MASSETTGQQLRGNSGRIKWTEGMNNFLLDCKNKAKMLAESENPPRLENGRKKGYMRLMKELWDDSGYGELELTSQNLRDQAARLEKTMGDVRVAIFESVGQRAREEEPTIRDFNARNLESTNYEVNHEDADLHTVTVEAIPTRPAGVLNQQTCDLIDSSNVIFARVNTQPGEFGERDIDTRIKERPTKGDLNNINLAIIKLMEQHQVSPRENPFSYLWIVNCVLYSVVMAFLLNKGWKKQRSGTSGGARKQHKWKREYEKRVLEVRKKISIAEAELMRLKENRKITKKGKRNRAFLEQECKGLSAVKLVSYMEKQKSILRKLKRGFSRSKKQEEARVLNQQFQTDASRVYANMREIVNKDKENDRPRYIADDQANHGEREMFNNIEEASEFWRTLWETEGTGDRNATWLEEIRSAIHSRVPEPADEDWDLDEMDAAKVLTKKKNWSAPGPDRLANFWWKRANSLHKGVATAFQVISRSDEEYPQWFSEGKTSLIPKPGIFSSDNQRPITCLNTIYKWYTSCLLVPTDKHLNHYELMEGAQRGARAGCSGTVDNLLIDRIVTLDCHRRKRNLSMGWVDVKKAYDSIDHGWLEEMMLMHRFPTWLCRAIQNLSRSWSTRIVTTTRKGREVSDIIRFRKGLPQGDALCPRLFTVCLNPIAWKIRATEGYRLSKPIDTKVTDLLYIDDLKIFAASESRLNCVMKSVRPAMEDVGLQWNPKKCAVVHFKRGTHVADSAGLKVDGNAKIPSLEDGQQYKFLGVLESLKQEEKLALQSAAKEYLRRLSVIWTSPLSDYHRVVASNQFAMPAMSYYMWTQHWPITDLKQIDREARKIVVENGGKHPCGSTSLLYLSRDKGGRGMRSIETEYKETKIKAAANLYQNRDPAMKIVRDFEERAESMEHQALTKEAAAYAKEYGLELQLEYPDPVCVTEEGEVIPGKKVKNILKRHRESRAREEVKEQRWQGKLVTERERDEELSAERCFWWLSDWRTCPTHTIAGMFELYEQLLPTRLYTIHKTRVSDSGNSTCRLCGTAPEGMAHILSACPALAQTKYLARHDAVLKVLFFEIIFDLGLIDSVPPWYSPIKPQSVYETAEVQAYWDVPVYGEYQELRANRVDARIVNNRDKQVIALEMSCPWVSNRGKKTSEKTMKYAPLRWELKQRYPGYEINQCNIILDVLGGWSKDLDDTLQKLVGSKAKGVLKKMQKACLSGTLNIARTFKVII

SEQ ID NO: 3351 - protein, 1219 aa, Acropora florida
MASSETTGQQLRGNSGRIKWTEGMNNFLLDCKNTAKMLAESENPPRLENGRKKGYMRLMKELWDDSGYGELKLTSQNLRDQAARLEKTMGDVRVAIFESVGQRAREEEPTIRDFNARNLESTNYEVNHEDADLHTVTVGAIPTRPAGVLNQQTCDLIDSSNVIFARVNTQPGEFGERDIDTRIKERPTKGDLNNINLAIIKLMEQHQVSPRENPFSYLWIVNCVLYSVVMAFLLNKGWKKQRSGTSGGARKQHKWKREYEKRVLEVRKKISIAEAELIRLKENRKITKKGKRNRAFLEQECKGLSAVKLVSYMEKQKSILRKLKRGFSRSKKQEEARVLNQQFQTDASRVYANMREIVNKDKENDRPRYIADDQANHGEREMFNNIEEASEFWRTLWETEGTGDRNAAWLEEIRSAIHSRVPEPADEDWDLDEMDAAKVLTKKKNWSAPGPDRLANFWWKRANSLHKGVATAFQVISRSDEEYPQWFSEGKTSLIPKPGIFSSDNQRPITCLNTIYKWYTSCLLVPTDKHLNHYELMEGAQRGARAGCSGTVDNLLIDRIVTLDCHRRKRNLSMGWVDVKKAYDSIDHGWLEEMMLMHRFPTWLCRAIQNLSRSWSTRIVTTTRKGREVSDIIRFRKGLPQGDALCPRLFTVCLNPIAWKIRATEGYRLSKPIDTKVTDLLYIDDLKIFAASESRLNCVMKSVRPAMEDVGLQWNPKKCAVVHFKRGTHVADSAGLKVDGNAKIPSLEDGQQYKFLGVLESLKQEEKLALQSAAKEYLRRLSVIWTSPLSDYHRVVASNQFAMPAMSYYMWTQHWPITDLKQIDREARKIVVENGGKHPCGSTSLLYLSRDKGGRGMRSIETEYKETKIKAAANLYQNRDPAMKIVRDFEERAESMEHQALTKEAAAYAKEYGLELQLEYPDPVCVTEEGEVIPGKKVKNILKRHRESRAREEVKEQRWQGKLVTERERDEELSAERCFWWLSDWRTCPTHTIAGMFELYEQLLPTRLYTIHKTRVSDSGDSTCRLCGTAPEGMAHILSACPALAQTKYLARHDAVLKVLFFEIIFDLGLIDSVPPWYSPIKPQSVYETAEVQAYWDVPVYGEYQELRANRVDARIVNNRDKQVIALEMSCPWVSNRGKKTSEKTMKYAPLRWELKQRYPGYEINQCNIILDVLGGWSKDLDDTLQKLVGSKAKGVLKKMQKACLSGTLNIARTFKVII

SEQ ID NO: 3352 - protein, 1017 aa, Astreopora myriophthalma
MEQHQVSPGENPFSYLWIANCVLYSVVMAFLLNKGWKKQRSGTSGRARKQHKWKREYEKRVLEVRKKISIAEAELMRLKENRKITKKGKRNRAILEQECKGLSAVKLVSYMEKQKSILRKLKRGFSRSKKQEEARVLNQQFQTDASRVYANMREMVNKDKENDRPRYIADDQANHGEREMFDHIEEASEFWRTLWETEGTGDRNAAWLEEIRSAIHSRVPEPAEEDWDLDEMVAAKVLTKKKNWSAPGPDRLANFWWKRANSLHKGVATAFQAISRSDEEYPQWFSEGKTSLIPKPGKFSSDNQRPITCLNTIYKWYTSCLLVPTDKHLNYYELMEGAQRGARAGCSGTMDNLLIDRAVTLDCHRRNRNLSMGWVDVKKAYDSIDHGWLDEMMLMHRFPTWLCRAIQNLSRSWNTRIVTITRKGREVSDIIRFRKGLPQGDALCPRLFTVCLNPIAWKISATEGYRLSKPIDTKVTDLLYIDDLKIFAASDSRLSCVMKSVKTAMEDVGLQWNPKKCAVVHFKRGTHVADSAGLKVDGNAKIPSLEDGQQYKFLGVLESLKQEEKLALQTAAKEYLRRLSVIWSSPLSDYHRVVASNQFAMPAMSYYMWTQHWPITDLKQIDREARKIVVENGGKHPCGSTSLLYLSRDKGGRGMRSIETEYKETKMKAAVNLYQNRDPAMKMVRDFEERAESVGHQALTKEAAAYAKEYGLELQLEYPDPVCVTEEGEVIPGKKVKNILKRHRESRIREKVREQRWQGKLVTERERDEELSAERCFWWLSDWRACPTHTIAGMFELYEQLLPTRLYTIHKTRVSDSSDSACRLCGTAPEGMAHILSACPALAQTKYLARHDAVLKVLFFEIIFDLGLIDSVPPWYSPIKPQSVYETAEVQAYWDVPVYGEYQELRANRVDARIVNNRDKQVIALEMSCPWVSNRDKKTSEKTMKYAPLRWELKQRYPGYEINQCNIILDVLGGWSKDLDDTLQQLVGSKAKGVLKKMQKACLSGTLNIARTFKVIT

SEQ ID NO: 3353 - protein, 1219 aa, Acropora echinata
MASSETTGQQLRGNSGRIKWTEGMNNFLLDCKNKAKMLAESENPPRLENGRKKGYMRLMKELWDDSGYGELELTSQNLRDQAARLEKTMGDVRVAIFESVGQRAREEEPTIRDFNARNLESTNYEVNHEDADLHTVTVEAIPTRPAGVLNQQTCDLIDSSNVIFARVNTQPGEFGERDIDTRIKERPTKGDLNNINLAIIKLMEQHQVSPRENPFSYLWIVNCVLYSVVMAFLLNKGWKKQRSGTSGGARKQHKWKREYEKRVLEVRKKISIAEAELMRLKENRKITKKGKRNRAFLEQECKGLSAVKLVSYMEKQKSILRKLKRGFSRSKKQEEARVLNQQFQTDASRVYANMREIVNKDKENDRPRYIADDQANHGEREMFNNIEEASEFWRTLWETEGTGDRNATWLEEIRSAIHSRVPEPADEDWDLDEMDAAKVLTKKKNWSAPGPDRLANFWWKRANSLHKGVATAFQVISRSDEEYPQWFSEGKTSLIPKPGIFSSDNQRPITCLNTIYKWYTSCLLVPTDKHLNHYELMEGAQRGARAGCSGTVDNLLIDRIVTLDCHRRKRNLSMGWVDVKKAYDSIDHGWLEEMMLMHRFPTWLCRAIQNLSRSWSTRIVTTTRKGREVSDIIRFRKGLPQGDALCPRLFTVCLNPIAWKIRATEGYRLSKPIDTKVTDLLYIDDLKIFAASESRLNCVMKSVRPAMEDVGLQWNPKKCAVVHFKRGTHVADSAGLKVDGNAKIPSLEDGQQYKFLGVLESLKQEEKLALQSAAKEYLRRLSVIWTSPLSDYHRVVASNQFAMPAMSYYMWTQHWPITDLKQIDREARKIVVENGGKHPCGSTSLLYLSRDKGGRGMRSIETEYKETKIKAAANLYQNRDPAMKIVRDFEERAESMEHQALTKEAAAYAKEYGLELQLEYPDPVCVTEEGEVIPGKKVKNILKRHRESRAREEVKEQRWQGKLVTERERDEELSAERCFWWLSDWRTCPTHTIAGMFELYEQLLPTRLYTIHKTRVSDSGNSTCRLCGTAPEGMAHILSACPALAQTKYLARHDAVLKVLFFEIIFDLGLIDSVPPWYSPIKPQSVYETAEVQAYWDVPVYGEYQELRANRVDARIVNNRDKQVIALEMSCPWVSNRGKKTSEKTMKYAPLRWELKQRYPGYEINQCNIILDVPGGWSKDLDDTLQKLVGSKAKGVLKKMQKACLSGTLNIARTFKVII

SEQ ID NO: 3354 - protein, 1219 aa, Acropora muricata
MASSETTGQQLRGNSGRIKWTEGMNNFLLDCKNKAKMLAESENPPRLENGRKKGYMRLMKELWDDSGYGELELTSQNLRDQAARLEKTMGDVRVAIFESVGQRAREEEPTIRDFNARNLESTNYEVNHEDADLHTVTVEAIPTRPAGVLNQQTCDLIDSSNVIFARVNTQPGEFGERDIDTRIKERPTKGDLNNINLAIIKLMEQHQVSPRENPFSYLWIVNCVLYSVVMAFLLNKGWKKQRSGTSGGARKQHKWKREYEKRVLEVRKKISIAEAELMRLKENRKITKKGKRNRAFLEQECKGLSAVKLVSYMEKQKSILRKLKRGFSRSKKQEEARVLNQQFQTDASRVYANMREIVNKDKENDRPRYIADDQANHGEREMFNNIEEASEFWRTLWETEGTGDRNATWLEEIRSAIHSRVPEPADEDWDLDEMDAAKVLTKKKNWSAPGPDRLANFWWKRANSLHKGVATAFQVISRSDEEYPQWFSEGKTSLIPKPGIFSSDNQRPITCLNTIYKWYTSCLLVPTDKHLNHYELMEGAQRGARAGCSGTVDNLLIDRIVTLDCHRRKRNLSMGWVDVKKAYDSIDHGWLEEMMLMHRFPTWLCRAIQNLSRSWSTRIVTTTRKGREVSDIIRFRKGLPQGDALCPRLFTVCLNPIAWKIRATEGYRLSKPIDTKVTDLLYIDDLKIFAASESRLNCVMKSVRPAMEDVGLQWNPKKCAVVHFKRGTHVADSAGLKVDGNAKIPSLEDGQQYKFLGVLESLKQEEKLALQSAAKEYLRRLSVIWTSPLSDYHRVVASNQFAMPAMSYYMWTQHWPITDLKQIDREARKIVVENGGKHPCGSTSLLYLSRDKGGRGMRSIETEYKETKIKAAANLYQNRDPAMKIVRDFEERAESMEHQALTKEAAAYAKEYGLELQLEYPDPVCVTEEGEVIPGKKVKNILKRHRESRAREEVKEQRWQGKLVTERERDEELSAERCFWWLSDWRTCPTHTIAGMFELYEQLLPTRLYTIHKTRVSDSGNSTCRLCGTAPEGMAHILSACPALAQTKYLARHDAVLKVLFFEIIFDLGLIDSVPPWYSPIKPQSVYETAEVQAYWDVPVYGEYQELRANRVDARIVNNRDKQVIALEMSCPWVSNRGKKTSEKTMKYAPLRWELKQRYPGYEINQCNIILDVLGGWSKDLDDTLQKLVGSKAKGVLKKMQKACLSGTLNIARTFKVMI

SEQ ID NO: 3355 - protein, 1219 aa, Montipora cactus; identical to SEQ ID NO: 3347

SEQ ID NO: 3356 - protein, 866 aa, Montipora cactus
MREIVNKDKENDRPRYIADDQANHGEREMFNNIEEASEFWRTLWETEGTGDRNAAWLEEIRSAIHSRVPEPADEDWDLDEMDAAKVLTKKKNWSAPGPDRLANFWWKRANSLHKGVATAFQVISRSDEEYPQWFSEGKTSLIPKPGIFSSDNQRPITCLNTIYKWYTSCLLVPTDKHLNHYELMEGAQRGARAGCSGTVDNLLIDRIVTLDCHRRKRNLSMGWVDVKKAYDSIDHGWPEEMMLMHRFPTWLCRAIQNLSRSWSTRIVTTTRKGREVSDIIRFRKGLPQGDALCPRLFTVCLNPIAWKIRATEGYRLSKPIDTKVTDLLYIDDLKIFAASESRLSCVMKSVRPAMEDVGLQWNPKKCAVVHFKRGTHVADSAGLKVDGNAKIPSLEDGQQYKFLGVLESLKQEEKLALQSAAKEYLRRLSVIWTSPLSDYHRVVASNQFAMPAMSYYMWNQHWPITDLKQIDREARKIVVENGGKHPCGSTSLLYLSRDKGGRGMRSIETEYKETKIKAAANLYQNRDPAMKIVRDFEERAESMGHQALTKEAAAYAKEYGLELQLEYPDPVCVTEEGEVIPGKKVKNILKRHRESRVREEVKEQRWQGKLVTERERDEELSAERCFWWLSDWRTCPTHTIAGMFELYEQLLPTRLYTIHKTRVSDSGDSTCRLCGTAPEGMAHILSACPALAQSKYLARHDAVLKVLFFEIIFDLGLIDSVPPWYSPIKPQSVYETAEVQAYWDVPVYGEYQELRANRVDARIVNNRDKQVIALEMSCPWVSNRGKKTSEKTMKYAPLRWELKQRYPGYEINQCNIILDVLGGWSKDLDDTLQKLVGSKAKGVLKKMQKACLSGTLNIARTFKVII

SEQ ID NO: 3357 - protein, 1219 aa, Montipora capitata
MASSETIGQQLRGNSGRIKWTEGMNNFLLDCKNKAKMLAESENPPRLENGRKKGYMRLMKELWDDSGYGELELTSQNLRDQAARLEKTMGDVRVAIFESVGQRAREEEPTIRDFNARNLESTNFEVNHEDADLHTVTVGAIPTRPAGVLNQQTCDLLDSSNVIFARVNTQPGEFGERDIDTRIKERPTKGDLNNINLAIIKLMEQHQVSPRENPFSYLWIVNCVLYSVVMAFLLNKGWKKQRSGTSGGARKQHKWKREYEKRVLEVRKKISIAEAELMRLKENRKITKKGKRNRAFLEQECKGLSAVKLVSYMEKQKSILRKLKRGFSRSKKQEEARLLNQQFQTDASRVYANMREIVNKDKENDLPRYIADDQANHGEREMFNNIEEASEFWRTLWETEGTGDRNAAWLEEIRSAIHSRVPEPADEDWDLDEMDAAKVLTKKKNWSAPGPDRLANFWWKRANSLHKGVATAFQVISRSDEEYPQWFSEGKTSLIPKPGIFSSDNQRPITCLNTIYKWYTSCLLVPTDKHLNHYELMEGAQRGARAGCSGTVDNLLIDRIVTLDCHRRKRNLSMGWVDVKKAYDSIDHGWLEEMMLMHRFPTWLCRAIQNLSRSWSTRIVTTTRKGREVSDIIRFRKGLPQGDALCPRLFTVCLNPIAWKIRATEGYRLSKPIDTKVTDLLYIDDLKIFAASESRLSCVMKSVRPAMEDVGLQWNPKKCAVVHFKRGTHVADSAGLKVDGNAKIPSLEDGQQYKFLGVFESLKQEEKLALQSAAKEYLRRLSVIWTSPLSDYHRVVASNQFAMPAMSYYMWTQHWPITDLKQIDREARKIVVENGGKHPCGSTSLLYLSRDKGGRGMRSIETGYKETKIKAAVNLYQNRDPAMKIVRDFEERAESMGHQALTKEAAAYAKEYGLELQLEYPDPVCVTEEGEVIPGKKVKNILKRHRESRVREEVKEQRWQGKLVTERERDEELSAERCFWWLSDWRTCPTHTIAGMFELYEQLLPTRLYTIHKTRVSDSGDSTCRLCGTAPEGMAHILSACPALAQTKYLARHDAVLKVLFFEIIFDLGLIDSVPPWYSPIKPQSVYETAEVQAYWDVPVYGEYQELRANRVDARIVNNRDKQVIALEMSCPWVSNRGKKTSEKTMKYAPLRWELKQRYPGYEINQCNIILDVLGGWSKDLDDTLQKLVGSKAKGVLKKMQKACLSGTLNIARTFKVII

SEQ ID NO: 3358 - protein, 1219 aa, Acropora cytherea; identical to SEQ ID NO: 3350

SEQ ID NO: 3359 - protein, 1219 aa, Acropora hyacinthus; identical to SEQ ID NO: 3350

SEQ ID NO: 3360 - protein, 1219 aa, Acropora intermedia
MASSETTGQQLRGNSGRIKWTEGMNNFLLDCKNKAKMLAESENPPRLENGRKKGYMRLMKELWDDSGYGELELTSQNLRDQAARLEKTMGDVRVAIFESVGQRAREEEPTIRDFNARNLESTNFEVNHEDADLHTVTVGAIPTRPAGVLNQQTCDLIDSSNVIFARVNTQPGEFGERDIDTRIKERPTKGDLNNINLAIIKLMEQHQVSPRENPFSYLWIVNCVLYSVVMAFLLNKGWKKQRSGTSGGARKQHKWKREYEKRVLEVRKKISIAEAELMRLKENRKITKKGKRNRAFLEQECKGLSAVKLVSYMEKQKSILRKLKRGFSRSKKQEEARVLNQQFQTDASRVYANMREIVNKDKENDRPRYIADDQANHGEREMFNNIEEASEFWRTLWETEGTGDRNAAWLEEIRSAIHSRVPEPADEDWDLDEMDAAKVLTKKKNWSAPGPDRLANFWWKRANSLHKGVATAFQVISRSDEEYPQWFSEGKTSLIPKPGIFSSDNQRPITCLNTIYKWYTSCLLVPTDKHLNHYELMEGAQRGARAGCSGTVDNLLIDRIVTLDCHRRKRNLSMGWVDVKKAYDSIDHGWLEEMMLMHRFPTWLCRAIQNLSRSWSTRIVTTTRKGREVSDIIRFRKGLPQGDALCPRLFTVCLNPIAWKIRATEGYRLSKPIDTKVTDLLYIDDLKIFAASESRLNCVMKSVRPAMEDVGLQWNPKKCAVVHFKRGTHVADSAGLKVDGNAKIPSLEDGQQYKFLGVLESLKQEEKLALQSAAKEYLRRLSVIWTSPLSDYHRVVASNQFAMPAMSYYMWTQHWPITDLKQIDREARKIVVENGGKHPCGSTSLLYLSRDKGGRGMRSIETEYKETKIKAAANLYQNRDPAMKIVRDFEERAESMEHQALTKEAAAYAKEYGLELQLEYPDPVCVTEEGEVIPGKKVKNILKRHRESRAREEVKEQRWQGKLVTERERDEELSAERCFWWLSDWRTCPTHTIAGMFELYEQLLPTRLYTIHKTRVSDSGNSTCRLCGTAPEGMAHILSACPALAQTKYLARHDAVLKVLFFEIIFDLGLIDSVPPWYSPIKPQSVYETAEVQAYWDVPVYGEYQELRANRVDARIVNNRDKQVIALEMSCPWVSNRGKKTSEKTMKYAPLRWELKQRYPGYEINQCNIILDVLGGWSKDLDDTLQKLVGSKAKGVLKKMQKACLSGTLNIARTFKVII

SEQ ID NO: 3361 - protein, 1219 aa, Montipora cactus
MASSETTGQQLRGNSGRIKRTEGMNNFLLDCKNKAKMLAESENPPRLENGRKKGYMRLMKELWDDSGYGELELTSQNLRDQAARLEKTMGDVRVAIFESVGQRAREEEPTIRDFNARNLESTNFEVNHEDADLHTVTVGAIPTRPAGVLNQQTCDLLDSSNVIFARVNTQPGEFGERDIDTRIKERPTKGDLNNINLAIIKLMEQHQVSPRENPFSYLWIVNCVLYSVVMAFLLNKGWKKQRSGTSGGARKQHKWKREYEKRVLEVRKKISIAEAELMRLKENRKITKKGKRNRAFLEQECKGLSAVKLVSYMEKQKSILRKLKRGFSRSKKQEEARVLNQQFQTDASRVYANMREIVNKDKENDRPRYIADDQANHGEREMFNNIEEASEFWRALWETEGTGDRNAAWLGEIRSAIHSRVPEPADEDWDLDEMDAAKVLTKKKNWSAPGPDRLANFWWKRANSLHKGVATAFQVISRSDEEYPQWFSEGKTSLIPKPGIFSSDNQRPITCLNTIYKWYTSCLLVPTDKHLNHYELMEGAQRGARAGCSGTVDNLLIDRIVTLDCHRRKRNLSMGWVDVKKAYDSIDHGWLEEMMLMHRFPTWLCRAIQNLSRSWSTRIVTTTRKGREVSDIIRFRKGLPQGDALCPRLFTVCLNPIAWKIRATEGYRLSKPIDTKVTDLLYIDDLKIFAASESRLSCVMKSVRPAMEDVGLQWNPKKCAVVHFKRGTHVADSAGLKVDGNAKIPILEDGQQYKFLGVLESLKQEEKLALQSAAKEYLRRLSVIWTSPLSDYHRVVASNQFAMPAMSYYMWTQHWPITDLKQIDREARKIVVENGGKHPCGSTSLLYLSRDKGGRGMRSIETEYKETKIKAAANLYQNRDPAMKIVRDFEERAESMGHQALTKEAAAYAKEYGLELQLEYPDPVCVTEEGEVIPGKKVKNILKRHRESRVREEVKEQRWQGKLVTERERDEELSAERCFWWLSDWRTCPTHTIAGMFELYEQLLPTRLYTIHKTRVSDSGDSTCRLCGTAPEGMAHILSACPALAQTKYLARHDAVLKVLFFEIIFDLGLIDSVPPWYSPIKPQSAYETAEVQAYWDVPVYGEYQELRANRVDARIVNNRDKQVIALEMSCPWVSNRGKKTSEKTMKYAPLRWELKQRYPGYEINQCNIILDVLGGWSKDLDDTLQKLVGSKAKGVLKKMQKACLSGTLNIARTFKVII

SEQ ID NO: 3362 - protein, 1017 aa, Acropora digitifera
MEQHQVSPRENPFSYLWIVNCVLYSVVMAFLLNKGWKKQRSGTSGGARKQHKWKREYEKRVLEVRKKISIAEAELMRLKENRKITKKGKRNRAFLEQECKGLSAVKLVSYMEKQKSILRKLKRGFSRSKKQEEARVLNQQFQTDASRVYANMREIVNKDKENDRPRYIADDQANHGEREMFNNIEEASEFWRTLWETEGTGDRNATWLEEIRSAIHSRVPEPADEDWDLDEMDAAKVLTKKKNWSAPGPDRLANFWWKRANSLHKGVATAFQVISRSDEEYPQWFSEGKTSLIPKPGIFSSDNQRPITCLNTIYKWYTSCLLVPTDKHLNHYELMEGAQRGARAGCSGTVDNLLIDRIVTLDCHRRKRNLSMGWVDVKKAYDSIDHGWLEEMMLMHRFPTWLCRAIQNLSRSWSTRIVTTTRKGREVSDIIRFRKGLPQGDALCPRLFTVCLNPIAWKIRATEGYRLSKPIDTKVTDLLYIDDLKIFAASESRLNCVMKSVRPAMEDVGLQWNPKKCAVVHFKRGTHVADSAGLKVDGNAKIPSLEDGQQYKFLGVLESLKQEEKLALQSAAKEYLRRLSVIWTSPLSDYHRVVASNQFAMPAMSYYMWTQHWPITDLKQIDREARKIVVENGGKHPCGSTSLLYLSRDKGGRGMRSIETEYKETKIKAAANLYQNRDPAMKIVRDFEERAESMEHQALTKEAAAYAKEYGLELQLEYPDPVCVTEEGEVIPGKKVKNILKRHRESRAREEVKEQRWQGKLVTERERDEELSAERCFWWLSDWRTCPTHTIAGMFELYEQLLPTRLYTIHKTRVSDSGNSTCRLCGTAPEGMAHILSACPALAQTKYLARHDAVLKVLFFEIIFDLGLIDSVPPWYSPIKPQSVYETAEVQAYWDVPVYGEYQELRANRVDARIVNNRDKQVIALEMSCPWVSNRGKKTSEKTMKYAPLRWELKQRYPGYEINQCNIILDVLGGWSKDLDDTLQKLVGSKAKGVLKKMQKACLSGTLNIARTFKVII

SEQ ID NO: 3363 - protein, 1017 aa, Montipora efflorescens
MEQHQVSPRENPFSYLWIVNCVLYSVVMAFLLNKGWKKQRSGTSGGARKQHKWKREYEKRVLEVRKKISIAEAELMRLKENRKITKKGKRNRAFLEQECKGLSAVKLVSYMEKQKSILRKLKRGFSRSKKQEEARVLNQQFQTDASRVYANMREIVNKDKENDRPRYIADDQANHGEREMFNNIEEASEFWRTLWETEGTGDRNAAWLEEIRSAIHSRVPEPADEDWDLDEMDAAKVLTKKKNWSAPGPDRLANFWWKRANSLHKGVATAFQVISRSDEEYPQWFSEGKTSLIPKPGIFSSDNQRPITCLNTIYKWYTSCLLVPTDKHLNHYELMEGAQRGARAGCSGTVDNLLIDRIVTLDCHRRKRNLSMGWVDVKKAYDSIDHGWLEEMMLMHRFPTWLCRAIQNLSRSWSTRIVTTTRKGREVSDIIRFRKGLPQGDALCPRLFTVCLNPIAWKIRATEGYRLSKPIDTKVTDLLYIDDLKIFAASESRLSCVMKSVRPAMEDVGLQWNPKKCAVVHFKRGTHVADSAGLKVDGNAKIPSLEDGQQYKFLGVLESLKQEEKLALQSAAKEYLRRLSVIWTSPLSDYHRVVASNQFAMPAMSYYMWTQHWPITDLKQIDREARKIVVENGGKHPCGSTSLLYLSRDKGGRGMRSIETEYKETKIKAAANLYQNRDPAMKIVRDFEERAESMGHQALTKEAAAYAKEYGLELQLEYPDPVCVTEEGEVIPGKKVKNILKRHRESRVREEVKEQRWQGKLVTERERDEELSAERCFWWLSDWRTCPTHTIAGMFELYEQLLPTRLYTIHKTRVSDSGDSTCRLCGTAPEGMAHILSACPALAQTKYLARHDAVLKVLFFEIIFDLGLIDSVPPWYSPIKPQSVYETAEVQAYWDVPVYGEYQELRANRVDARIVNNRDKQVIALEMSCPWVSNRGKKTSEKTMKYAPLRWELKQRYPGYEINQCNIILDVLGGWSKDLDDTLQKLVGSKAKGVLKKMQKACLSGTLNIARTFKVII

SEQ ID NO: 3364 - protein, 1219 aa, Acropora selago; identical to SEQ ID NO: 3350

SEQ ID NO: 3365 - protein, 1183 aa, Montipora efflorescens
MLAESENPPRLENGRKKGYMRLMKELWDDSGYGELELTSQNLRDQAARLEKTMGDVRVAIFESVGQRAREEEPTIRDFNARNLESTNFEVNHEDADLHTVTVGAIPTRPAGVLNQQTCDLLDSSNVIFARVNTQPGEFGERDIDTRIKERPTKGDLNNINLAIIKLMEQHQVSPRENPFSYLWIVNCVLYSVVMAFLLNKGWKKQRSGTSGGARKQHKWKREYEKRVLEVRKKISIAEAELMRLKENRKITKKGKRNRAFLEQECKGLSAVKLVSYMEKQKSILRKLKRGFSRSKKQEEARVLNQQFQTDASRVYANMREIVNKDKENDRPRYIADDQANHGEREMFNNIEEASEFWRTLWETEGTGDRNAAWLEEIRSAIHSRVPEPADEDWDLDEMDAAKVLTKKKNWSAPGPDRLANFWWKRANSLHKGVATAFQVISRSDEEYPQWFSEGKTSLIPKPGIFSSDNQRPITCLNTIYKWYTSCLLVPTDKHLNHYELMEGAQRGARAGCSGTVDNLLIDRIVTLDCHRRKRNLSMGWVDVKKAYDSIDHGWLEEMMLMHRFPTWLCRAIQNLSRSWSTRIVTTTRKGREVSDIIRFRKGLPQGDALCPRLFTVCLNPIAWKIRATEGYRLSKPIDTKVTDLLYIDDLKIFAASESRLSCVMKSVRPAMEDVGLQWNPKKCAVVHFKRGTHVADSAGLKVDGNAKIPSLEDGQQYKFLGVLESLKQEEKLALQSAAKEYLRRLSVIWTSPLSDYHRVVASNQFAMPAMSYYMWTQHWPITDLKQIDREARKIVVENGGKHPCGSTSLLYLSRDKGGRGMRSIETEYKETKIKAAANLYQNRDPAMKIVRDFEERAESMGHQALTKEAAAYAKEYGLELQLEYPDPVCVTEEGEVIPGKKVKNILKRHRESRVREEVKEQRWQGKLVTERERDEELSAERCFWWLSDWRTCPTHTIAGMFELYEQLLPTRLYTIHKTRVSDSGDSTCRLCGTAPEGMAHILSACPALAQTKYLARHDAVLKVLFFEIIFDLGLIDSVPPWYSPIKPQSVYETAEVQAYWDVPVYGEFQELRANRVDARIVNNRDKQVIALEMSCPWVSNRGKKTSEKTMKYAPLRWELKQRYPGYEINQCNIILDVLGGWSKDLDDTLQKLVGSKAKGVLKKMQKACLSGSLNIARTFKVII

SEQ ID NO: 3366 - protein, 990 aa, Acropora nasuta
MAFLLNKGWKKQRSGTSGGARKQHKWKREYEKRVLEVRKKISIAEAELMRLKENRKITKKGKRNRAFLEQECKGLSAVKLVSYMEKQKSILRKLKRGFSRSKKQEEARVLNQQFQTDASRVYANMREIVNKDKENDRPRYIADDQANHGEREMFNNIEEASEFWRTLWETEGTGDRNATWLEEIRSAIHSRVPEPADEDWDLDEMDAAKVLTKKKNWSAPGPDRLANFWWKRANSLHKGVATAFQVISRSDEEYPQWFSEGKTSLIPKPGIFSSDNQRPITCLNTIYKWYTSCLLVPTDKHLNHYELMEGAQRGARAGCSGTVDNLLIDRIVTLDCHRRKRNLSMGWVDVKKAYDSIDHGWLEEMMLMHRFPTWLCRAIQNLSRSWSTRIVTTTRKGREVSDIIRFRKGLPQGDALCPRLFTVCLNPIAWKIRATEGYRLSKPIDTKVTDLLYIDDLKIFAASESRLNCVMKSVRPAMEDVGLQWNPKKCAVVHFKRGTHVADSAGLKVDGNAKIPSLEDGQQYKFLGVLESLKQEEKLALQSAAKEYLRRLSVIWTSPLSDYHRVVASNQFAMPAMSYYMWTQHWPITDLKQIDREARKIVVENGGKHPCGSTSLLYLSRDKGGRGMRSIETEYKETKIKAAANLYQNRDPAMKIVRDFEERAESMEHQALTKEAAAYAKEYGLELQLEYPDPVCVTEEGEVIPGKKVKNILKRHRESRAREEVKEQRWQGKLVTERERDEELSAERCFWWLSDWRTCPTHTIAGMFELYEQLLPTRLYTIHKTRVSDSGNSTCRLCGTAPEGMAHILSACPALAQTKYLARHDAVLKVLFFEIIFDLGLIDSVPPWYSPIKPQSVYETAEVQAYWDVPVYGEYQELRANRVDARIVNNRDKQVIALEMSCPWVSNRGKKTSEKTMKYAPLRWELKQRYPGYEINQCNIILDVLGGWSKDLDDTLQKLVGSKAKGVLKKMQKACLSGTLNIARTFKVII

SEQ ID NO: 3367 - protein, 1219 aa, Acropora hyacinthus
MASSETTGQQLRGNNGRIKWTEGMNNFLLDCKNKAKMLAESENPPRLENGRKKGYMRLMKELWDDSGYGELELTSQNLRDQAARLEKTMGDVRVAIFESVGQRAREEEPTIRDFNARNLESTNYEVNHEDADLHTVTVEAIPTRPAGVLNQQTCDLIDSSNVIFARVNTQPGEFGERDIDTRIKERPTKGDLNNINLAIIKLMEQHQVSPRENPFSYLWIVNCVLYSVVMAFLLNKGWKKQRSGTSGGARKQHKWKREYEKRVLEVRKKISIAEAELMRLKENRKITKKGKRNRAFLEQECKGLSAVKLVSYMEKQKSILRKLKRGFSRSKKQEEARVLNQQFQTDASRVYANMREIVNKDKENDRPRYIADDQANHGEREMFNNIEEASEFWRTLWETEGTGDRNATWLEEIRSAIHSRVPEPADEDWDLDEMDAAKVLTKKKNWSAPGPDRLANFWWKRANSLHKGVATAFQVISRSDEEYPQWFSEGKTSLIPKPGIFSSDNQRPITCLNTIYKWYTSCLLVPTDKHLNHYELMEGAQRGARAGCSGTVDNLLIDRIVTLDCHRRKRNLSMGWVDVKKAYDSIDHGWLEEMMLMHRFPTWLCRAIQNLSRSWSTRIVTTTRKGREVSDIIRFRKGLPQGDALCPRLFTVCLNPIAWKIRATERYRLSKPIDTKVTDLLYIDDLKIFAASESKLNCVMKSVRPAMEDVGLQWNPKKCAVVHFKRGTHVADIAGLKVDGNAKIPSLEDGQQYKFLGVLESLKQEEKLALQSAAKEYLRRLSVIWTSPLSDYHRVVASNQFAMPAMSYYMWTQHWPITDLKQIDREARKIVVENGGKHPCGSTSLLYLSRDKGGRGMRSIETEYKETKIKAAANLYQNRDPAMKIVRDFEERAESMEHQALTKEAAAYAKEYGLELQLEYPDPVCVTEEGEVIPGKKVKNILKRHRESRAREEVKEQRWQGKLVTERERDEELSAERCFWWLSDWRTCPTHTIAGMFELYEQLLPTRLYTIHKTRVSDSGNSTCRLCGTAPEGMAHILSACPALAQTKYLARHDAVLKVLFFEIIFDLGLIDSVPPWYSPIKPQSVYETAEVQAYWDVPVYGEYQELRANRVDARIVNNRDKQVIALEMSCPWVSNRGKKTSEKTMKYAPLRWELKQRYPGYEINQCNIILDVLGGWSKDLDDTLQKLVGSKAKGVLKKMQKACLSGTLNIARTFKVII

SEQ ID NO: 3368 - protein, 1219 aa, Acropora awi
MASSETTGQQLRGNSGRIKWTEGMNNFLLDCKNKAKMLAESENPPRLENGRKKGYMRLMKELWDDSGYGELELTSQNLRDQAARLEKTMGDVRVAIFESVGQRAREEEPTIRDFNARNSESTNFEVNHEDADLHTVTVGAIPTRPAGVLNQQTCDLIDSSNVIFARVNTQPGEFGERDIDTRIKERPTKGDLNNINLAIIKLMEQHQVSPRENPFSYLWIVNCVLYSVVMAFLLNKGWKKQRSGTSGGARKQHKWKREYEKRVLEVRKKISIAEAELIRLKENRKITKKGKRNRAFLEQECKGLSAVKLVSYMEKQKSILRKLKRGFSRSKKQEEARVLNQQFQTDASRVYANMREIVNKDKENDRPRYIADDQANHGEREMFNNIEEASEFWRTLWETEGTGDRNAAWLEEIRSAIHSRVPEPADEDWDLDEMDAAKVLTKKKNWSAPGPDRLANFWWKRANSLHKGVATAFQVISRSDEEYPQWFSEGKTSLIPKPGIFSSDNQRPITCLNTIYKWYTSCLLVPTDKHLNHYELMEGAQRGARAGCSGTVDNLLIDRIVTLDCHRRKRNLSMGWVDVKKAYDSIDHGWLEEMMLMHRFPTWLCRAIQNLSRSWSTRIVTTTRKGREVSDIIRFRKGLPQGDALCPRLFTVCLNPIAWKIRATEGYRLSKPIDTKVTDLLYIDDLKIFAASESRLNCVMKSVRPAMEDVGLQWNPKKCAVVHFKRGTHVADSAGLKVDGNAKIPSLEDGQQYKFLGVLESLKQEEKLAMQSAAKEYLRRLSVIWTSPLSDYHRVVASNQFAMPAMSYYMWTQHWPITDLKQIDREARKIVVENGGKHPCGSTSLLYLSRDKGGRGMRSIETEYKETKIKAAANLYQNRDPAMKIVRDFEERAESMEHQALTKEAAAYAKEYGLELQLEYPDPVCVTEEGEVIPGKKVKNILKRHRESRAREEVKEQRWQGKLVTERERDEELSAERCFWWLSDWRTCPTHTIAGMFELYEQLLPTRLYTIHKTRVSDSGDSTCRLCGTAPEGMAHILSACPALAQTKYLARHDAVLKVLFFEIIFDLGLIDSVPPWYSPIKPQSVYETAEVQAYWDVPVYGEYQELRANRVDARIVDNRDKQVIALEMSCPWVSNRGKKTSEKTMKYAPLRWELKQRYPGYEINQCNIILDVLGGWSKDLDDTLQKLVGSKAKGVLKKMQKACLSGTLNIARTFKVII

SEQ ID NO: 3369 - protein, 1017 aa, Montipora cactus; identical to SEQ ID NO: 3363

SEQ ID NO: 3370 - protein, 1017 aa, Acropora gemmifera
MEQHQVSPRENPFSYLWIVNCVLYSVVMAFLLNKGWKKQRSGTSGGARKQHKWKREYEKRVLEVRKKISIAEAELIRLKENRKITKKGKRNRAFLEQECKGLSAVKLVSYMEKQKSILRKLKRGFSRSKKQEEARVLNQQFQTDASRVYANMREIVNKDKENDRPRYIADDQANHGEREMFNNIEEASEFWRTLWETEGTGDRNAAWLEEIRSAIHSRVPEPADEDWDLDEMDAAKVLTKKKNWSAPGPDRLANFWWKRANSLHKGVATAFQVISRSDEEYPQWFSEGKTSLIPKPGIFSSDNQRPITCLNTIYKWYTSCLLVPTDKHLNHYELMEGAQRGARAGCSGTVDNLLIDRIVTLDCHRRKRNLSMGWVDVKKAYDSIDHGWLEEMMLMHRFPTWLCRAIQNLSRSWSTRIVTTTRKGREVSDIIRFRKGLPQGDALCPRLFTVCLNPIAWKIRATEGYRLSKPIDTKVTDLLYIDDLKIFAASESRLNCVMKSVRPAMEDVGLQWNPKKCAVVHFKRGTHVADSAGLKVDGNAKIPSLEDGQQYKFLGVLESLKQEEKLALQSAAKEYLRRLSVIWTSPLSDYHRVVASNQFAMPAMSYYMWTQHWPITDLKQIDREARKIVVENGGKHPCGSTSLLYLSRDKGGRGMRSIETEYKETKIKAAANLYQNRDPAMKIVRDFEERAESMQHQALTKEAAAYAKEYGLELQLEYPDPVCVTEEGEVIPGKKIKNILKRHRESRAREEVKEQRWQGKLVTERERDEELSAERCFWWLSDWRTCPTHTIAGMFELYEQLLPTRLYTIHKTCVSDSGDSTCRLCGTAPEGMAHILSACPALAQTKYLARHDAVLKVLFFEIIFDLGLIDSVPPWYSPIKPQSVYETAEVQAYWDVPVYGEYQELRANRVDARIVNNRDKQVIALEMSCPWVSNRGKKTSEKTTKYAPLRWELKQRYPGYEINQCNIILDVLGGWSKDLDDTLQKLVGSKAKGVLKKMQKACLSGTLNIARTFKVII

SEQ ID NO: 3371 - protein, 866 aa, Acropora muricata
MREIVNKDKENDRPRYIADDQANHGEREMFNNIEEASEFWRTLWETEGTGDRNATWLEEIRSAIHSRVPEPADEDWDLDEMDAAKVLTKKKNWSAPGPDRLANFWWKRANSLHKGVATAFQVISRSDEEYPQWFSEGKTSLIPKPGIFSSDNQRPITCLNTIYKWYTSCLLVPTDKHLNHYELMEGAQRGARAGCSGTVDNLLIDRIVTLDCHRRKRNLSMGWVDVKKAYDSIDHGWLEEMMLMHRFPTWLCRAIQNLSRSWSTRIVTTTRKGREVSDIIRFRKGLPQGDALCPRLFTVCLNPIAWKIRATEGYRLSKPIDTKVTDLLYIDDLKIFAASESRLNCVMKSVRPAMEDVGLQWNPKKCAVVHFKRGTHVADSAGLKVDGNAKIPSLEDGQQYKFLGVLESLKQEEKLALQSAAKEYLRRLSVIWTSPLSDYHRVVASNQFAMPAMSYYMWTQHWPITDLKQIDREARKIVVENGGKHPCGSTSLLYLSRDKGGRGMRSIETEYKETKIKAAANLYQNRDPAMKIVRDFEERAESMEHQALTKEAAAYAKEYGLELQLEYPDPVCVTEEGEVIPGKKVKNILKRHRESRAREEVKEQRWQGKLVTERERDEELSAERCFWWLSDWRTCPTHTIAGMFELYEQLLPTRLYTIHKTRVSDSGNSTCRLCGTAPEGMAHILSACPALAQTKYLARHDAVLKVLFFEIIFDLGLIDSVPPWYSPIKPQSVYETAEVQAYWDVPVYGEYQELRANRVDARIVNNRDKQVIALEMSCPWVSNRGKKTSEKTMKYAPLRWELKQRYPGYEINQCNIILDVLGGWSKDLDDILQKLVGSKAKGVLKKMQKACLSGTLNIARTFKVII

SEQ ID NO: 3372 - protein, 1219 aa, Acropora gemmifera
MASSETTGQQLRGNSGRIKWTEGMNNFLLDCKNKAKMLAESENPPRLENGRKKGYMRLMKELWDDSGYGELELTSQNLRDQAARLEKTMGDVRVAIFESVGQRAREEEPTIRDFNARNLESTNFEVNHEDADLHTVTVGAIPTRPAGVLNQQTCDLIDSSNVIFARVNTQPGEFGERDIDTRIKERPTKGDLNNINLAIIKLMEQHQVSPRENPFSYLWIVNCVLYSVVMAFLLNKGWKKQRSGTSGGARKQHKWKREYEKRVLEVRKKISIAEAELIRLKENRKITKKGKRNRAFLEQECKGLSAVKLVSYMEKQKSILRKLKRGFSRSKKQEEARVLNQQFQTDASRVYANMREIVNKDKENDRPRYIADDQANHGEREMFNNIEEASEFWRTLWETEGTGDRNAAWLEEIRSAIHSRVPEPADEDWDLDEMDAAKVLTKKKNWSAPGPDRLANFWWKRANSLHKGVATAFQVISRSDEEYPQWFSEGKTSLIPKPGIFSSDNQRPITCLNTIYKWYTSCLLVPTDKHLNHYELMEGAQRGARAGCSGTVDNLLIDRIVTLDCHRRKRNLSMGWVDVKKAYDSIDHGWLEEMMLMHRFPTWLCRAIQNLSRSWSTRIVTTTRKGREVSDIIRFRKGLPQGDALCPRLFTVCLNPIAWKIRATEGYRLSKPIDTKVTDLLYIDDLKIFAASESRLNCVMKSVRPAMEDVGLQWNPKKCAVVHFKRGTHVADSAGLKVDGNAKIPSLEDGQQYKFLGVLESLKQEEKLALQSAAKEYLRRLSVIWTSPLSDYHRVVASNQFAMPAMSYYMWTQHWPITDLKQIDREARKIVVENGGKHPCGSTSLLYLSRDKGGRGMRSIETEYKETKIKAAANLYQNRDPAMKIVRDFEERAESMEHQALTKEAAAYAKEYGLELQLEYPDPVCVTEEGEVIPGKKVKNILKRHRESRAREEVKEQRWQGKLVTERERDEELSAERCFWWLSDWRTCPTHTIAGMFELYEQLLPTRLYTIHKTRVSDSGDSTWRLCGTAPEGMAHILSACPALAQTKYLARHDAVLKVLFFEIIFDLGLIDSVPPWYSPIKPQSVYETAEVQAYWDVPVYGEYQELRANRVDARIVNNRDKQVIALEMSCPWVSNRGKKTSEKTMKYAPLRWELKQRYPGYEINQCNIILDVLGGWSKDLDDTLQKLVGSKAKGVLKKMQKACLSGTLNIARTFKVII

SEQ ID NO: 3373 - protein, 1017 aa, Acropora gemmifera
MEQHQVSPRENPFSYLWIVNCVLYSVVMAFLLNKGWKKQRSGTSGGARKQHKWKREYEKRVLEVRKKISIAEAELIRLKENRKITKKGKRNRAFLEQECKGLSAVKLVSYMEKQKSILRKLKRGFSRSKKQEEARVLNQQFQTDASRVYANMREIVNKDKENDRPRYIADDQANHGEREMFNNIEEASEFWRTLWETEGTGDRNAAWLEEIRSAIHSRVPEPADEDWDLDEMDAAKVLTKKKNWSAPGPDRLANFWWKRANSLHKGVATAFQVISRSDEEYPQWFSEGKTSLIPKPGIFSSDNQRPITCLNTIYKWYTSCLLVPTDKHLNHYELMEGAQRGARAGCSGTVDNLLIDRIVTLDCHRRKRNLSMGWVDVKKAYDSIDHGWLEEMMLMHRFPTWLCRAIQNLSRSWSTRIVTTTRKGREVSDIIRFRKGLPQGDALCPRLFTVCLNPIAWKIRATEGYRLSKPIDTKVTDLLYIDDLKIFAASESRLNCVMKSVRPAMEDVGLQWNPKKCAVVHFKRGTHVADSAGLKVDGNAKIPSLEDGQQYKFLGVLESLKQEEKLALQSAAKEYLRRLSVIWTSPLSDYHRVVASNQFAMPAMSYYMWTQHWPITDLKQIDREARKIVVENGGKHPCGSTSLLYLSRDKGGRGMRSIETEYKETKIKAAANLYQNRDPAMKIVRDFEERAESMEHQALTKEAAAYAKEYGLELQLEYPDPVCVTEEGEVIPGKKVKNILKRHRESRAREEVKEQRWQGKLVTERERDEELSAERCFWWLSDWRTCPTHTIAGMFELYEQLLPTRLYTIHKTRVSDSGDSTCRLCGTAPEGMAHILSACPALAQTKYLARHDAVLKVLFFEIIFDLGLIDSVPPWYSPIKPQSVYETAEVQAYWDVPVYGEYQELRANRVDARIVNNRDKQVIALEMSCPWVSNRGKKTSEKTMKYAPLRWELKQRYPGYEINQCNIILDVLGGWSKDLDDTLQKLVGSKAKGVLKKMQKACLSGTLNIARTFKVII

SEQ ID NO: 3374 - protein, 1059 aa, Acropora florida
MDSSDLILARVNTSPGEFGEREFDTRIKERPTKRDLDNINQTITEIMKQASPGENPFSYLWIANCVLYSVVVAFLLNKGWKKQRSGTPAGGASKQQEWKRVYEKRVVEVRKKISIAQAELERIKENRKITKKGKRNRAVLEKECKGLSATKLVSFMEKQKAILRKLKRGFSRSQKNEEARILNQQFQTDTSKVYANMRELLNKDKEDERPRYTASDQNTQADKEMFNNVEEASEYWRNLWESEGTGDRCASWLEEIRSAIQRRVPPPTEEDWDLDPAVAAKVLAKKKNWSAPGPDRLANFWWKRAESLHVGVATAFQTISSIDGEYPLWFSEGKTSLIPKPGEFTSDNQRPITCLNTMYKWYTSCLLVPTDKHLDDYDLMEGAQRGARAGCSGTIDNLLIDRMVTLDCHRKKRNLSMGWVDVKKAYDSIDHGWLEEMMIIHRFPTWLCRTTKYLSRSWSTRIVVTTRNGREASEIIKFRKGLPQGDALCPRLFTVCLNPIAWKISASEGYRLSKPIGTTITDLLYIDDLKIFAASESKLSSVMNSVRAAMEDVGLIWNPKKCAVAHFKRGVRVPESTGLLMSDGNVKIPTLEDGQQYKFLGVLETLRQEEKIVLRCAAREYLRRLSVIWSSPLSDYHRVIASNQFALPAMSYFMWTQHWPITELRQVDRDARKIVTEGGGKHPCGTTSLLYLPRDKGGRGLRSVETEYKETKVKAAVKLYQNRDPAMKMVREFEEQAESKGYQSMTKEAGKYAEEYGLQLQLKHPDPVCVTEEGEVVPGDKLKTRLRKLRESRMEGVVEEQKWHGKLITARKEECFWWLNAWRMCPTHTIAGMFEIYEQLLPTRLYAIHKTQASPNSDPTCRLCGTAPESMAHILSACPALAQTKYLARHDAVLKVLFFDIMEDLGLIEASPPWYSPIKPQPVYEGAYAQAYWDVPVFGEYQDLRANRIDTRIVNHQEKKVITMDMSCPWVSNRQKKTSEKTMKYAPLRWELKQKYPGYEISQYNIIVDVLGGWSTDVEVAVKELYIHIHIFNCTLPFDSSFTSRSTGHALAPCVPLTV

SEQ ID NO: 3375 - protein, 907 aa, Acropora yongei
MEKQKAILRKLKRGFSRSQKNEEARILNQQFQADASKVYANMRELLNKDKEDERPRYTTSDQKTQEDKEMFNNVEEASEYWRNLWESEGTGDRCASWLEEIRSAIQRRVPPPTEEDWDLDPAVAAKVLAKKKNWSAPGPDRLANFWWKRAESLHVGVATAFQAISSIDGEYPLWFSEGKTSLIPKPGEFTSDNQRPISCLNTMYKWYTSCLLVPTDKHLDDYDLMEGAQRGARAGCSGTIENLLIDRMVTLDCHRKKRNLSMGWVDVKKAYDSIDHGWLEEMMIIHRFPTWLCRTTKYLSRSWSTRIVVTTRNGREASEIIKFRKGLPQGDALCPRLFTLCLNPIAWKISASEGYRLSKPIGTTITDLLYIDDLKIFAASESKLSSVMNSVRAAMEDVGLTWNPKKCAVAHFKRGVRVPESTGLPMSDGNVKIPTLEDGQQYKFLGVLETLRQEEKIVLRCAAREYLRRLSVIWSSPLSDYHRVIASNQFALPAMSYFMWTQHWPITELRQVDRDARKIITEGGGKHPCGATSLLYLPRDKGGRGLRSVETEYKETKVKAAVKLYQNRDPAMKMVREFEELAESKGYQSMTKEAGKYAEEYGLQLQLNYPDPVCVTEKGEVGDKLKTRLRKLRELRMEGVVEEQKWQGKLLTARKEDGDLNTDQCFWWLSEWRRCPTHTIAGMFEIYEQLLPTRLYAIHKTQASPTIDPTCRLCGTAPESMAHVLSACPALAQTKYLARHDAVLKVLFFDIIEHLGLIEASPPWYSPSKPQPVYEGAHAQAYWDVPVYGEYQDLRANRVDARIVNHQVKKVIAMEMSCPWVSNRQKKTSEKTMKYAPLRWELKQKYPEYEISQYNIIVDVLGGWSTDVEVAVKELVGRRHRDVLKKMQRACLSVTLNIARTFKVATH

SEQ ID NO: 3376 - protein, 1010 aa, Dinoponera quadriceps
MDSSNPGPSGSRGPVTRSRPLPPGEAAELTDDYACEFPDCGRSFGTKSGRSLHYRRAHPDWADERLKTVPVKARWSDEETRLLARKEVELVRRGIKFLNQELVLAFPDRTLESIKGKRKQNAYRQIVQAFLEEDDGNLAGCRLAEVEVLRPASENYCLSIMEHIRGLPPLTCDGFNPRRLNRICDSLTTKDPTAILDDLTLYLLDVFPVKARKSKTDERDTERPTTKKQARRAEYARVQDLFRKNRSKCLRMLLDDITGVETPLKEVMEPFWRTVMTVEEDTSPGLTGVRPTMADLWAPVTPEEIRRSLPANTTSAGPDGLSARLLRSVPLGILCRILNIMMFCRKAPRHLLESITSLIPKKSNASLPGDFRPITVSSVILRTLHKVLASRLSRMLEFDPRQRAFRPTDGCSDNVFLLDLVLRYHHQRHRSLFVASLDIAKAFDSVSHRTVLETLQVMGVPVPMIEYIEDIYSNSTTRLCCDCWRSDRIRPRCGVKQGDPMSPVIFNMIIERLLREIPEGVGARVGDVTVNAAAFADDLLLFASTPVGLQQALDRTARFLSSCGLHINAAKCMTVSLRNVPHDKKTIVDKDTVFLCEGKVLPALKRSDEWKYLGIPFTPEGRAKIDLTAQLSDALNKLTRAPLKPQQRLFAVRTVVVPRLYHQLELGNTSVSMLRKCDRMLRQAVRGWVSLPPDAPNAYFHASVRDGGLGIPSVRWNAPLRRLNRIRKLPIQRDNDTPNSFLQREVARCLNRLREGTQEIITFAGINDRWAKLLYAGVDGCGLKESAKTPQQNIWIREGTRFLTGRDFVMSCKLRINALPTRSRTSRGRAKERYCRGGCCRPETLNHILQQCHRTHGVRVKRHDALVSYIGRALQRREYVVHEEPRLKTDQGIRKPDIIAVLGEIALVIDGQVVNDQIDLDDSHRKKTDRYKNIEDLIKREYRVRTVKFTSITLSWRGIWSAASANSLVGLGIIRKSSLKVLSSRTIIGGIACFRQFNKTTIVNRRQGIG

SEQ ID NO: 3377 - protein, 1398 aa, Dolomedes plantarius
MKCRLWLIFILAWVIGRRLAKKWVLLPTLTLGKIPLWALLLRSRPRPQCALTSTLRTPINPSPDQSGSLCSTPLGIESEKAGTAAEVVQPHTPDDSPTIRTDRSGSGSPTIRTDRSGSGSPTIRTVRSGSEGRNRCPTVDNEPGKVISLREAVEGGLIDTTQRDSEEENNNCNSPASSLAISLTLSDESQSSLFEDNTPFITVTRKKRTPPKSTNGNTKVSNKMSASQGSTNNSGNSRAGRDVNLNKNSPPNSGEAVHPNRFPVTNTRRGKILDLVFPFAKALRCTEAGCATPFVCKDWTAEKQSLKRHLKLQHGLQEVFEHLWCVYCERRIRSKVSQHGCFRGMDLSSPRNETFQCQKCPSSFPSYYGLKHHLRTHINDRFVPSRDAPRDNVNTSNRPRDTSGSNLLNQRSNVSRPSASPPSPEQMTPSSQGSAGSQDLEIAEHDLSGVADDVETTDNNQQVQGNDFAEAALDGEPHPDSPSPSAEYTELFKHILRAEEFDWDTFEALLADYIQFARDHVNIRDDVNRESGVSRKIHANDPQAIQRLYRRNRRRAVRIITKNEGKRCELEHSVLGNYFCPSAPPQPERDLFTHDSPASDPVDTHQFSAQEVWAKLRSAENSAPGPDRLTYHHWRKVDPEAKTLAVIFNCCLLNSRIPDTWRESTTILIPKDGSGESPSDWRPIALGNTIVKTFTGCLGRRLVSWCEDNSILCPAQKGFLPHDGAFENNYIVQRKFQEARRLHKDLCLMSFDISNAFGSVPHDAIFFALQSAVAGDKFTNLIRDLYKDTVTSFLTDSGVSEKFPVNAGVRQGCPLSGILFNIAIDPALRLIHDLSEGINIVAFADDLLIFADSTTELQARANKLANGLSLLGLRVNPKKCASLHLRGNPIGCANTKFAVCGTPVTTLLDGDHLKFLGKPVGYNIAKDPGNLQDLMRSGREILNSFLAPWQRLDALKSFFYPSLHYAQRTRQFPKGDWSSLDNGLKPLIKKTLNLPDHATTDYIYGNAKRGLIGIPLAAEDSDIALIDGAFKLLTSGDERVADQTWAELRELVGTRSGCEPTNSEVGEYLSGKAYTKTNPISSIWTLARSASRRLGIAWNIHEDNSMSISIGELAISGRKRIFKDLRLYFRDLRTEKFAARPHQGKTFPCFSLSRASTHFLRDGDYTRFADWRFIHKARTGTVTLNANDYSGPTNPEDKRCRRCDFPEETLPHVVNHCRPILPLTVKRHDAIVKRLKCAAANKWGIIWDNQLVAGTSLKPDLVIAKGNEQAIVIDVTVPFENGPEAFTTARRQKLEKYRPLIDKLTGRFQKVQVEAVVVGALGSWDRDNDKLISKICSRKYASKMRKLIVSDTIRATRDIFVEHLTGIRQVPSAREQRYQKKINGAISAARNQETNEDE

SEQ ID NO: 3378 - protein, 1094 aa, Coccinella septempunctata
MVMRAHFIATDLVGSSGRTYRQLLVAIWEDMCPNRPAYAQLLSNRVRWIVNNQKLSRAELECVRAGCFPCIIQEQTAAAQENSPRRSSPRVRRSELFVVEQRDDAVEGCFVSNLLKFSGVDADKRPKLPRMRYSKMLLDSVKSVNRIIPKHLEKIESLEGLVDVVYAGALTVCELLGQSIGQTHVSRPPVEPPWKRRLENKIKYLRKKIGVLHTYLHMETPTSKIIKAVRKITSEFRVRRKDPAFRDKTIIIADNLKQKIKALGHRIRRYNERVKRYKNNRLFYVNQKQFFRDIEVQNPKEQTHLDPTKAHQFWSKIWSERITHDNQAYWMSEAQSKISNAKMQEINISESDIADVLKGCNNWASPGPDNIHNYWWKYLTTVHEKLANIFQKALSDPEVIPKFLTRGVTYVIPKGGDLKDPKNYRPITCLSSTYKILTAIITKAISKHLRVHKLMAQEQNGCRIKTKGCKELLVIDHILTKQARKKLRNISVAWIDYRKAFDSVPHTWLLKVLEIHGIAKNVIDLLGHLMKTWRTSLLIRAASRITETEQIPINRGIFQGDTLSPIWFCLALNPLSMLLNNTKYGYVINKPRNIIITHHLYMDDLKLYAANAEQLRRQLEIVAAFSDSIRMEMGVDKCAVLDVRRGKIHYTGPETTLLNSVAIPALEHDQSYKYLGIKQALDIKTPEMKDLFREKLYKRLNLLLKAKLNSKSLFTAINIWAIPSITYSFGILTWSTTELREIDRKIRTTLTRYGVHHPHSSSIRLYLPRHRGGRGLLNLESTHRETVESLRHYFFADNSPLIQAIREADENISPLKLSNLEYHMVGSTLDERVEEWSAKALHGRYPGNLKSKDVNQMESLTYLRAGYLFPETEGRLLAIQDQVMPCRMYLKHIAGQDIPSDRCRKCSQAAESIQHITSSCPILAPRDYLDRHNAMGKIYHQQIALNLGLLQNEVQQHVYEPKSLLQNQRYKMYWDATLVTDRGVAHNRPDIALFDNEKETCFLLDFTIPADDNLARAYSEKVTKYADLAFQLRELHNLKSISVLPLIISVNGLVEKHLPENTSKLCLDHAVISSSQKQVLLSTARIVSRFLQGL

SEQ ID NO: 3379 - protein, 1092 aa, Coccinella septempunctata
MRAHFIATDLVGSSGRTYRQLLVAIWEDMCPNRPAYAQLLSNRVRWIVNNQKLSRAELECVRAGCFPCIIQEQTAAAQENSPRRSSPRVRRSELFVVEQRDDAVEGCFVSNLLKFSGVDADKRPKLPRMRYSKMLLDSVKSVNRIIPKHLEKIESLEGLVDVVYAGALTVCELLGQSIGQTHVSRPPVEPPWKRRLENKIKYLRKKIGVLHTYLHMETPTSKIIKAVRKITSEFRVRRKDPAFRDKTIIIADNLKQKIKALGHRIRRYNERVKRYKNNRLLYVNQKQFFRDIEVQNPKEQTHLDPTEAHQFWSKIWSERITHDNQAYWMSEAQSKISNAKMQEINISESDIADALKGCNNWASPGPDNIHNYWWKYLTTVHEKLANIFQKALSDPEVIPKFLTRGVTYVIPKGGDLKDPKNYRPITCLSSTYKILTAIITKAISKHLRVHKLMAQEQNGCRIKTKGCKELLVIDHILTKQARKKLRNISVAWIDYRKAFDSVPHTWLLKVLEIHGIAKNVIDLLGHLMKTWRTSLLIRAASRITETEQIPINRGIFQGDTLSPIWFCLALNPLSMLLNNTKYGYVINKPRNIIITHHLYMDDLKLYAANAEQLRRQLEIVAAFSDSIRMEMGVDKCAVFDVRRGKIHYTGPETTLLNSVAIPALEQDQSYKYLGIKQALDIKTPEMKDLFREKLYKRLNLLLKAKLNSKSLFTAINIWAIPSITYSFGILTWSTTELREIDRKIRTTLTRYGVHHPHSSSIRLYLPRHRGGRGLLNLESTHRETVESLRHYFFADNSPLIQAIREADENISPLKLSNLEYHMVGSTLDERVEEWSAKALHGRYPGNLKSKDVNQMESLTYLRAGYLFPETEGRLLAIQDQVMPCRMYLKHIAGQDIPSDRCRKCSQAAESIQHITSSCPILAPRDYLDRHNAMGKIYHQQIALNLGLLQNEVQQHVYEPKSLLQNQRYKMYWDATLVTDRGVAHNRPDIALFDNEKETCFLLDFTIPADDNLARAYSEKVTKYADLAFQLRELHNLKSISVLPLIISVNGLVEKHLPENTSKLCLDHAVISSSQKQVLLSTARIVRRFLQGL

SEQ ID NO: 3380 - protein, 1104 aa, Coccinella septempunctata
MRWSKEDNCMVMRAHFIAMDLVETRNTTYRSLLMDIWKDICPDRPVYAQLLSNRVRWILDNQKLSRAELEYIKNGCYPGIIQQEDSGSSQATRARSSIGIRKSGLYVREREPNAVESSFVGNLVRFSGGAADRRPKIPRLKYSRSAYDLVREVNSILSRYSTDVSTFGELVDMVYAGAVTVCESLGQRIGCHQSAPRAPSTPPWKLRLEQKITAMRKKIGVIHTYLNSASPTSKVIKSVRRVASESRIKRRDPSFKEKLAIVSDHLKQKIKALGNRIRRYNERVKRYRNNNLYYRNRRRFFRSLDGDDKTETDCLEPKAAHEFWSSVWSRESAHDEKAYWIEEVRQRIPRESMDAIMIQPSDIGEVLKRSNNWAAPGSDKLHNYWWKYFNSVQDKLALLLQEALNNPASVPGFFTQGITYLIPKDGDRKDPKNYRPITCLSSVYKILTGVLTKYINGHIRKHHLMTEEQGGCRERSKGCKELLVIDHVVTKQARKKLRNISVAWVDYKKAFDSVPHTWLLKVLEMHGVSPGVIELLRHLMKTWRTTLFVRSGDSLIESGQIKIARGIFQGDTLSPIWFCLALNPLSIMLKNTKYGYVINKSRQIAISHRLFMDDLKLYGANSDQLRRMLELVAAFSESIGMEMGVEKCAVLDVRRGRIENAEEAVVLMNNTEIPVLDEGVPYKYLGIKQALEIKTQEMKKSFREKLFTRIGLLLRAKLNSKSLFTAINIWAIPSMAYSFGVINWSATELRSLDREVRSILTKYGVHHPHSSTLRLYLPRHRGGRGLLSLEDIHWKSVSDLRQHFLKQSSPLFGAIREADVGLSALKLSEPEYQVPTYCVEERIEEWSAKALHGRYPSHLGSEEVDGVESLTYLRAGYLFPETEGRILAIQDQVVPTRMYMKHIAGQDIPSDRCRKCSQAAESIQHVTSSCPILAPRDYLERHNAMGKIYHQQIALKLGLLGEEVQQHLYKPKTLLENERYKLYWDVTLVTDRGVAHNRPDVALFDKQEQTCLLLDFTVPADDNLARAYSEKISKYSDLAYQLRDVHNLKAISILPLIISVNGLVEKHLPDNTARLCLDPTVISSSQKQVLLSAARMVRKFLQGP

SEQ ID NO: 3381 - protein, 1094 aa, Coccinella septempunctata
MVMRAHFIATDLVGSSGRTYRQLLVAIWEDMCPNRPAYAQLLSNRVRWIVNNQKLSRAELECVRAGCFPCIIQEQTAAAQENSPRRSSPRVRRSELFVVEQRDDAVEGCFVSNLLKFSGVDADKRPKLPRMRYSKMLLDSVKSVNRIIPKHLEKIESLEGLVDVVYAGALTVCELLGQSIGQTHVSRPPVEPPWKRRLENKIKYLRKKIGVLHTYLHMETPTSKIIKAVRKITSEFRVRRKDPAFRDKTIIIADNLKQKIKALGHRIRRYNERVKRYKNNRLFYVNQKQFFRDIEVQNPKEQTHLDPTEAHQFWSKIWSERITHDNQAYWMSEAQSKISNAKMQEINISESDIADVLKGCNNWASPGPDNIHNYWWKYLTTVHEKLANIFQKALSDPEVIPKFLTRGVTYVIPKGGDLKDPKNYRPITCLSSTYKILTAIITKAISKHLRVHKLMAQEQNGCRIKTKGCKELLVIDHILTKQARKKLRNISVAWIDYRKAFDSVPHTWLLKVLEIHGIAKNVIDLLGHLMKTWRTSLLIRAASRITETEQIPINRGIFQGDTLSPIWFCLALNPLSMLLNNTKYGYVINKPRNIIITHHLYMDDLKLYAANAEQLRRQLEIVAAFSDSIRMEMGVDKCAVLDVRRGKIHYTGPETTLLNSVAIPALEQDQSYKYLGIKQALDIKTPEMKDLFREKLYKRLNLLLKAKLNSKSLFTAINIWAIPSITYSFGILTWSTTELREIDRKIRTTLTRYGVHHPHSSSIRLYLPRHRGGRGLLNLESTHRETVESLRHYFFADNSPLIQAIREADENISPLKLSNLEYHMVGSTLDERVEEWSAKALHGRYPGNLKSKDVNQMESLTYLRAGYLFPETEGRLLAIQDQVMPCRMYLKHIAGQDIPSDRCRKCSQAAESIQHITSSCPILAPRDYLDRHNAMGKIYHQQIALNLGLLQNEVQQHVYEPKSLLQNQRYKMYWDATLVTDRGVAHNRPDIALFDNEKETCFLLDFTIPADDNLARAYSEKVTKYADLAFQLRELHNLKSISVLPLIISVNGLVEKHLPENTSKLCLDHAVISSSQKQVLLSTARIVGRFLQGL

SEQ ID NO: 3382 - protein, 890 aa, Adalia bipunctata
MRKKIGPLHTYLSVSDPTTKLTKAVRKVASEFRVKRRDPHFKEKILVVADTLKQKIKALGSRIRRYNERVKRYRNNKIFFQNQKQFFRDLERGSVSTIDHVELRSAHQFWSRVWSGHASHDRGAYWIDEAQERIPKVGMGEMSITEEDIRWALKRSNNWASPGSDKLHNYWWKYFTSVHRSLAQQLQKALLEPTVIPEFFTSGITYLIPKEGDLSDPKNYRPITCLPSVYKILTAVMSHYINKHLRDNNLMAHEQNGGRIRTKGCKELLVIDHIVTKQAQKKLRNISVAWVDYRKAFDSVPHSWLLKVLEMHGINKQITNLLENLMKTWRTSLLVRSGDKLMESERISINRGIFQGDTLSPIWFCMALNPLSMLLKNTNYGYIINKPNNISISHHLYMDDLKLYASSSEQLRRQLEIVSRFSDSINMQLGIDKCAILEVKRGKIQDTGHTTTLMNNISIPNLNPNEPYKYLGIRQALSIKTSEMKDLFKEKLYKRVNLLLKAKLNSRSLFTAINIWAIPSISYSFGVLTWSATELKEMDRALRGILTKYGVHHPHSSSIRLYLPRHQGGRGLLSLETIHNENIDSLREYFLGKNSPFFNAVRDADQGISALKLSQAGYQIPGRSVDEMLEELSAKALHGRYPGNLKNRDVNKVESLTYLRAGYLYPETEGRLMAIQDQVMPTRMYLKHITKQNIPTDRCRRCSQAAESIQHITSSCSILAPIDYLDRHNSMAKIYHQQMALKLGLLKSESPQHLYRPQTLLQNQRYRLYWDATLITDRGVAHNRPDITLFDTTEETCLLLDVTIPADDNITRAYTEKIVKYGDLAFQLRELYNLKKINIIPLIISVNGLVERHLPENTQRLCLDNNVISASQKQVILSTIRTVRKFLQGP

SEQ ID NO: 3383 - protein, 1124 aa, Coccinella septempunctata
MTPGCHSATRPQQDRRTRWTMEENYLVMRAHFIATDMVERSNKTYRQLLVEIWGDIYPSRPVYAQLISNRVRWILNNQKISRAELHIIKASCYPNVMMEEVPAESQHTQARKSSPRVRRSGIFVRRGQEDTLERQFMSNLVKYSGIAPGGRPKIPRLEYSRHVLQIIDSLNTIITRHVSNVNSLEELVDIVYAGAVTICETHGREIGQNTGQQNHNKTHDTPPWKERLQNKITNLRKKIGVINTYLNKPNPSKKVTKAVRKVASEFKIKRRDPSFQQKISVTCDRLKQKIKVLGSRIRRYNERIKRHINNKLFYKNQKQFFRNLVHENSTEDGHLDSKLAHQYWSGVWSEKATHDVSAYWIDEAQSKIPNVQMEDIEINEGDIAEALRRSNNWASPGVDKLHNYWWKYLKSVHQPLAKLFQKAFTDPSVIPEFFTQGITYLIPKQGNLDNPENYRPITCLPAIYKIFTTILARQINKHIRRNNLIAQEQNGCRLNTKGCKELLVTDYIVTKQARKKLRNISVAWVDYKKAFDSVPHSWLLKVLEMHGITPQVIGILKHLMKTWRTKLSIRDGEQVEESEQIRICRGIFQGDTLSPVWFCLALNPLSLLLNNTSYGYVIDKRANTRITHHLYMDDLKLYAASLEQLKRQLEIVAAFSDSINMRMGINKCATLEVKRGKMQDTGQQTTLLNNVTIPTLTDKQTYRYLGVQQALEIKTSEMKDLYREKLHSRLNLLLKSKLSSKSLFNAINIWAIPSITFSFGILTWSTTELREIDRNIRTTLTKFGIHHPHSSKIRLYLSRRQGGRGLLNLEDTHGKHIENLRTYFYKNNSPLFQAIRMADDNLSALKLSSRDYHPTQRTDEELKHEWRSMALHGRYPGHLEKEEINKTESLRYLRAGYLFPETEGRLMAIQDQVMPTRMYLRHIAKQDIPSDRCRKCSQAPESIQHITSSCTIMAPRDYLDRHNAMAKIYHQQMALKLGLLQHEIEQHLYCPQTLLQNERYRLYWDATMLTDRGVAHNRPDITLFDKQRESCFIIDVTIPADDNVSRAYAEKLNKYGDLAFQLKELYNLKSMSIIPLIITVNGLVEHHLIENTERLKLDLNIISQAQKQVILYTTRIVRKFLQGP

SEQ ID NO: 3384 - protein, 875 aa, Adalia bipunctata
MAAQNRPRIPRVQHSKGVFNTIKSLNTILPKHLENVHTLEEVVDLVYAAAATTCELHGRLVGQQSAPKPSTSPPWKIRLDAKITTIRKKVGVLHAYLNTPNPSTKVLKAVRRVASEFRIKRRDPSFRDKISYVCDTLKQKIKALGNRIRRYNERVKRYRNNRIFFQNQKQFFRDLERDSEEAADHVEPDIAHKFWSEVWSENVSHNDHAHWIEEAQSQIPSVHMENIHITETDIREALKGSNNWASPGPDKLHNYWWKYLTSVHGILSRLLHGSLSDPSVIPDFFTLGTTHLIHKDGDPKNPKHYRPITCLPSVYKILTAVLTRYISKHLRDNNLMAQEQNGGRIRTKGCKELLVIDYILTKQARKKLRNISVAWVDYRKAFDSVPHSWLLRVLKMHGVNEQVSNLLGCLMGTWRTSLLIRTGDDTMESKIIKINRGIFQGDTLSPIWFCLALNPLSMLLNNTIYGYTISKGRNIRINHHLYMDDLKLYAANPDQLKRQLEIVSSFSDSIRMQMGVDKCAVLDVKRGKIQNTEHGTTLMNNTTIPALNKNESYKYLGIKQALDIKTSEMKVLFKEKLYKRVSLLLKSKLNSRSLFTAINIWAIPSIAYSFGVLTWSVTELREIDRALRVLLTKYGVHHPHSSTIRLYLPRQQGGRGLLNLETMHDEAVEALRKYFLKKNSPLFLAIREADEKSSALKLSEPELRNSRRSMEELINDWNAKALHGRYPGHLKREDVDKVESLTYLRAGYLFPETEGRLMAIQDQVMPTRSYLKHIAKRNIPTDRCRKCSQAPESIQHITSSCSILAPRDYLDRHNAMAKIYHQQMALKLGLLQQEVPQHLYQPKTLLQNNRYKLYWDATLITDRGVAHNRPDLTLF
